United States Patent Application Publication US 2022/0031776 A1 - sequence listing, part 3

SEQ ID NO: 57 - DNA, 347234 bp, Unknown
  source: /note="Description of Unknown: MKP2_coc_1 Mutant Bacteria sequence"
gccgaccctcggcggcgagcgcagcggccggccgccggagcccggcatggaaactcttgtcgccgccgccttcagccagctgctgggctgcgaggtgaacgatatcgacgccgatttcttcgcccttggcggtcattcgctgctggcgatgcgcctggcggcacagctcagccgccagctggcgcggcaggtgaccccggggcaggtgatggtggcctcgacggtgggcaaactgagcgcgctgctggccgccgatctcagcgatgagcaggcccagcgcctggggctggatacgcttctgccgctgcgcgagagcgacggcccgacgctgttctgcttccatcccgcctccggcttcgcctggcagttcagcgtgctggcgcgctatctcagcccgcgctggtcgattaccggtattcagtcgccgcgcccgcaggggccgatggctagcgccgccagcctcgacgaggtgtgcgagcatcatctgcgcacgctgctggcgcagcagccgcacggcccttattacctgttcgggtattcgctgggcggcaccttagcccaggggattgccgcccgcttgcgccagcgcggcgaagcggtggccttcctcggcctgctggatacctggccgccggagacgcaaaactgggcagagaaagaggccaacgggctggatcccgaggtactggcggagatcgaccgcgagcgcgaagcgttcctcgccacccagcaggggcaagcctccggcgagctgttcagcgccatcgaaggcaactatgccgatgcggtgcggctgttaaccaccgcgcatagcgcgaagtttgacggcaaggcgacgctgttcgtggcggagaagacgcggcaggaggggatggatccgcaggtcgtatggggcccgtgggtgggggaactggaggtgttcagccagaactgcgcccacgtcgatatcatctccccgcaggcctttgaggccatcggtccggtggtcagggagattctggggtaacggttgagttcgggctacagcaggtagcccggctcagcgtagcgcaagccggggaaagaggagattaccggcggcccagcgggaccaccagcggcgtatgcgccaccggatcttcaatgatcgtgcagcgcagaccgtaaatccgttcaatcagatcggcggtgacgatctccttcggcgccccctcggcgacgatcctgccgtcgcgcagggcgatcaggtgggtggcgtagcggcaggcctggttaagatcgtgcagcaccgccgccagggtatagcccttctcgcgattcagctcactcaacagttccagcaggtcgatctgatggctgatgtccagccaggtggtcggctcatccagcagcataatcgccgtttcctgggccagcaccatcgcaatccacgcccgctgccgctggccgccggaaagcgtgtcgacgctctgcagcgccagatcgctgatcccggtcgctcgcatcgccttgttcaccgcctcttcatcttctttgcgccagcgggtaaacagcggctggtgcggatagcgcccgcgggccaccagctcctgcaccgtgatatcgccaggggtggtggcattctgcgccagcagcccgatgcggcgggcaacctctttactggcgtactgctggatctgcgcgccgtcgagccagacgtggccgctggcgggcgtcatcaggcgactgagggtgcgcaatagcgtcgacttgccgcagccgttggggccgataatggcggtgaagtgaccgtcagggatggtcacgttcagcgactcggcgatggtcttgttcccgtaggccagggttaactgctcgccgcgcaaacgggaggggacagcactcattttttgcgggactcctgaatcaacaatgcaataaggtaaataccgccgaggctgacggttaacacgccaaccggcagctgccacggcataaacagccgttgggcgccgtaatcggccagcgccagcagcagcgcgccgcacagggccgactgggtcagtccccagcgggccgtgccgctcaggcggcgggcgatatgcggcgccaccagcgcgataaatgagatcggcccggccagcgccgtcgaggcggcggtgagcaccaccgccaccagcatcagcagcaggcgcgaacgctcgacctgcacccccagcgcgcaggcggtatcgtcgcccatctccagcagccgcatccggcgaaccagcagggcgctgcccaccagcatcaacaggatcagcggcgccgacggccaggttttaccccaggtcaggccgttaagcgatccggcgttccacaggcccgcagaaagggcggtctccagcgaggcgcgcagcagcagccaggtgttgaatgccaccagcatggcgcgcacgccgatgccgataatgatcaggcggaaggtttcgatcccgttgcgccaggccagcagccagaccaccagcgaggtcagcaccccgccggccatcgccgccagggcgatcgccgtcaggttctggccgaagaggaccattgccaccagcacgccgctccaggcgccggtgttaaagcccatcacgtccgggctgccgagcgggttacgggtcagcgactggaaaatggcgccgctgacgccgagcgcggcgccgatgagcagcgccattaacacccgcggcagccgccattcgttcaccaccatcgcgacgttgcgcggcgcatcgccgaacagcgccgagaacacctggtcaatcgtcaggggcaccgggccttgcgccagcccgagcagggaaatcagcaggctggcggccattagcagcagacagctggctatcaggcggcgggacggggcaatcacaggccacctccccgcggctggcggcgcaccagccagatcagcaccggcgcgccgagaaaggcgctcaccaccgatacccgcagttcgccgggcaccagcaggcggccaatcacgtcggcaaacagcagcagggccggggtggcgagcagggtgaccggcagcgaccagcgatgatcggcccccaccagccagcgcgccatatgcggcatcatcaggccgataaaggcgatggggccgacgacggcggtggcgctgccgcacaggacggtgatgacgatcaggccgatcagctgggtgcgggcgacgcggctgccgagggcggtggcggtatcgttgcccaggctcaggctgttcagcgcccggctcagcagcagagcggcgatccccgccaccactaccggcagcaggacaattttcagcgtttgcagggtgcggatatccagcgaaccggcctgccagaagcgtagctgatcgtagacgtccgggttgagcagggcgatgccgttggacagcccctcgagtaccgccgcaagggcgaccccggcgagagtgaggcgcaccgggctcagctgaccgccgccctggctgccggtaaaggctaccagcagcgaggcgcagagcgcgccgcagaatgccagcagcagctgctcctgcggggaagtgatcccaaacagcgccgcgccgaggacgatggcgaagctggcgccggagttgaccccccgcaggccggggtcggccagcgggttgcgggtgagcgtctgcatcagcgcgccggcgaggccgagggcgacgccggccagcagaccggccagagtgcgcggcaggcgcgcgtccagcacgatagtgcaatcagcgctttgacaggttccgctgaaggcggtgaataccgtgccgatcggcaacgatttggcgccgatggtcaggctaagcgcggcggctaaggcgagtaatagcaacaatccgggcacggcgacagagcgtaccgcggtcgtagaaaacgacataactgacatccctgatatgataatgatagtaattatcgttatcgattttattcagctatggtagcatgacccacagtaaaaagggtattaaaaataacgacaaggcgctgtaatgaaccgacaatcctggctgctcaatctcagcctgctgaaaactcacccggcgtttcgcgccgtttttatcgctcgctttatctctattctgtcgcttggcctgctgggcgtggccatcccggtgcagatccagatgatgacccattcgacctggcaggtcgggctgtcggtgacgctgaccggggcgtcgatgtttgttggtctgatggtggggggcgtgctggctgaccgctatgaacgtaaacgcctgatcctgctggcgcgcggcacctgcggcgtgggctttgtcggcctgtgtctgaacgccctgttgccggagccgtcgctggcggcgatctacctgctggggatctgggacgggttcttcgcctcgttgggggtgaccgcgctgctggcggcgaccccggcgctggtgggacgggaaaacctgatgcaggccggggccatcactatgttgacggtgcgcctgggctcggtgatttcgccgatgatcggcggcctgctgctggccaccggcggcgtggcgtggaacttcggcctggcggcggcggggacctttatcaccaccttaaccctgctgcgtctgccgcagctgccgccgcctccgcagccgcgcgagcatccgctgcgctccctgctggcggggctgaccttcctctgccggagcccgcttatcggcgggattgcgctgcttggcggtctgctgaccatggccagcgcggtgcgggtgctctatccggcgctggccggtagctggcagatgtcggccggacagattggcctgctgtacgccgctattccgctcggtgcggcgctgggggcgttgaccagcggccagctggcccagacggtgcggccgggcgcgctgatgctggcgaccacggtgggatcgtttgtcgccattgcgctgttcagcctgatgccgcactgggcattgggcgcgctgtgcctggcgctgtttggctggctgagcgctattagctcgctgctgcagtacaccctgattcagacccagacgccggaacatatgctcgggcggattaacggtctgtggaccgcgcaaaacgtcaccggcgacgccatcggcgcggcgctgctcggcggcttaggggcggtaatgacgccggcggcatccgccagcgccagcggctgggcgctggcgcttgtcggtgtgctgctggttgggctgctacgcgagctgcgccgtttccagcgcccggaaattgtcaacgaaagttaagtcggatgcgcttgcccggtggcggctacgccttaccgggcctggggtacggcaggccggtacaagctcagtaggccgggcaagcgcagcgccgcccggcaaagagttcaggttgcgtgccccggcctgatgcccggtggcggctgcgccttaccgggcctacggtctggactgggggacgctggcattgtaggccgggcaagcgcagcgccgcccggcaagatgttcaggctgcgtgcccggcctgatgcccggtggcggctgcgccttaccgggcctggggtacggcaggccggtgcaagctcagcaggccgggcaagcgccgcgccgcccggcaaggtgtgcaggccgggttcccggcctgatggcgcagcccgcgttagccgaacaggctggagagacgctggagcaccagaagagcgctgtagtagtcaaggcggaaggtctcggtgcccagcgggtagacgcgtttgcctgcgaccgccgggagatgcgccagcagcgggttggcgtagatggcatccgcatctttctggtcgccggcgaacaggaacaggctctggccgttcagaccggccgcgaggttctccccgcccagctgcacgatatcgtggcgtttaccctggctatggctggcgggcaggccgcccggcagcgtcgccaggctaaagcccagctgttcgagcatctgcccctgagccgattccggcgtccagatattggcgctgtgcgcggcggcggtatagaccagggcggtcaccggctgcggcggcagtttcattttttcttttaacgaaacgagctgtttattgaagtcggcaatgcgcgcgctggcctgttgttcatgaccggtgatctgccccagctgggtgagcagggtttgccagcttttatcgtcatagttgatgaccagcgtcggggcgatggttttaagctgatcgtacagcggcagtgcggagtcgccaccggtcgcgctcaccaggatcagatccggcatctgggcggccaccgcttcggcgcttggttcgccgatgtacagccgcgccagcttgcgggctttggcaacctcgctccactggcgcagaaagccctggctatcggcgacgcggttgttcggcgtggtcgcgccgctggcgaccaccggagcgtcaatcgccagcagcgaaccggtaagcgtcacgctggtggagacaatgcgcagcggctgactcggcagggtatgcgtcccgtagctgtcggtgacctggcgcggccagtccgccgcctgggctgaggtaattcctaaaagcaacagcatgccggtcagcgcaccgcggcggcagaaagaaaagaagttcacgtcatcgcatcctgatttgaaaggtgataaatgcgtctcattttcaactttgtgtcagcaggatgcaagccaaagtggcggcgccatgacgtaacgcggttgacatggcgggcaataccttttaggttagccaaccaaaatataaatgataattattcttaatatctttatcgtttttggaggatgatatggaaacgtcactggctgaggatgtaaagaaaccgacccggaccctgtcgccggacagcttcttctttatgtcgccgtaccgcagttttaccacttcaggctgcttccgtcgcttctcacagcccgccgttggcggagatgcgctgaacggcgagttccagcagcagatggcggccgcctttgccgaggcccgggcggcggggatccgcaagccggtgatggtcggggctatcccgttcgacacctgtcagccttccgagctctatatccccgagcgctgggaagcgttctctcgcccggaaaagcagcgttccgcccgctatgccgcgccgctggaggcgatggaggtggtggagcgtcgggagatcccggagcaggacgcgtttttagccatggtggaacgcgccgccgcgctgaccgccaccccggaagtcgacaaagtggtgctatcaaggcttatcgatattaccacccgcgaccgcgtcgacagcggcgcgctgatggagcgactgatcgcccagaaccccgccagctttaacttccacgtgccgctctccgacggcggcgtgctgctgggcgccagcccggagctgctgctgcgtaaagaaggacagcacttcagctctctgccgctggccggctccgcccgtcgccagccggacgatgtgctggaccgggaagcaggcaacaggctgttggcctccggcaaagatcgccacgagcacgagctggtgacccaggcgatgaagagcgtgctgggcccgcgcagcagtcagctgtcgctaccggagtcgccgcagctgattaccaccccgacgctctggcatctggcgacgccgatcgcaggcaccgcgctggcggaagaaaacgccatgtcgctggcctgtctgctgcacccgacgccggcgctgagcggtttcccgcatcaggcggcgaagcgcctgattgccgaactggaacccttcgatcgccagctgttcggcggcatcgtcggctggtgcgatgacgaaggcaacggcgagtgggtggtgactatccgctgcgcgcgtctacagcagcgtacgctgcgcctgtttgccggcgcgggcattgttccggcctcctcgccgctgggcgaatggcgcgaaaccggcgtcaaactgaccaccatgcttaacgtatttggcttgaactaagaggcaaggatgattgcatttacccgttggccggaagagtttgcggcccgctatcgtcaaaaaggctactggcaggatctgccgttaaccaatctgatcacccgtcacgcggacaatgacgccgtggcgattatcgatggcgagcggcagattagctaccgccagtttaaccagctggtggacaacctcgcctgctcgctgcagcgccagggactgaagcgcggggagaccgcgctggtgcagttgggcaatgtcgccgagttttacatgaccttctttgcgctgctgcgcatcggcgtcgcgccagtgaacgctttgttcagccaccagcgcagcgaacttaatgcctacgccgcgcagattaaaccggcgctgctgattgccgatcgcgagcacgctctgtttgctgacgatagctttctccacgcgtttatcgcggaacatccttccctgcgcgtcgcactgttgcgtaacgacggcggcgagcgcgatctggcgacggagattaaccgcccggcggataactttatcgccaatccaacccctgccgacgaagtggcctttttccagctctccggcggcagcaccgggacgccgaagcttatcccacgcacccataacgattacgactacagtatccgccgcagcaacgagatctgtgggattaacgctgaaacgcgctacctcaacgcgctgccggcggcgcataactatgcgatgagttccccgggttcgctcggcgtcttcctcgccggcgggcgggtgatcctcgccgccgacccgagcgccacgctctgtttcccgctgattgaacaacatcagatcaacgttgcctcgctggtgccgccggcggtcagcctgtggctgcaggcgattcacgaatggggcagcaacgcccagctgcaatcgctgcagctgttgcaggtcggcggcgcgcgcctgtcagcgaccctcgccgcgcgcattccggcggaaatcggctgccagctgcagcaggtgttcggcatggcggaggggctggtgaattacacccgccttaacgatagcccggagcggatcatcaatacccagggctgtccgatgtgcccggacgatgaagtgtgggtggcggatgccgacggcaacccgctgccgcgcggcgaagtgggccgtctgatgacccgcggcccttataccttccgcggctattacaacagtccgcaacataacgctgaagcctttgatgccgatggattttactgctccggtgatctgatttcgatcgatgaagatggctatatcaccgtccagggccgggaaaaagatcagatcaaccgcggcggcgagaagatcgccgctgaagagatcgaaaacctgctgctgcgccatgaggcggtgatccacgccgcgctggtcagcatcgaagacaatctgctgggcgagaaaagctgcgcttatctggtggtgacctcgccgctgcgcgccgtcgccgtgcgccgcttcctgcgcgagcagggggtggcggaatttaaactgccggaccgcgtggagtgcgttgccgcgctgccgctgacgccggtgggcaaagtcgataaaaaacaattacgtcagtggctggccgaaggcaagctgggctgaaggagaacagagaatggcaatccctaaattacaggcttatgcgctgccggaagccagcgatattccggcgaacaaagttaactgggcctttgagccgtcgcgcgccgcgctgctgatccacgacatgcaggagtatttcctcaacttctggggcgaaaacagcgcgatgatggagaaagtggtggctaatatcgccgccctgcgcgacttctgcaaacagaacggcattccggtgtactacaccgcccagccgaaagagcagagcgatgaagaccgcgccctgctgaatgatatgtgggggccgggtctgacccgctcgccggagcagcagcaggtgattgccgcgctggcgccggatgaagacgataccgtgctggtgaaatggcgctacagcgcgtttcatcgctcgccgctggaggagatgctgaaagagaccggtcgcgaccagctgatcatcaccggcgtttacgcccatatcggctgcatgaccaccgccaccgatgctttcatgcgcgatatcaaaccgttctttgtcgccgacgcgctggcagatttcagccgtgaagagcacctgatggcgctgaaatacgtcgctggccgctccggccgcgtggtgatgaccgaagagctgctaccgctcccagcctccaaagcggcgctgcgcgcgctaattctgccgctgctcgacgaatccgatgaaccgctggatgatgaaaacctgatcgactacggtctggattcggtgcggatgatggccctggccgcccgctggcgcaaagtgcacggcgatatcgacttcgtgatgctggcgaaaaacccgaccatcgacgcctggtgggcgctgctcacccgcgaggtgcaataatggcggcgctggattttcacggccagaccgtgtgggtgaccggcgcaggtaaagggattggctatgccaccgcgctggctttcgtcgaggccggggccaacgtcaccgggttcgacctcgcctttgacggcgaaagctacccgtttgccaccgaaacgctggacgtcgccgatgccgaccaggtacgcgaggcatgcagccggctgttggcgaacaccgagcgtttagatgtgctggtgaacgccgccgggatcctgcgcatgggcgctaccgaccagctgagcgcggaagactggcagcagaccttcgcggtcaacgtcggcggggcgttcaacctgtttcagcagacgatggcccagttccgccgtcagcggggcggggcgatcgtcaccgtcgcctccgatgctgcgcacacgccgcgcatcggcatgagcgcctatggcgcctcgaaggcggcgctgaaaagcctggcgctgaccgtcggccttgagctggcgggcagcggggtgcgctgtaatctggtgtcgccgggctccaccgataccgatatgcagcgcaccctgtgggtcagcgacgatgcagagcagcagcggatccgcggcttcggcgagcagtttaagctcggcatcccgctgggtaaaatcgcccgcccgcaggagatcgccaataccattctgttcctcgcctcttctcacgccagccatatcaccctgcaggatatcgtggttgatggcggctcgacgctgggggcgtaaatggcctggaagcgagagcttacgctggcggcgctgaacgccagcagcgaaaataccatggtggcgcatcttggcatcatctacacccgactggaagaggggctgctggaggcggagatgccggtggatgcgcgcacccatcagccgtttggcctgctgcacggcggcgcctcggcggcgctggcggagacgctgggctcgatggccggttggctgatgaccgaagaggggcagtgcgtcgtcgggactgagcttaacgccagccatcaccgggccgtctccagcgggaaagtgcgcggcgagtgccgtccgctgcatcttggtcgccagagccagagctgggagattgtggtgtatgacgagaaggggcggcgctgttgcacctgtcgtctgggcaccgcggtgctgggctaagaagccgctgtttccccggcttgcgctacgcttagcctggctacggtttctgggccaggaagccgctatttccccggcttgcgctacgcttagccgggctacgtatcggcgcaatggggtagcccggataaggcgcagcgcgccgccatccgggagtgtccctgatcgcgctgcgcttagactggctacggatctgtaggtcgggtaaggcgttagccgccacccgacaaaaaaaacggcaccgttcacggtaaccctttcattcatttacctgccttaagtgatctcgctagcaatgtgagacaaatctctgtgggtgtacggcatctgcgatgtttcggtgttgttaaattctgcgttgtgatctagaaacaaaatgtaacatcctgattaccctaccggtggaccacaacaatgaataattcagggaaataccttatctgggcgctgctctccgtcatcggagccttcgccctcggctatatcgctttaaaccggggtgagcagataaacgcgctgtggattgtcgtcgccgcggtctgcgtttatttgatcgcgtatcgtttctacggcctgtatatcgctaaaaccgtgcttggcgttgacccgacgcggatgacgcccgcggtgcggcataacgatggcctcgactacgttccaaccgacaaaaaagtgctgttcggtcaccattttgccgccattgccggcgcggggccgctggtgggcccggtgctcgccgcgcagatgggctacctgccggggatgatctggatcctcgccggcgtggtgctggctggggcggtacaggactttatggtgctgtttgtttcgacccgccgcgatggccgttcgcttggcgaactggttaaagaggagatgggaccgaccgctggcgtcctggcgctggtggcctgctttatgatcatggtgatcatcctcgcggtcctggcgatgattgtggtgaaagcgctgacccacagtccgtgggggacatacaccgtcgcctttaccattccgctggcgatctttatgggcatctacatccgctatctgcgtccgggacgcatcggcgaggtgtcggtgataggcctggtgatgctggtgttcgccatcatctccggcggctgggtggcggaaagcccgacctgggcgccgtggtttgattacaccggcgtacagctgacctggatactggtgggctacggatttgtggctgcggtactgccggtctggctgctgctggccccgcgcgattatctctccaccttcctgaaaatcggcaccatcgtggggctggcgattggcatcctgattatgcgcccgaccatgacgatgccggcgctgaccaagttcgtcgatggtaccggcccggtatggaccggcaacctgttcccgttcctgtttatcaccatcgcctgcggcgcggtctccggcttccatgcgctgatctcctccggcaccacgccgaaaatgttggccaacgaaagccaggcctgctttatcggctacggcggcatgttgatggaatccttcgtcgctattatggcgctggtggcggcctgtattatcgatccgggcgtctacttcgcgatgaacagcccgatggcggtgctggcgccggcgggtaccaccgaggtggtcgcctcggcagcgcaggtggtgagcggctggggctttagcattacgcctgatacgctgcatcaaatcgccagcgaggtcggcgaacagtcgattatctcccgcgccggcggcgcgccaacgctggcggtggggatggcctacatcctgcacggctcgctgggcggactgatggatgtctcgttctggtaccacttcgccattctgtttgaggcgctgtttatcctgacggcggttgacgccggcacccgcgcggcgcgctttatgctgcaggatctgctgggcgtgattagcccggggctgaaaaaaaccagctcgctaccggccaacctgctggcgaccgcgctgtgcgtcctggcttggggctacttcctgcatcagggggtggtcgatccgctgggcgggattaacaccctatggccgctgttcggtattgccaaccagatgctggcggggatggcgctgatgctctgcgcggtggtcctgttcaagatgaaacgccagcgctatgcgtgggtggcgctgctgccgaccagctggctgctgatctgtacgttgaccgccggctggcagaagtcgtttagcccggacaccaaagtcggtttcctggccatcgccaataaattccaggcgatgatcgacagcggcaacattccgccgcaatataccgaatcacagctggcgcagctggtgtttaacaaccgtctcgatgccgggctgaccatcttctttatgattgtggtggtggtgctggcgctattctcgattaaaaccgcgctggcggcgctgaaagaggataaaccgacggcgaaagagacgccgtatgagccaatgcctgaaaacctggacgcgattgagacccaggcgaaaggggcgcattaaccggtgtgccgggtggcggcttcgccttacccggcctacatttccgatcctccctctccctttgggagaggctcggggtgagggatacaaaagagaaatgacttatgtttgacaccctctccaaagcaggaaaatatttaggccaggccgccaaaatgatgatcggcgtgccggattacgataactacgtcgagcacatgcgaataacccacccggatcagacgccgatgacttatgaagagttctttcgcgaacgccaggacgcgcgctacggcggcaagggcggggcgaagtgctgttaaccctctttcggcagatagaggctgatctgctcctgagtacagccgtaaatcgccgccagcttctcgcgggtgcgcttttgcggacgggagtccagcgcttccagctgtgacaccgcggactggctgatgccaagcttttcggctacctcctgctgggacatcccgcgcaggatgcgccacgcggcctgcaggctgacgttttctttatgcatcacgtcgcatacttcgcccggcagcatgacgtcatcatagatatctgattcataaggaatatcttcccagtcgctttcatcctcgtcgtcgtactccagccgagccaggcgcatacgaaagtaatcgctgtaaggaatgacgacatactggtcttttccttcttcatccttgatgtactgaatagtcatattcggtatgttcctcatgaaggtaggtggtggtggttcggcgtttaaccgccacgacgtagcaggtatcgcccggcggatccccaaaggtgtagatgactctgtaatcacctaatcgcagccggtagtggttttcgggagaggacaattttttgatatccgagataggtgaagctttatcatccatcttctccagcctggatttaatgcggctcttataccgagtatcgattttagaaaattgcttatctgccgtttttgaccagacaattttcatccgtacctccactgtacgcccacacaaaatataaggaaataataagactattagataaattccgaattccttatggggtactgtagagcggagaaaaaacgcaggtaagaggcaaaacgcaacccgtcgaggcggcgcggaaaggcctctgccgggcgacagaggcttgcagaaaatgtgcgatcaggcgttcaatccgccatccacgtccagccccgtaccggagatctgcccggcggccgggctggcgaggaaggtgaccgccgcggcgatgtcttccggctggccgtagtggccgaccgcaatcatctggcgctgggcttccgcctgttctccgtcttccgggttcatatcgctgttggtcggccctggatggacaaggttaacggtgatcccgcgagggcctaaatcacgcgccaggccacgggtcagggcgttgagggcggacttggtcatggcgtacaccgcgatgcccggcatggccacgcggttagccagacagctgccgatgttgatgattcgtccgccatcggccatatgcaccaacgcttcctgggtggcgatgaccaccccacggatattgacgttgataagcgcgtcaatgtccgccagcgtcatggattccagtggaccgccgcgggctattccggcgttgttgaccagaatgtccagcccgccgagggaccgggccgcatgggtgacggcatcctgaatcgcctgcgcgctggcgctgtcggcctgtaccgcttcgccgtaccgacccagggcctttatttcatcggcgaccgcatgggctttatcggccgatttttcatacgtaataaccacatcggcgccggcgcgcgccagcgacagcgcgatggcgcgacccaacccacggctggcgccggtaaccagcgccttcttacctgttaaatcgatctgcatgatgacctcgttgcgagagtggtgagcatcatcattaggtatagacggtcggggtgattaacggctgaagtattccaccttctcaaacgccgcgcgcagaacctcaggggttaacgtcaccggtaaatagtgaatcgactcgcccgggcgcagggtatgggcaatgacccggtccagctctgcgcggttattgatatcgacttccagcgccgccagggtggtcggcaggttaaagcgctgatacgcctgcactaactgcgccagcacatcgtcctgaccaagcagggcgctctgtaccagaatgccgtaggccactttggtaccgtggagaaatttatccgtctgcggcagcaccgtcagtccgttgtgcaccgcatgggcggcggcgacccgggtgtaacgttcccccagcccgccaaccatcccgccgccggcgataatcgcctccaccacatcgcgaaacgcctgggtcagatcgccgcggcgctggtccgccagcgccgtttcgctgctggccagcagcacgtcgcggatcgccagcgcgccgttaatccccagccgcacggtgagcggcagcgccttcggctgcggcgccagcaccacggcctcataccatttggctaaggtgtcgccaatgcccgccagcaggtactccgccggggcgttgagaatgatgcgcggttcgaccagcactaggaagttggcgtcatcgaagatctcaaaattcagggcctgtccggcgtcgctataccacaccgacagcggcgtccacgccgcgcaggtggcggcgatagtcgggatggccaccagcggtacccccaggcggcgggcgagcactttcgcgctgtcgagcagcgcgccgccgccgacgccaatcactaccgcccgatcgtcaccggaggcctgcaccagccccgccacgtcgcgttcgctgcagtggccggtaaagcggatctttttcgcctccggcaggtggaaggccgccggcagaaaaggttcggcgccggccagagcgcgctcgccatagacccacaccgctcgcgagagctggtcggcgttaaaaaaatcgctcagccgctcaaggctgccaggatgggagaaatagttggccgggccgggcacgacgcggatatcgctgttactcatggaagctgtccttatgggtgttgggctaacctgatgttatgtctggacatccagatggctaatattatttcgttgtatcttatgctttttacgcagttgtcagccagcggcggctatgaaaaattcgttaaatcagaagattaattgccgcacgggagcagtgatgagcgcgaatcgccttgagatgcataacattagcctggccttctccggctttcaggcgctgaacaaggtggactttaccctccatggcgggtcggtgcatgccctgaccggggccaacggcgcgggtaagtcgacgctgatggccgtgctgtgcggcacccacgcccactatgagggcgaagtgacgatcaacaaccagccggtcatcattcgttcgccgcgggatgctaaacagctggggatccacctggtgcagcaggaggtggacgtggcgctggtgccgggcctgagcattgcggaaaacattatgctggacaggctggcggagccgggcatgaccttccgctggtcgcgggttcggcagctggcgcgcgaggcgctggcgcagctggatgtggcgctggacgtcaggcgctccattgacagctgcacgctcgccgaaaaacagcaaatcctgttggcccgcgccctgtcgcaccattgccgctttttgatcctcgatgaacccaccgcgccgttggatcagcatgaaagtgagcgtctgtttgcggtagtacgccgtctgcagcatcaggggatcggggtggtgtttatttcgcatcgtatccatgagctgaaggcgatctgcgacaccctgacggtgctgcgcgacgggcggctgattgagagcggcccgatggggccgctgagcggcgaacagatcgtcgaaaagatgctgggccacgagctgagcgatatcttcccgccgccgcgcccgccgcacggcgaagaggtgctgttgcaggttgacggtctgcatgatgaggcgttgctgcaggatatttcgctgcgcctgcggaagggggaaattctgggtatcgccgggctggccggcgcgggcaaaaccgagctgtgcaaagcgctgttcggcgccagcaaaagcagggtgcagcgtggcgagctgaacggccagccgtggcgaccgcgcgatccggccgactcggtggggcgcggcctggcgctggtcccggaggagcgacgcaaagagggcattttcattgaagagccgatcgcgatgaacctggcggtcagcgccgataacagcttttcgcgctggggcctgtttggccatcggcaggcctggcgctgggcggaggaggtgattgcccgcctcggcgtgcgcgctaccggtcccggtcagacgctgcgccgtctttctggcggcaaccagcagaaggtggccattggcaaatggctgcgcggtgatgccaacgttttgatttttgacgaaccgaccaaaggggtcgatgtgaaagcgaaaaccgatctgttcatgctgatcgatggtctggcacgggaaggcaaaggggtgatttatgcctcgggtgaattcgccgagctggtcggtttatgcgaccgcatctgcgtgctatgggacggacggatcgtagcggagatccccggcgcggatgcccgggaagagacactgctttattattcaaccggaggagcggcagcgtgagcaaggccctggcagtaaacgcgacggtatcgggccgtcagcgattttttgattttctctataagtggggcatgttgctgaccgtggtgctgctggtggcggtctttggcctcgcctcggacaacttccttgacccgttcaacatcatcaacattctgcgctcgattgccatcgtgacggtgattgccattggggtgtcgatttccctcaccatcggcggcttcgatctgtccgtcggatcgacggcatcgctggctaacgcgctggtgatttccctgtttgtctggcatggcctggggaccaccgaagcgattctgataaccctcgcgctctgcaccctggtggggctgtttaacgcctttctgatcgtggtgctgcgcattcctgacatgctcgccaccctggccagcctgtttgtgattcagggcgtggcaatgacctacagctacggtgggtcgattaccgaaaacatggtgctgccgagcggcgagatggcggagggtactatcccggcggcctttggcgcgctggggcaggtgccgaccatcgtcattatcatgctggtggtgacgctggtcgcccagctcgcgctgtcgttcaccacccacggacggcggatgtacgccatcggcggcaacccggaggcggcgcggctctccggcctgcggatcacgcgttacaaagtcgcagcatacgtgattgcctcgctgctggccgggctcggcggcattctgctggcctcgcgcatcggctcttcgcaggtcaacgccggcggcggctatctgatggacgcggtggccgcggcctggatcggcttttcgctggcgggctccggcaaaccaaacgccctggggacgctggtgggggcggtgatcctcggcgtgctctccaacgggctggtgatgctctcggtgccgtattacgcgatggacattattaaagggttggtgctggctggcgcgctggcactgacctattttcagcgccgtacttaacattttacagggtaaaccgcatgaaaaagatcgcactctctctgatgacgctgggtctgctgcagtcgacggcggcgctggccaccgccccgacgccggtgccggcggcgattgccgaacacaacggcccgatccgcattgccgtgatccgcaacctcgggtctgacgataacaccacccagtttgtcgccggggcgttgcaggaaggcaaaaagctcggtttcaaaatcagcaccttcctgagcaacggcgatgacgccaaattccaggacttcgtcaaccaggccatcagccagaaatacgatggcattattctctcccaggggcgtgacccgtattccaccgccctggtgaagaaggcggtggacgccgggatcaaagtggcggtgttcgataccgcggtaagcggtgagatccccggggtgacggtcagtcagcaggatgatgcctcactgaccgagctctcttttggccagctggtgaaagatttcaacggcaaggccaacatcgtcaagctgtgggtggcgggcttcccgccgatggagcgccgtcaggcggcttaccagacgctgctgaagcaaaacccggggattaaagagctggagtcgatcggcgccgtgtcatccgatgtgcagggcgacactgccaacaaggtgggggcgatcctcgccaagtatccgaaagggaaaattgacgcgatctggggcacctgggatgcctttagccagggagcctataaagcgctgaaagagaacggccgcaccgagatcaaactctacagcattgatatttccaaccaggatttgcagctgatgcgcgaagccggcagcccgtggaaggtgagcgtggcggtggatccgaagcttatcggcgcgaccaacgtgcggctgatcgccaacaagatcgccggcgagccgacgccagccacctacgacttcaaggcggcagcgattccccaggcgctgctggcggcccagccgggagcggtaaacgtggcgtcgctggggaaaattatccctggctggggccagaccgaagactttatcgcgccgtggttcgcgacgctggaagcgaagaacaaataaaatcaagccgggtggcggtgggcggcggcctggtgccctcgccccggccctctccgcagggagagggggaaaaccatgccaccgggcgaaagggatcccctatgtcagcattaccttcccccgaatacagccgcaatatgcggctgattggccatagcgatcagggcggtcgtccggacggcgtgcagctgatggtgcatcgcggattcgcctatatcggccatatggtgtcgcagggtttttccgtggtcgatgttcgcgatccgacccggcccaccaccgtcaactatattgccgcgccgccgggcacctggaacgtgcacctccaggcgcatgacgatctgctgctggtgatcaacgcccgggatctgtttgccgacgcccgttttgctgatgagaaggtgtactacacccgctcggtgggtgacacggtcagcgatgtgcaggacaggggctggagcgccgggctgcgcatctttgatatttccactcccgcgcagccgcgggaaatcagtttcctgtcgcttaacggcatcggtattcaccgcatctggtacgtcggcgggcgctgggcgtatgtgtccgcgctgatcgacggttttaccgactacatcttcctgaccatcgatctggccgatccgcgtaagcccgaagtagccgggcgctggtggctgccggggatgcaccaggcgggcggtgaaacaccggactggccgcagggcaaacgctatgcgctgcatcacgccattattgccggggataccgcctacggcagctggcgcgacggcggcctgacgctgctggatgtcaaagaccgtacccagccgaggctgattagccatcgcaactggagcccgccgttcggcggcggaacgcataccgcgctgccgctgccggatcgcgatctgctggtggtgctggatgaagcggtgctcgataaccaggaggacggcgagaagctgatctggctgtttgatatccgcgagccaaccaacccggtgagcatcgccaccttcccgccgccggacgaagcggattacgtggcgaaaggggcgcatttcggcccgcacaacctgcatgagaatcgtcccggcagctttgtcagctcaacgctgatttttgccacgtatcagaatgccggcgtgcgggcttacgatatttccaacccgtatcgcccgctggagaccggggcgctggtcccggctgcgcctgagagaatgatggatacccgtcccggccgcccgcgggtgatccagtcctgtgacgtgtttgtcgatgcgcaaggcattatctacagcaccgattacaacggcgggctatcggtgattgagtatctggggtgagggtaaggtaaacgcaaaattgtgctcgcatgtctgccgggtggcggttttcgccttacccggcctacgaaagagtgcaagatcaaaccgttatgcggctatctgtaggcccggcaagcgcagcgccgccgggcaatccccgaaaatagcacttttttagggggtgctccctctccctgttggagagggttggggtgagggaaacaggcgcactcagctgtactggcgtacccgcgccagcagctcgtcgacgctgtcgatacgctcggccagcacgatcagcgctctgcccagggtaatggcgtggcgcaggcactcatgacgcatggcgtcgtcctggatagtgtcgatatccgcgacgtgcgacagtccgacgctgcggcggatcagttcgctgccgcagaagccgaccgcgtccgcccagactttcttcagaaaggcggaggcatagccggggtaagccagcgccgcgtcgcgggttttctccgccgccagcgcctggaagcgctcggcgaaggtggtccacagctggtggatgtcgttcagccgctgctcgcgcgcggcggcggcatcgcgaatgccgagctggcccggcaggccgcagtagttaagcagcaggttgccgatggcggtgccgatatcgaagccaatggggccgaagtagccgaactcggcgtcgatggccttcaggctgccttcggcaacgaagatcgacccgctgtggatatcgccgtgcagcagcgcttccgcatgggcaaagaaacggtgcttcagcgccgccaccgccagcttaagctgggcgtcgtcgcgcagggcggcgacatcggcctccagctccgccgggtagttattgcgctcgtggatctgatacgggtcgttaaagaacagatcctcggtgatctcgcacatcgccgggttaataaactgcgccacctgcgcctttttctcgtggggatggaggtagaaatcgctggtgtgaaacagcacctgcgccagatagtcgccaagctggcgggccgcctggggatagtagacgttagcgataagctctccgcgccagatgcggtggtcggaaagatcttccatcaccatcaccgccagctcgggatcaaagtgatggatttttaccgtgtgctgcgggctgtgctgatagtgggcgaccagggtctgcgcttcgagacgggcgcggtcgagggtcagcggccaggattcgccgacgcagcgcacgtagggcagggcctgtttgacgatcgcccggctgacgccctgacgatcgaacactttaaacaccagattgaggttgccatcgcccacttcctgcgcgctgaccagctcagatgggttgtcgatgccggcgaactgttgcgcgtaagccacggcatcgtgggcggtgaaggtatggtattgcgacattgcctcgatcctcgaattctgattaagccgttcagacgtctatacttctggattccatcctgacacaatgtgatacaacaacgcaacagggatttaacgacatgcagacattacagaccaccagcctgcgggtgagtgaaaatcagctttttattctcgaccagcaggccttgccgcaggaacaacgctggctggcggcggataacgttgcgctgctggtggaccatattcataccctgcgggtgcgcggcgcgccgctgattggcctgtccgccagcctgctgctggccctgctggcccagcgcggcctgaaccgggatgcactccagcaggcgctggagacgctgcgcgcggcgcggccgacggcggtcaacctgatgaataatctggatcgcatgaagcaggcgctggcccgggaggattacccgcaggcgctggaagcggaagccttgcgtctggtcgaagaagataaacagctgtgcgaccgcatcgctgaggcgggcagtgcgctggtgaagcccggcagtcgactgctgacccactgcaacaccggtggcctggcgaccgccggggtagggaccgccctgggcgttatcgcgctggcgcaccggcagggaaaggtgaccaacgtatgggttgatgaaacccggccgctgctgcagggcggtcgtttaaccgcctgggagctgggcgagctgggcgtgccctatcagctgatcgccgattcaatggccgccagcctgatggcgcaggggcaggtggatgcggtgtgggtcggcgccgaccgtatcgccgccaacggcgacgtggcgaataaaatcggcacctattctctggcggttttggcccattatcaccagatcccgttttacgtcgctgccccgcagaccaccctcgatcgctattgcccgaacggggcggccattcccattgagcagcgcgccgcggccgaagtgaccggagtggcgggcagctttggcgcggtacagtgggcgccgacgggggctgccgtttacaatccggcgttcgacgtcacgcctgctgggctgataagcggctgggtgctggacagcggggtggtcaccccggcgcaggtcgccgccggggcgtttgcgccggacaatggataacggacgtcgtgccgggcctggaaaaaaaggttttcccgggcccggacaaacaccgcgccgctacggcaggaccatggctaccgccggggcggatgatcggtcgatacgctgaccgagggcggtaatagccgcctggaagggacacagcgtaccgacgtcggtctgacggcagcccggctgatgccactcctgacgcagcatcgggtgctgcgcgtccggcgtctgcagacgacgcaggtcgtcgaggccctgggcctggaaatagacccgcagatagcgttctccgctcttcgcgttgcgccagcgctccagcaccaggctactgcccggcgggatatttccccggctgtagcccggcagctgccagctaaagttcatcagcgtgcgcaccatggcgatattggtgtcatgggccaccagcagcagccagcgtacgttcggattcgcctccggtttgacgccatcgagcatagcgttgagcagcaccgacccgcgtttttgcgcggtatacaacacatcgttactcagatcgtagttttccgttaacagcggcagcagggcggtgatctgcctggcctgggtgatcttgccccacgccagctggctgagaggcaggttttcactccagccgagacgcagcgtctccaccatattggccatcacgctcagtccgctaatggtggtcttcccacttttgctctgctcgacctgccacggggtatcgaagatcgggcagggcttatcggcctgacaaaccgcctgtttcaatagctggatggtcggcgccagcgcctgccgacgctgcgccagatccccggccttctctttcaccgccgccagctggcgggcggggtcggtttgcgtggcggcgaacttgtcggtctgaaacaggggatcggcatccccgctgacataatggatagcgacgccgcagccggggaaggcgccatccaccagcgcctgggcggtcgctcgcgtccgctgcaacgggctggcgcgcacgtatatcgactccgccgtcgggcatccggcctgcagcaggccgagctggcggtaatgctggccttccgcacgccctttgttgaccacggcggcatagccatggccggtgagctccccgtcatgggtggtccactcggtccacggtcggccggtggcggcctcgatggcttcccggttgccggccgtcggcggacgaataccgtggcggctgagctcgaccactttctccagctgccagtccgcggcggcggcagattgcagcgccagcagcggcagcgcgcaggcgataaacaggcgtaacagcccctgatgtcttgcaggcatcatatcttcttccttattcgttaatcggttatgaggagaacgaggtctgccgttcgacggcatggcgccgggcgacgatggcggcagtggtaaaacagagtagcgcggaacccagaccggtacccacccagaacagcgccaacgtgctgaaatcatacagcgttttgccgttctcaaggatagccgttttatcaataatgatcccggtgagaaactcgcccaggccggcgccggcgtagctggcgatgccgatggtgccgagcgcggcccccgccgctttgcgcgaagagatatcgacggcgatcagcccgccaaggaagcaggtcagagcgccaatagtggccccgaagataatcatcgccagaatatcagtgtagtaattgtgcggcgaccagagcatcagggcgaagccggcggtgttcagcaggctgataaacccggccatcacgctgcggttgcgcgggaaaaagcggtcggagagcatgccggcgatgatggtcccggcgatgccggcgatagcgttaacgccgataatcccggacgcctccagggtggaataagctttatcctgctcgagaaagaagatcccccaggagttgacggcgtagcggtcgatgtacataaaggcggaggcgagggcgagggtccacagcgccgggttgcgcagcgccagcagctggtttttaaacaccgagccgcgggcttcgacctcctcctgcggttcatcgcggatgacgttgatggaagggaagccgctgctctgcggcgaatcgtgcatgaacagcaccagcagcaccacgccggcggcgccgagcgcggcggtggacaggtagcccatctgccagccaaacccggcgatcaccgcggcgatcaccatataggtcaccgcctcgccgatattatccgccgtcgaccagatgccatagaaggtgccgcgctccttaacgccgtaccagcgcgccagcgagaccgcgcaggggccgacgcccatcgactgcgcccaaccgttgatcccccagaagatggccagcagcagggcgttggtggtcatccccatcatcaggttcatcccggcgctgagcaataaaccgaggctcatatagcgcaccacgttggcgtgatcggcgataaaaccattgaccagtttgccgatggcgtagctgaagaacagggtagagccgatcatgccgagctccgtcggggtgatccccagctccaccagcgcgcttttagcgacggtgaaggataaccggcagacgtaaaaggtgacgtaggccagggtcatggcgataaaggtttgccagcgcacccggcgaaaacggtgttcatcaaacgcggcgcccgctttcggcggcgacgcccggaaaaaagcgataattccagacataggtggttctccgcaggtcggaggcctgactgattgatgtggttcgtccgtgaatgaagttatcgttactgtgtagagtacataatcagaaatagcctgacccgtaagggttaatgtaatggttgtgggatcatctttttcagctgcgggtagagcgtctggctggccagcagcagcggattgccgcgctggatcccctcctgcgccagaaaatcgttgctggcgccgcccgcttcgcgcatcagcaccagccccggcagggcgtcccacgggttcatgtgcggctcgtagtagccaatcaaccggcccgccgccgcccaggcgctcatcaacgccccggagccgttgcggataaacatgccgccgtcgctgagcagcgcctgcagaaacggcagaaagtccgccggggtgacgcgatgcgaggtgccgacgcccatcacgccctctttgaccgtcgtcgcggggtgcggacggatcggagcgtcgttgagccaggcgccatggccccgcagggcgtgaaacagctcgcgatggttggggtcgtagaccacgccgatgaccggttcgccgtcggcgacgatcgccagcgacaggcaccaggtgtgcaggccgttgaggaaacagctggtgccatcgatggggtcgaccacccacagcactcgcgcgtcgggcaggcgggcgccgctctcttcgccgagaaaaccatcctccggaaacgcgctctgaatgcgctgtttgacaaaggcctccacccgcttatcggccacgctgaccacatcctgcaggtcgtcgcccttatggtcgacggtcaacgcctcgcgctgttgatagtattcaaacgccagctcagcccccgctttcgccagctcgcaggccagacggtagcgggcctgtagcgcttctgattcctgagattgcatagtgactccccattttgcacacgtgtgcattttgcgtgaaaaaaacagccccgaagggccgaatgagtgtggccgggtttcgcagaagattctgtgatcgctccagcataaaatgattttttcatttggcgctatggcgaataattagtttcaccggcacttcgcgatggcgcgagggcaggctgaagcgggcgatccgcgtcattaacaaatccaccgcgtggtgggccagcagggcggtattctgctgaacggtggtgagctgatagggctgccagtccgcctgcgggatatcgtcaaagccgacgatggccggcagcggggcggcggcgtcccgcaggccgtcctgggcgcccagcgccagcatatcggtggcgcaaaacagcgcctgcatcccggggttttcagcaaccaattctctggcagcctggtagccggcctgatagccgccgccgtcgcagaagcggctgctcaccgccatatccgacgtccgggcgataaaagcctcatagcgctggcgggtgctgaagttctcgcgattttcgccaataaagccaacctgccgccagcctcggcggctgaacagatccgccaccagcttcgctccctgggcgttatcgctgcacacccggtcgcagccggcgaggtccgcatggcggttgatcagggtgacggggatcttgcgcgcgagatactcttccgccagcgacagcggcggcgcgccggaggtgatgatcaccccggcgacgtgatagctcagcagtagtttaagcgagggggcgagctgctgcggatcgtcagcgttcatcagcagcggcataaagccattgagcgccagctgatggaccagcggcgccagcagtttgctgcgaaacgggttgtcgaaaccggcggtgacgatgccgataaaattactgctgccggtgatcatcgtccgggcgatgatattcacctgatagcccagggcttccgcggcgctcagcaccttctgccgggtcttctccgacaccgaggcgccgggggtgaaggtgcgggagaccgccgagcgcgagaccccggccagtctggccacgtcctcggccttaatccattttttatcgctcatcgtcgtttcgcgccgtctgttttccaggaagccgacgcccgggcgggcgtcggtcacgcacactgcctgaaaaggtatcacagaaaggcgtcgtcgcgcagcgccttgcgccctatgccgggtagcggatgtgctccacctcacgctgcaaaatcaccctgccgtggcgaatggaggtcagcacccgtgcctgacggcggacggcctcgtagtcgttttcagcatcgaggatcagcaggttcgccgggcggccttcggcgaggccgtagttatcgcccagacacagcgcccgggcgctgttgtcggtgacgaagtcgaggcagcgctgcagatcgtcatagccgagcatatggcagatgtgcagtccggcatccagaatgcgcaggatattgccgttccccagcggataccacggatcctgaatcgagtcctgggcaaagcagacattgatgccggcgcgatccagctccgccacccgggtgacgccgcgccgtttcggccagctgtcaaaccggccctgcagatgaatgctttcggtcgggcaggagatgaagttgatgcccgaggctttcagcaggcgaaacagctttgagcagtaggcgttatcataagagcccatcgcgcaggtgtggctggcggtgacctgggcccccatgccgcgcacccgcgcctcctccgccagtacttcaaggaaacgcgattgcggatcgtcgatttcatcgcagtggacatccaccaggcggccgtagcgctgggcgaggtccatcaaaaacatcaccgagctgacccctttgtcgcgggtgttctcatagtgcggaatgccgcccaccacgtcggcgcccatctcgatggcgcgcgtcatcagctcccggccgttgggatacgattcgattccctcctgcggaaaggcgacaatctgcagatcgatgagatcggcggcctcttgtttcaccgccagcagcgcctgcagggccgccagcgacgggtcggtgacatccacatgggtgcggacgtgctggaccccgaaatcgcgcagcatgccgatggttttcagcgcccgctggcgggtgtcctccggggtaatactcgctttgcgctggctccagcgggtaatgccttcaaacagggtgccgctgcggttccactccggctcacccgcggtgagggtggcgtcaagatggatatgcggctcgacgaagggcgggatcgctagccggccctgggcgtcgatagccccggcgtcggcagtctgcatcgcggcctgggcggtgatgcggtgaatcatcccgtcctgcaggtcaagagtaaacagcgcctcctggcggcgcaggcgagcgttaataattttcatggtgggtcctgtaaatggttttgcgataaacgccagatcaccagcgcgaccgaggcgttgagatgaaactgagggtggctgaccgggtagccggtcagtttttcaatgcgctggatgcgctgatgcaacgtgttgcggtggagacccagccggtcggcggcccgcaccacgttgccgttctcctgcagcagcgtctcgagggtctccagcagcagccatggcgctttgcggcccggctcgatcaggcagcccagggtgtcgtgcataaaatcgttgagcagcgccgggtcgctgatcgcggacagcaatttgataaaccccagctgctgatagtcgctgatacgctgggtcggccgcagggtatcgcacagatccagcgcctggcgcgcctgcgacagcgcccgcgggtaaccctgcagctgcctgaccggcgcggagaggccgcagagcagcgataaactctcctctccgtccgccagggtttgcagccactgctgtagccattttttctgctgaaagccttccccctcctcatccggcagcaggaaaagaaacatattgctgcgctccagcagcgggaagggattgccctgctggttgagctgctgctgcagctgctgacgtacgctgcggtgggcctgcagcagccaggcttcggcctgctcgggcgggaactggcgaaacaggcgggacagcccctccagacgcagcgccgccagccgcagcggacgggtaaaatcgagctgctggtggagggcgcgctgatggagcatctgcaggtccggatagtcgccggtgaccagctgcatcagaatgtcgcgctgcgactgcaggacgttttcgctgcggaccagcgcggtgccgatgcgctcggtgacaatcaccatcttcagcaggtagggctgctcgatcagcggcatgcccagctcgtcggcaagggcgatcagcgtggcgggaatggcgtggatataggcctcgccggtgaggatcaccatcccggcgatgccgcgctgtttgccctccatcagcaactggatcaggttggcttcatcccggggatggttgatgccggtgataaacaccagctcgccgcccatgatccactcggcgatatgttcattttccgccacatagtaccagcgtacggcccgctgcagcccttgctttcccgcccgcagacgcagggcggagagtccctcaagggccagcagttcgctgaccgtcaggctcatggctcctgctccgcgacggcggcaggctggcgtttgcttagcagagtcagggcgatatagaccagcgcggagacggagatccccaccagcggcgcgatccacggcgaaagataggccaccaccgcgccggcggcgtaggcgccgagtcccagccagttaaaacgcggcaggcgggcgttctgcagcaggggatagcgcccgccgcgggcgaaccagtagtcggcgaggatcaccccgccgatgggtggaataatactgcccagcagcacgaggaaggggatcagcatttcgtacatcccgccaatggccagcacaatgcccaccccggcggcggcgagggtcagcgtccggcgacgttcgctgcgcagcagatggcaggcggcggcggagacgttatagatggtggggccctggatggtcagcaggttgagacagagcatgatcaccgcggccaccgacagcccctgcaggatcagcacttcaacgatatcggcctgttgatagacgatagcgcaccaggcgccggcgacgatcatcagcccgttgccgatgaggaagctgcccatgctggcgagaatggcggtccggctggagttggccagccgggtccagtttgtcgcctgggtggcgccgctggcgaaagtgccgaagaccatggtgatggccgccgaccagctcatggtgtcgctcggcgcaatacgggtcatcgcctgccagccgccggcgtggtgcagcgccagatacatggagaccatcagcagcacaaacatcaatggcaccgacaggcgcgacagcgcgtccagtcccttgtagcccaccagcgcggtgaggcagaacaaaatgccaaacagcaccatcaacggctgggtcagcgcctcgggcagggcgaggatcttcaccagcgagatagcgaccgtggcggtgccccaggcgtaccagcccagctcggcaaaaccaagaataaaatcggccagcttgctgccaatctccccgaagcagaaccggcccatcagcaccgtattcaggccgctgcgcgcggcgatccagcccagcgacgcggcatagagagccagcaaggcgttgccgatgacggctatccacagcagattgacgatggaaaaggagacgccgagtttaccgccggcgaacattgtgccggtgaaaaaggtaaagctgaacaacaccatggcgatggaaaatacgcctttgcgtccggcggcgggcgcttcgacgaggggaaaatcattgctgtttgacatcctggaacctctggctggtagatgggcggtgattgccggaagtagcaagagatgtgccaggaaaaaccgggcacggggaatagcgcgcggtgtgcaacatgcacagttattgaaggatcccggacgggtaatgccattctactgtgcatcctgccaggttttgcaccagtccagggcagaggagggcggtgagcgcatccctggcgccggaggagaattttagccaggacgatccgcctgtttttggccagagagtagtggagaatagcggtgtactgaaaacggttggttaaatcactgtgaataaaggttatttaatatgcttttatgatataaccatttgtcttgtatgtgtttcctgaaatattgtcccctccggttagcggtgttagtatcggataaatagccatttagacggctaaataaatcatcgctaacctaaggaactgctatgtggcaagaaagactcgcgcaactggtcaccacctgtcattggatcggcgcgaaaggctgggcgccggcgaccggcggcaatatgtcggtgcgtcaggatgatacctggtgctggctaagcgagtctggccgcgacaaaggcagcctgacaaccgaggattttctgcaggttgagatcgccaccaaccaggcgccttccggacggaagccgtcggccgagaccggtctgcacaccctggtgtatcgcctgttcccggaagccaacgtggtgctgcatgtgcataccgtcaacgccactgtgctgtcgcgcatcgaaaaaagcgacacgctggcgctgcaggggtatgaaatgcagaaaacccttagcgggcagcatagccatctcgataccgttccgatcgccatcttcgataatgaccaggatattgacgccctggcggcgcggattgccgattatgcgcaaacgcgcccgctgcgctacggctttctgctgcgcggccacggcctgacctgctgggggaaagatattcaggaggcccgccgtcaactggaggggctggagttcctgttcgagtgcgagctgatgcgccgccgctacgagccctgagccggagcaggtatggatttttatcttggtatcgatattggcacctcgcgggtgaaagcggtgctgtttgatcagcatttcaccgcctgcgccagcgccgcggaaaatacctcaccccgcctgtcggccaatggctacgcggaacaggatatgacccagctgtggcattcggtgctggctattctgcgccagattgcccgccatccggcgctacaggcggggcggctgcgggctatcggcctcgccgggcaaggggagggggtctggctcagcgatgagcagggcgaaccggtgggcccggggatcctgtggagcgatacccgcagccacgagctgatgagcgacctgctgcgccgacccggcttcgaccgccgctatttcgccgataccggcacccacctgcagccctgcaataccagcctgcagctgtactggctgaaacagtatcagccggcgcggctggcggccgcgcgctatctgtttttcgccaaggactggatccgctttcgcctgaccggcgtggcggcgctggagctgacggacgccagcagctcgttactcaatcagcagaccggcagctggtcctcggtggtgatgaacgagatggggctgaacgaactgctgccgctgtttcccccgctgctggccccggatgccccggccggcacgctgagcgacgcggtggcggcgctgaccgggctgcccgccgcgacgacggtggccgccggggcgctggatgtctgtagcgccgcgctgggctgcggcgcggtcaacgaaggggatatctacacgatcctcggcaccacctgctgcactgggatcgtctgccgcggcccgcagacggtgaacgaggcgacgcgctttgtcacccataccgaagccggacaggtgatctccctgtttccgatgcaggccggtacgccaaacattgactggctgcagcagcatatttcgctggacgccgatctggggcgcctggagcaggcgatcgcggcggtggagccaggcagcggcggcgtcttctggcagccgtacctcaatggcgaacgtgcgccgttttacagcccggacgcgcgggccggctttttcggcattagcccgcacaccacccgcgccgaactgcagcgcgcggtgtttgaaggcctggccttcgccattgtcgatgcgctgcagggttatccgcagggcggcgagctgtatctgaccggcggcggcgcagcctcggcgacctggctgcagattatcgccgactgtaccggacgcacggtggtctccagcgcctttaacgaactgagcgcgcgcggcgcggcgatcctggcggcccgtagcgtcgcggcgctggccgagacgcctccgctggcgcagacccgctatcagccgcgccctcaggcgcatgcccgctacgcggcgctgtatcccgtttaccgcctgctgcgcgagcagatgctgccggtatggcaggccagacaggccgcccttcaacctctttctcaggacctacaaccatgaaaatcgtttttaccgccgagcatgctggcgaccttagcgccttccaccagctgggcgagctgctggtggaggggtgggcgctgggcaaaccgaaactcagcgccggtcagctgattgagctggcccacgacgccgaggtgctggtgaccagctatgatgaggtgacggacgcggtgatggccgcctgtccgcgcctgcaggtgatcgcctgcacccgcgcgaatccggtgaatattgatacccaggccgcccaggcgcgcggcatccgggtgctctacaccccggggcgcaatgccgatgccgccgcggagctgacgcttggcctgatgctcagcctggcgcgccatattccgcaatcccatgcggcgctgaagcggggggaattcacgcaggctgacaatgccgccgccgccactcagcagggtctgcggcgggatgtggtctgggacgtgagcccggaaagcccctatgaagtgtttaaaggcactgaactgcgcaataaaacgctggggctggtggggtatggcaacattggccgccgggtggcgcgtatcgcccgggcgttcggcatggcggtgttggtggtggatccgttcgtcgccgcagaggatatcaatgagccagggctacagaaaacgaccctggaggcgctgttccgcgaggcggatatcgtcagcctgcacctgagcagcgggccgcacagcgacgggctggtgaatgccgcgctgttaaacagcatgaagcccggcgcgctgctgatcaatacctctcgcgcggcggtggtcgacgaggcagcgctgattgatgccctgcgccacggcccgctgggcggcgcggcgctggatgtctatcaccgcgaaccgctgtggcgcgatcatccttttgtcatcgagttcgataacgtgattatcacgccgcatatcgccggagccacccgggagagtatcgccaaacacacggcgatgattgccgccgatcttcagcgctatgtcgccggggagccgctgctgtaccagtggcgttaagccgcttgcgccgccgcgttctgcagcggcgcgggtccatcgtcaggggcgatgggccgccataaaagcctgggtctgttcccagtccactaccccggcatccgatcccatcccggtcgccaccagcgcggccaccgccgaggcgacgtcacatgctgctttcacgctgagtccgcgcgccagtgcggcaataaacccgccgcagtagctgtcgccgcagccggtggtatccaccgcctcgaccggccacggcgcaatatgctgcggcccgccatcgcggccgataagccaggagccgttctcgccgtctttcagaatgcaggtgcccacgccgagcgccaggaagaagcggccgatggcctccggctgcgtctctccggagagaaaggcggcttcctccagcgaaggcatgaaataatccaccgacggcaacaggggccgcagtagttcgagggtctcttcattcggggcgataaggtcaaagctggtggtgactccgcgcgctttggccgcctgcaacagccgcgcgctctgtccctggtccattgccgccagcagcccggtcccgccgtgatgcaggaaacgacagtcaaggacggcgtcaaattccgcttcactgacaaacagggcgtcagacgcgccccggcagtgcagggccggacgttcgccgttggggcgaatcggcaggatcgtcgccgaggtctccttcagcgcggtgcgctggataagcgagcagtcgatgcccagccgggcatagctggcgaggataaagtcggccttttcatcttcgcccaggcaggccaccgctgcggtgcggatcccgagcttcgcggcgttgatattagccccggcggcggtgccggcggggttgagacgaatttgctcaataaaggcgacgccgccgcgcggcgggatcgccaccaccgggcgcccggcgatatccagaatagtcaggccgacaaatacggcgtcaaaggttgccatcgttctcccgtttagcgatgcgtttggcgcaggcgcgcctgccagaaggatagggcgagggccaccaccagaatcacgccgaccagcgcgtccttcaccagataattgagccccatcaggttcaggccgttatcaataatggcaaggaacagcacgccgccgagggtgccgaggatgctgacccggcccagacgggtaaaggcagtgccgataaatactgccgcaatggcgtccatcaggtaagactgcccggccagcggggtaaactgccgcaggttggcggagaggatcaccccgccgacggcgcagagcgccgaggcggccaccagcacgccgagcatggtcaggcgatcgcggatcccggcgatacgcgccgcttcgctgttctgaccgatggcgcggacatatttgccccacagggtgcgctcggtaaccagccaggccgccagccacagcgccagcacgatcgctaccggcgtggggatcccgccaaggttgcccaccgccaggtcgtgatactccggagccatccgccgataggctatcgcgccgccgccgtcggtatagatgcgctcggcgctgctggcgataaaccaggtgccgagcgtggcgaggaaggaacggatccggcagatgaggatcagaaaggcattgagcaggccaatcagcaccccgccaagcagagcgcagcccaccgcggcctgccacggcagatgccaggttttcagggcgacgagggcgaaggcggcgccgaaatcgagcgcgacgcccaccgacagatcaatcgccccggcgctgacgatcagggtcatcgccatcgccacaatcagcaggatcgcgctgccctgcagcaggttggcccagttatccacggttaaaaataccggattcgcccagccaaacagggcgatggccagcaggatgatgacgccaaatccggcccgcgacagccaggccagcgggctgctggccgtctgttccgccgacgcagaggttttcagagtgatttgactcatgcctcgcctcctttgtgtctgaccgccgaggccgccagcaccaccaggatcaggccgcctttaatggcgcccatccagaagatattgacccccagcaggccgagcccgttagagagggcgttgaccaggattgcccccagcagcgcgccccagatggtgaccacccgacggcgcgagaaggcggcgccgataaaggtcgccagcacggtctccagcagcagcggcgtggccgtcccgctggagctgccggagccctggctgagcagcggcagaatagccagcccggcggcaatgcccgctaacagccagaccagcagggtcaagcggcgcacgttcaggccgctcatctgcgccatatcgcggttgccgcccaccgcctgcacatgctggccgaagcgggagtggtggagcaggaactggaacaggataaacacccccagcaggtagaccagcggccagggcaggcccagcacgctgttgtcgcgaaaggcgaccatcagcggatcgctgaccgcgatgcgccgctggccggtcaacagatctgtcagaccggtaaacgccaccgaggtcgagagggtggccagcagcggcggcaggccggccgccagcaccagcaagccgttgatcgccccgcacagcaggcaaaccgccgccagcagcgccagcagcaggagatatggcgtgtgccattcggccagcccgaggctgagcagcgcgacgccgagcaccgccgtcgccggcagggagaggtcgatgccgccggagaccacatcatccccgcccacggcgataacgcagaccaggccgaaacagaggattgccagcggaacgctctggactagcatcaggctgatattttgccagctgagaaagtagggcgactgtacgctcagccataccagcagcgacagaaacaggatcaggggaaatttttcaatcagcgtcgccaggcccggacggccgcgacgctggatagcagtactcatggtgaaggctcctgtccgccgttgatcgccaccagcagggcgtccagcgttagcccgcgggtgggcagattggccgccagcgcgccgcgccagaggaccaggatccggtcgcatagtccgagcagttcgggggcgtcgctggaggagaccagcaccgcccgtccttgatcggccagctggcgcgtacgttgataaatatcccggcgggcgccgatatcgacccccagggtgggttcatcgagaataaacagccgggcatcggtccccagccagcgggcgaggatcgctttttgctgattaccgccgctcatgtagcgtaccggcagccccggtcgtcccgggcggatcgccagctgttctatccagtcgcgcgctttctgctcggcgataccccgccgctcccagccaaaggtggcggtttccggcagcgaggcgagattaatattgtcggcggtggtgaagggcaggatcagcccctgatggcggcggtcgcgtggcaccagcgccatgccggcgcggatcgcctgctttggcgtacgaatgcgccgcggccggccttcgaggtggatggtgccgcgttccgccgggcgtaagccgtagagtaggtcgaccagcacatcgcgtccggcgcccagcaggccggcgacgccgacgatttcgcccggctgaatatcaaaagaaagatcctgcagctgccgcccgtcgctcagctggcgcaccgagagcagcggggttgccccattgtctgccgccgggcgctggcgcggagtatacagctggtcgatttcccggccgaccatcatggcgatcagcgcctcggtattctgcagcaggtcgcggtccgggtaaccgaccgcttccccgttgcgcagcacggtgccgcggtcgcagagggtggctatctcattgaggtagtgggaaatatacagaatggcaatgccctggtcgcgcaggcgcaggatggcggaggagaccagactggcctcctgcgcctccaggggggcggtgggttcgtcgaacaccaccagccgcgctgcgccgtcgatcagcgcgcgggcaatttgtaccagcttgcgctcggccaggctcaggtcgcgcaccagccgttcggggtcgatcgccagctgccagttttgctggaaaaattgcgccgtggcggccttcatccgtcggcgatccagcgccccccagcgggtgcgatactcctggcccagaaacaccgattccgcgacggtaaagtgcgggatcaggttcagctcctggtggataacgcggatgcccgcggcttcgatggctgccggattgccgaggggcagcgggtgaccgtcgagggtggcgctgccgctgtcggcctgatacacaccggcgaggatcttgatcagcgtcgatttaccggcgccgttctcgccaatcaggccatgaatctcccccggattgaggcgcagggtaaccgcattaagcgcggtgacgctggcaaaacgtttaccgatctgctccatgaccagaccagcggcggggcgttccccgccaggatgttgattaatcactgcagctcgccgtatcccaactgtttatacaccgctttcgcttcctgcggacctttcaccggaaccaccggaataaaggtttgcaccggtagtttctggccggcaaagtagcgggccacgttgtcagccgaggtctggccgatcagatgcggctgctgcgcgacgttagccacgaacgggctgccgggctccgccatgatctccagggtctccggaccggcgtcgatggccgtcactttcacgtctttatcgcgaccggtctcttccagcgcctggacgatgccgatggccggttgatcccagcaggcgacatggatggcgtccagtttgcctttcggatactggctgagtaattcgagggttttcttgcgcgcgtcttccggcgagttggcgaactgttccgcgagctcgggctggataatatgaatatccggataatccttaaggacatatttccactgatcgtagcgaattccgcaaatacgcagcgcgctggagaaggcgttaaatacggcgacgttgcctttgccgcctaattcatccgccatgtagcggccgatggttgagcctaaggtgtagttatcggaagtagtattgttgaccgaatattgagaaacatgatctacggtaaataccgggataccggcatcacgcaatgctttaaattttggttcgacggcgctatcgccgagaatactaattaccgcgtccaccttgcgtgacagtaaaatatcgtggttattggcatgcacctgattatcgcggccgccatcgacgccaatgactttgccccccagcttctccacctcctctgtcgcgcctttaaaggcctcgcgatcccagaaatgctgagtgccgaccacggcaacgccaatggtttttccctgtaaggagagggcgtctgcggcagcgacgctcagcgaggcaagggaaagcagtcccagcgcggcaggcaataattttcttttctgcgacattgttattatgatcctgtgatgaaggtggttgcggaccggtagcatgacaagaagcacctcgccacctcaaatacaaaataagtctaagttatgccaggaatgttatatcgcagaaacgtcagagaaaaagtttattttgtcatgagaaacctgaaaatatttcatgatggcggatagacctttttattttgtggttttatttttgacttattccgtgtttatttagcggataaagacaattttcttaatattgtgagtgcatgggaaatacggcgtctacaaagaaaaaaagaagattgcgcgggctaaagctttttttagcagagcaatgtctggccgggtaaggattattaccctatttccccgctttattgtaatgaaccttaagctgagaagaacgcgggcgctatgaagaaacagcataattatacggtgatgcactggggaacctggcaggtggagagcagtgagggcgagatcgtggcggttaagccggtgccctgggataaaaatccctcacgcatcggccagtcacttcccgacgcggtgaccagccaaacgcgcattcgccgtccggcggtgcgcgccggctatctccagcacgggccggcgtcacgagaagggcgaggtaaagagccctttgtcgaagtcagctgggaggtggccctggacctgctggcgcgcgagctgcgctcggtcaaggcgcgctgcggcaatgaggcgatctacggcggctcctacggctgggccagcgctggacgctttcaccatgcgcagagccagctgcaccggtttctcaagggctttggcgggtacaccgccagcaccaatacctatagcagcgccgcgggcgagcgtattctgccgcatattctcgggccgctgagcccgctgcaccggcagcatacccatttttccgagctggcccgggagtgtcagctgtttgtcgccattggtggtctgccgctgcgcaatgcccaggtcaacggcggcggcgccaatgaccatatgctccagtactggctggataagatgcaggccaacggcacgcggtttatcaatatcagtccggtgcgcaatgacctcagcgcggtgcccgacgccgagtggctggccattcggccgggcaccgataccgcactgctgctggccctgagctatgtgctgatcgctgagtccctttacgaccaggcgtttgttgccagccataccgtcgggtttgccccctatcgcgcttatctgttgggcgagcacgatggcgtggcgaaaaccccggcgtgggcggcggcgattaccggcctggacgcccagcgcatcgccgacctggcgcgggagatgacccgccaccggacgatggtgaatatctcatggtctatccagcgcgcccgtcaaggggagcaggcctactgggcgacggtggccctgactgcgctgctgggacagatcggcacgccgggcggcggtctcgggtttggctacgcctgcactaacctggcgggcgcggtacgaaaagcgttttccggcccgcgcttacccgccggggagaatgcggtggacagcgttatcccggtggcgcggctgtccgatatgctgctgcacccgggagaaacctatgagttcgacggtcagcagcggcgctatcccgatatccgtttagtctactgggcgggaggcaatgcgtttcatcatcatcaggatctcaaccgactgtgcgaggcctggcgccgcccggagacggtggtggtgcatgagcagtactggaccgcgcaggccaaattctccgatatcgttctgccggccaccacctcgctggagcgagaggatatcggcagcggcggtcacgacgggtttatgatcgccatgagcgcgcagatcccgccggtgggcgaggcgcgggatgattacgctattttctgcgatctcgccgatcggctgggattcggggaagcgttcagcgaagggcgggacgccgggcagtggctgcgtcatctctatgaggagtcaagaccgcgggcgcaggaggagggtattgcgctgccctcgttcgatgacttctggcagcaaggggtgctggagtacagcgcgccggagcggccgcaaatttttctcgccgattttcgcgccgatcctgagcgctatccgctctccaccccctccggcaaaattgaactcttttccgccaccgtcgccgggtttggctatcgcgaatgccctggccatccgtggtgggatgaacaggaggccgcccggcagcgacaggaggcggcgcggtggccgcttcatctgctctccagccagccgcgcgcccgcctgcacagtcagtacgaccacggcagcgtcagccgggcgacgaaagttcagggacgcgagccgctgtggatgcatccgagcgatgcgcagggaagggatatccgcgaaggcagcgtggtgaaagtctataacgaccgcggggcgattctggcgggggtgcacctgagcgagcagattttgcccggcgtggtacagatgtccaccggcgcctggtatgacccgctggatccgaaggaagaacggtcgctcgataagcacggtaatcccaacgtattaaccgaggatcgcggcagttcgcgcctgggacagggctgtagcgcccagagctgctgggtggagatcgccccgtggcgagaggagctgccgccgatcaccgcctttgatccgccgaagtttattgaagtttaggcgttggcgctcgccggcggcggggcgggtagcccggagaaggcgcggtatgcgccgcctccggcaaagcccgcgcctggcggtttaagactgacgacagtttgacgttacgccagccgcgggtaggcgctggcgatatcgtcgccggtaaactgggcgatccagccttccgggttatcaaaaatgcgaatggcggtgaagttcggttctgatcccatatcaaaccagtgcggagtgtgggcgggaaccgaaatcagatcgttcttttcgcacagcacctggaacacctcgtcgccaatgtgcaggcaaaacaggccagcgccctcgacaaaaaaccgcacctcgtcttcgccatgggtgtgctcgttcaggaacttttcccgcagcgcctctttttgcgggttatcggcgcgcaggctgatgacgtcccagctctgatagcccttttcggcgaccagtttatcaatcgcatgctgataggcggcaatcaccgtttccgggctgggatttgcgccgaggtcgcggtcggcctgccagcgctcgaaacggacgcctttggcgttaagctgcgcctgaatcgcgctggcgtcggtgctgtgccagaccggcgtttgcggatcggtcacggaaaaaagagttaatgcgctcatgctgggatctgctccggatgaatgtcgtcaaaacgctgaacctgagggtgatggctcgccgggtcgcggtcgccgcgaaccagctgcacagtgcgcaaacccgcggcctcggcggcatcaagttcctgatggatatccgacaggaacaggatggtgccaggggcatggcccaggtgttcagcaatgttacggtaggactgcacctcgcgtttggcgcctaccagggtatcgaaatagcccgtgaacagatgagtaatatcaccttcatcgctgtagccaaataacaatttctgcgcagccacggaacctgaggaatatacatacagatcaataccctgcgctttccatttctccagcgccggcagtacgtccgggtagagatggccggtaaagtcgccgttgagatagccgtcgcgccagatgatcccctgcagcgccttcagcgccgtggatttacggtcttcatccataaaggtgaagagggtagtgataaggtcggcggtgctggcggcgggggcgtctgtttcgctgcgcaggttgtcgagaatggttttgaccggttcagcgtgctgctgagcggtcacaaagccggccagtcgttcgcgggcgtaggggaacagcacgttatgcacgaagcggatatcgctggtggtgccttctatgtcggtcacgatggcgcggatcatggtttctccagagtgggcgtagcgtggaataacattagcatttagacgtctaagcgtcttgattgccaaatattaacatcgtgttatagtggcttcaacaacagcattacaatcggtataaaaagaatgaacaataaccccttgattccagagagtaaacttcctgcgctcggcaccacgatttttacccagatgagcgccctggcccagcagcatcaggccataaacctgtcccagggctttcccgattttgacggcccgcgctatctgcaggagcgtctgacgtaccacgtggcgcagggggcgaatcagtacgccccgatgaccggcgtgccggcgctgcgcgaggcgatcgccgggaagacggcggagctgtatggttaccagcccgacgttaacagcgagatcacggtcaccgccggcgcgacggaggccctgtatgcggcgatcaccgccctggtgcgccgcggcgacgaggtgatctgtttcgatcccagctatgacagctacgcccccgcggtggcgctggccggcggcgagttacgtcgtattgcgctgcagccgccgcattttcgcgtcgactggcggcaatttgccgccgccctgagcgagaaaacccggctggtgatcctcaacaccccgcacaacccttcggccaccgtctggcagcgcgaggattttgccgccctgtggcaggcgatcgccgaacgcgagatctatgtcctgagcgatgaagtctatgagcatatctgctttgctgagggcggccacgccagcgtgctggcgcatccccagcttcgcgagcgggcggtggcggtctcctcgtttggcaaaacgtttcatatgaccggctggaaggtcggctactgcgtggccccggcggccatcagcgccgaactgcgcaaggtgcaccagtatctgaccttctcggtgaataccccggcgcagctggcgatcgccgacatgctgcgcgaagcgccggagcattatcgtgagctgccggcgttttatcgggaacgtcgcgatctgtttattgaagcgctgcgcccaagccggctggaaatcctgccctgtgaagggacctatttcctgctggcggactacagcgccatctccgatctagacgatgtcagcttctgccgctggctgacgaccgaagtcggggtagcggcgatcccgctctccgtcttctgcgccgatccgttcccgcacaagctgatccgcttgtgcttcgccaaacagccggcgactctgctggctgcggcggcgcgtttgtgccagctgtagttacttaatcgtccacgcctgggagaactggcggccggcgaacatctctgtcaggccgctaatttgcttcagacgcagcacttcatcggcatccatccccagctctttgccgattttctgcggcgtccagccgagccgggtcagctcgcggacgatctctgacatggcgtggatttggtggcggccgcgcgcccggttatggcgtatggtcgctgccatcagcccgtcacgcgaggcagcttcactcgtcaggcaggtcaccggcaaatagccttttagcgtttttttcagcgcggctttgctgcaggccagctcatggcggtgaaaaccatcgacaatcgtatacgcctgtgggccttgctggatgacgacgaccggctgggtaaagccgtcggcctccagcgacgtttgcagcagacgcttctccggcggcgccacgttattcgggttgtagtcgttgggggcgatcagatcctgtttgacccacagcacgcagtcgacgggctgcgagcggaaggggctgtagtggtggagcacctggcgaaacgcgttgatagcctcaatgcgcgcctcgtcatccagcttttgcaggtaagcttccagcgcctgcgtcagttgttgttgcataaaatcccccattgttggcgatgtttttccatgcgtttacggtagcgctgatagtggctgcttttggttgggctaaacgaaagctgacggcaccagtaatcgttattgagcagtactttgcagactcgccgccaggatgggatatctttggtgccaatgtccgcaggttgggtatccggaatatcctccataccttttttctggtaccagcgcaggtagacggcgattttattgcggtagtgctcggcggtggtttccggcatgctgtcgagcaggaacagggcgtagcttttccacgtcaggtggtcgggcttgtcgattttccgatgaccgtagaactgattatcatgcccggcatagaccccgccgctgtgcgcgccgctcactcgctggcacatcgcggcccagcgctcaggttccagcacgtgatacagccacagcccctggcgctgctcgggaccaaacggttcgcaaatgcgcatatagcgcagcggcaccccggcctgatacatcagatcgtacaacgggttatagggctcgccgcttttggcaaaccaggtccagatatcggcggttttccagtcatagagcgggtagatgtaccaggcatggccgcccggcgctgaagtggtccatggtttatcgtcggcgaagcgctgtttacgctgtgaagaaatcgtcataaagcgatttagcgattcgtcggcgcgaatgcccaccagcacggcggcgggacgacgctgcgaaaaccactcggcgaagtggctgacgaaggcttcaaagctcattccgggttgataaaatgaaaaatagcccgggtgggtaatggcccagggcggcggctggcgtacccactcggttccgggctcccagcattgccattgcggcttatactgcgtcagggcattttgggtggtgagcggcagggcgacccagtaaaaggtttcgatgacatccgcatacagcgcacgcagtttttcacagtgggcgatggtgcaggagaactgcgcttcccagtcaataaacaacacgcagatttttttcccctgtaaccgcgccgcctgggcggttaaatgcagcataacggtggagtcttttcccccggaaaaagagacacagatgcgcgaaaaattatccatgacccactggatccgctgctcagttgcttgcagcaccgattccggtaagggatatttaataaacgacatgaccattaatcctttaatagtagaaaattcccgttagctcagtataaacgatgaggggtaggaaattaagggtcgattattgtttctggcagcgggggaacagaagggcgttattcgctgtgattaaatttgggccgtgatgcctctcgatcattcattaatatggtgattaattcagttaaaaaatgattttgcgaagatgcatggtggtaattaatgtagatcgtgatatccggaaaaagattatctatgttgatggcgtgaagctgcatagtgggtgagataaagtcatataaataggaaggcaaaaagccaattaagtcggttttattaatcatgttaagaatggtcataaaagagtcgctgcgaaaggcaatattgcgcggattcagccaggcgatgctgctttgctgcacgcgctgaataacgggatcgttggtaatatagtgagtgaaaaactcctgcgccagtgactctaccgaggtaagcgtttcgcgtcgcggatggcccgcccggcaaaccgccagcgtctgcaccgtctgatagggctgacagatcgtggcgcggttggtaatgggcatgcgggtgaacaccaggtccgcctggcgatacgccagcagctcctcagccgattcggtggtggtcaggttatggtgctcaatttgcaagttcgcctgatgacagagctggttaatcatagcgtggctattgactgaacagaacagcggggggccatatatcacaatacgtttacgcagttctgagcgattattaagattgatggttttttccagctgctccagattttgctgtagatgataatgaagattgacgcaggcggtggtgggcgtcattcctttgccaacacgaacaaatagcggatcgtttaactgctggcgcagacgctgcaacgactgactcaccgctgagggggtgataaataacatcgccgccgctttgctgatgctcaaatgttgatagatacattcgaaaataaccaataaattcaaatcgaactttttcagatcgtaaagatttgccattaatgcagtcctgtttattaccggtgcggattataatattcttaatgataatgttttgtggcttaatatttgcggtgtgaatttaattattggcaaatacagttaagttctgcttaatatatcttatcgtcgacggtggcgccagcggtcgcttccgccaggcgccattgcgggatggaattactctttttcacccatcataatatgcagtttctctttatccggtaggccgaccacctgctgcagcatattatctttattcatataataaatcgccggcgtcacgttggctcccagatcgtccatcagctgctggttgacgttgagcattttcattttctccggcggaattgctttcgggatcgtcagagccattttcccattcgattgctcgtaatcatgccaggttttcgccggatcgctgctggcgagaatcgccgcggcggtggccgggctctccggcttaatcacccccaccagcagagtgcggatctgcactttaccggcctctacccaggggcgggattgctgccagaactgcttgcagtagggacagaagggatcggcaaagacatacagcacgataggggcgtccttgcgaccatcctgcagccagtgggcgctggccatcttcttccacatctcttgtcccgccggggtatagagttctttctgaaacagctgctcgctgaggttgctgccgttctcatcatacatatagccggagatcgcgtgtttaccatccggcgttaggtagatggcgacccccatgtcctggtatttgcccagccagcctttcattccccccggcgcctcaaagggttttataatggtaatgccctgtttttcaatcgcttttaccggagcggggagttcctccgcatggctgcataacggcaaaaggctgagtaacagaagacgctttaacataagtattccttgtaaaatcagcaggaaagggcaaaacgattgtcgaacctatcacagtcataggcaagatcagcagaatgacggattgccctttgctggcgtgggtgatgtaatcctagatgctgttacattaaggtaatgtagagcgcaacacatagccagtctgactggcgctgaacctaccctcgggtatttcaggtaacggggccgcctgaaaaggtggcctttttacttttgtcgcggcaaatgatgcgaaaaacagcgattagcgctgaacgcgtcgacaggttcacagagttgtcttgttccggttgttagataacgcttattgattcgataatgtaaacgcattggtcgggtcaggaaaaattcgttaacttagacctcaacgaaaacacggaggaagtatagatgtccttaattaacaccaaaatcaaaccgttcaaaaaccaggcattcaaaaatggtgaattcatcgaagtcaccgagaaagacaccgaaggccgctggagcgtcttcttcttctatccggctgacttcaccttcgtctgcccgaccgaactgggcgacgtggctgaccattacgaagaactgcagaagctgggcgtagacgtttactctgtgtctaccgatacccacttcacccacaaagcgtggcacagcagctctgaaaccatcgccaaaatcaaatatgcgatgatcggcgacccgactggcgccctgacccgtaacttcgacaacatgcgtgaagatgaaggtctggctgaccgcgctaccttcgtcgttgacccgcagggtatcatccaggcgatcgaagttaccgctgaaggtatcggccgtgatgcgtctgacctgctgcgtaaaatcaaagcggcgcagtacgttgcttctcacccaggcgaagtctgcccggcgaaatggaaagaaggcgaagcgacgctggctccttctttagatctggttggtaagatctaagtctgtttgtgcccggcggcgctacgcttgcacgggcctacaacatcgtaggccgggtaaacggcgtgccacccggcaatcaatgggcgctttcgcgcccattttattccaacaccatgatgcaagcgcattcaggcagcctgacgaggccgcttgcatgatgatgttttaagcccaggagataacaatgctcgacaccaacatgaaaacccagctcaaggcctaccttgagaagctgaccaagcctgttgagctgattgccacgctggatgacagcgctaaatcggcagaaatcaaggaactgttggctgaaatcgctgaactgtcagacaaagtcacctttatagaagacaacacgctcgcggtacgtaagccctcgttcctgattactaacccaggttccgaccagggcccgcgttttgcaggctccccgctgggccacgagtttacctcgctggtgctggcgctgctgtggaccggcggtcatccgtcgaaagaggcccagtcgctgctggagcagatccgcgatattgatggcgatttcgaattcgaaacctactattcgctctcctgtcataactgcccggacgtggtccaggccctgaacctgatggcggtgctcaacccgcgcatcaaacacacggcgattgacggcgggaccttccagaatgagatcaccgagcgtaacgtcatgggcgtgccagcggtgttcatgaacggtcaggagtttggtcagggacggatgacgctgactgaaatcgtcgccaaagtggataccggtgcggaaaaacgcgcagcggaagagctgaatcagcgtgacgcttacgatgtactgatcgttggctccggcccgtccggcgcggcggcggcggtctactctgcacgtaaagggattcgtaccggcctgatgggcgaacgcttcggcggtcaggtgctggataccgtggatatcgaaaactatatttcggtgccgaaaactgaaggccagaagctggcaggcgcgctgaaagcgcacgtcaatgactataacgtcgacgtgatcgactcccagagtgcgaccaaactgacgccggcggcgacagagggcggcctgcatcagatcgaaaccgcctccggcgcggtgctcaaggcgcgtagcgtcatcatcgccaccggggcgaaatggcgcaatatgaacgtgccgggcgaagatcagtatcgcaccaagggcgtgacctactgccctcactgcgatggtccgctgtttaagggcaaacgcgtagcggtaatcggcggcgggaactccggcgtggaagccgccattgacctggcgggcgtcgtagagcatgtgaccctgctggagtttgccccagagatgaaagccgaccaggtgttgcaggataaagtccgcagcctgaagaatgtcgacatcattcttaatgcgcagaccacggaagtgaaaggcgatggcagcaaagtcaccggcctgcagtatcgtgaccgggtgagcggcgatgagcatcatatcgcgctggcggggatcttcgtccagattggcctgctgcctaacaccacctggctggaaggcgccgttgagcgcaaccgcatgggcgagatcatcatcgatgcgaagtgcgaaaccaacgtcaaaggcgtgttcgccgcgggcgattgcaccaccgtgccgtacaaacagattattatcgcggcaggggaaggggcaaaagcgtcgctgagcgctttcgactacctgatccgcacgaaaaccgcataacaagtcagacaatagacctgcataacaaagaggctacccaggggtagcctctttttttatactcttttcgtcattcttacctgacgaccattaccgggatatgggcatggcggatcacgctcgaggcattggagccgagcaggtgggtactgatggagggattgcgtgagccaataactaccacgtcggcgttaatttcgctggccagctcgttgaccatatcgcgaacgctgccaaaacggacatgtagcttgatacgagacgggtcaatgctgaagtggctgaccatcgtctgcaggcgagtctccgcctcatgctgcagatgttcctcaaaccgccgcaggtcggcggtaaaacggctcatggtaaagctcgcggaacccggtaagacgtggagcagatggatcaccccgtcctgctgggccagaaactccgcgtgccggacggctttatcgctcagcgccatctcaaagacatcaaccggcataatgatagtcttatacatatgcaatcctccttgttcgtttgcgtctatatcaacatattatatgcggatattgtgtcattcaggtcgcaaaactgtcagccaggcaggcgcaaagcgtaaaaaagggtaagcggcgggaaaacagcagaaagaggatgtgcggacatcctctgaataaagcgcgaaacgcctcaggcagcggaattagcggtggaattcgccagcggcttccggctggtacaatagctccagcacttccaggtgcgtcgatgcgccgcccggcagctcccagtgaatggtgctgccgactttcaggcccagcagcgcggcgcccaccggcgcgaggacggagagctggctggcgctgtcggtgacctgtgacggaaacaccagcgtccgcacgcgctcttcgccgctggttaaatcgcggaattttaccctgctattcatggtgacgacatcatgcggcatcgcttccggggccagcatttgcgcgcggtcgagttcctcattcagggcatcggcaaccggtgagttggcgaaagccggctgctccagcagcctgtcgatacgttcggcatccagttcattaatgatgattgcgggtctggtcattgcatactccatgttatccaggaacctgtccgtaaaagaaaaccctcgccgaaaggggcaagggttaaggtcctaccatcatactgagagttgccggcagtttgaagtgatgaaacgcacattcagcgtgcaacaccatccggcggacggtgttttccaatcagcatcccgctttgcgctagtggccaaccttatcgaggataaactgtgcgccgcagttacccgggtgaggctggggcagaaaagcggaagtggccagcggggcgttgatggtcgcggcgttgagcgagatttgcatctccgtcagataggccggattaccgttgcaggttagcttaaacgccttcacgctctgcggaccccaggcgcgggccacggcggcgtcgaagtcggcgcggctgaccgtttggccatagtgcttcgcgagaaaatcccccaccgggctgcgcttaatttcaccgtttagtcgcaccatggcgccaaagtagctgtcgggatcgaagccgaagcagacgccatgtttggcatattcgtagcgttccagacaggaggtgccgcccgatcccggcatcacattattaagtttattggccatctccagcgacagcccggtctccgccgcctggcatttgcggttcgcttttacctccggcatgttaggcaccggacgcgtggcgcaaccgtagcgcatccagcgacgttcatccactccgcgcgcggcaatggactttggcagcccgggccacaggccatgcacggtcagaaagtcggctttattcgcggtgtcctgctgcaggcgacactcttccggttcgttgcgattgcggtcatacatgctctgacagaatccggtttgccaggagagggcaaggacgtagcggtcaaaatcagcgtatcgcatcgcggtgagcggttcagcaccggcctgagtggcggtaagcacaagggcaatcgcggcgaaatccttcctgaacatttttattcctgattatggatggcaaaagataacggggagttattaaagcataaaaaaggcgcccgctggcgccttttcgcgtggttagaccattagtggagcgcgctgccgggcaccaggatttcagtagcaacgatcaccaccagcaggccaacgagcaccggcactgaggtgcgcttgaccacttcgaatggggaaatcttcgccatcccggcaacggcgaccaccaccccggagacgggcgatatcgtgcggccgaggttagaagcctgcagcatcggaatcgacaggtaggccggattaatgccggaggagtgcgccagcttggggatcatctcaacgaaggcgtagaacggggcattaccggaaccggtggtcatcgccgccagcatggtcaggatcaccagcaccagcatcagaataatactggccgagccgaaggaggtggcgattgagatcagaccgttgataaagccgatagtgcttaacccctgggcaaagacgccggcggcaaccaacagcatcactacgccggcgaaggcgtcggccattccacggtaggcgacttccagcccgctaaagacgtttttggtgttgaaaccgcgcaggaactcgagtatcgccgccagcagcatgcagccaacgaggatggtgataatgtgcagctccggcccccatttaccgtcaaagatcagcacgccgatgatcggggtaaacggcagaatggcatacagcgccggggcggtggtggtgatgtcgttgacatcgagcatctcgtgagaaatgtgttcttttttatcaagatagcgctgccagaaaaaatgggcgattgccatgcagataatggccgcgatggagatcggcagcgtggttttaaaagcaaagtcgatcagcggcatttcagcggctttggccgccaggacgacgtcacccgaggtcggcgagaggataatcgccgccggtgaggcgcagatggcggcggcggccccgcggctgataccgacattcaccattaccgggaacagcgtcgccatcagcagtacgccaaggccggtcgcggaggagacggccagcgacatcaggcaggcgacaaaataggcggcaatcatcagcagatagggcgaattaatatagcgcaacggcttcgacgctaatttgaccaccatatcattggcgccaatatgggtcatataggtggcgaagccgcacagcatcatgatcatcatgcccagatcgccgccgcggctcatgagtagaatcttaatgtattcaataatatcggtagcggaataaccggtgctcgcggtattacccggtaacactttatgtcccagcagggcgctgacgatcagtaagattaagcctccgacgaacagcaccccggtggccgagtagcctttaatgatatagcgggctacgcccacaatgaccacaatccctatcaggatctcaataaacgtcagcatttattacccctaaacccaaagaatatgtagataaaaagcaccacaccaaattttaatgtgcgaatgtgccgaaaaaacggacaaaactcgctgatgcaaatcaataaagcgataagaactacacgtcccccatcacgcctggatataatcaccagatggatagttaagccgttctgatggacagcgggcgaaaatcaggagtttgccttatttcgttcaacctgcattgagattatctttgctattttaggtggtttttaaatcaaagtggtaatagaaaagtgttgatgttacgtcgtttttcattgttttctcttggttttttaggatggttattggtgtccggaaacgccagcgcgtcgttttcatcgacccttagcgaaggttaccataccttaagtaataacgtagcgcagacctggaatgagccggagcactatgatttgtacgttccagccatcacctggcatgcgcgctttgcctatgacaaggaaaaaaccgataagtataacgaacgtccgtggggggcaggtttcggcgtctcgcgctgggatgagaaagggaactggcatggcctgtacctgatggcgtttaaagactcttttaataagtgggagcccatcggcggctacgggtgggagaaaacctggcgcccgctgacggaccagaatttccacctcggccttggctataccctcggcgtcacggcgcgcgataactggaactacatcccgattccggtgatcttgccattggcgtcaataggttacggtccggcaactttccagatgacctatattcccggcacctacaataacggtaacgtttacttcgcctgggcgcgcttccagttttaattcgctaaatcttagcaataaatgagataagcggaaggtcttgtgcaaaaacaaggactaaagcgttacccactaaaaaagatagcgacttttatcactttttagcaaagttgcactggacaaaaggtaccacaattggtgtactgatacccgacacagcattagtgtcgatttttcatataaaggtaattttgatgtctaagattaaaggtaacgttaagtggtttaatgagtccaaaggattcggtttcattactccggaagatggcagcaaagatgtattcgtacacttctctgcaatccagtccaacggtttcaaaactctggctgaaggtcagcgcgtagagttcgaaatcactaacggtgccaaaggcccttctgctgcaaacgtcatcgctctgtaagcaacgcgtcagtagaatataaaaacccgctaataagcgggtttttttttgcctgtctccttcgcttttagcggctggccgcctgcgagaaaagccagaaggcgagcgccgtcatcgcaaacgaacccagcaaattcaccgcgacgttgagcagcgcccagcttacccggccctgctgcaggagaaacaccacttccgcagaaaaggtggagaacgtggtcaggccgccgcagaaaccggtggtaatcagcagtttccacatcgggtcaataccggtcagacgattaaaccacgccagcccggcgccaatcacaaaggcgcctaacaggttggccgttagagtcccaatcgggatagcatgatgcacaggattgagcttcatgccgagccaccagcgcaatacgctgccggtgccgccgccaataaaaacggcgcaaagaagttgaaacacggtcgtttcctgctatttgatgtaagagagtgtcaagtgtagcgcgcatcgggcgcgattggctatccataacctgacgggagaagaacatgcgggtagcggcaggacaatttgccgtcacgccagtatggcggacgaatgcgcaaacctgtgtggcgatgatgcagcaggcggagcgagaaggggcggcgctgctggtgctgccggaggcgttgctggcgcgggatgacaacgacccggatctgtcagttaaatcggcccagccgctggatggcgcatttttgcagccgctgttggctgagagcaggcgtaacagcctgaccacggtcctgacgctccatgtgccgtcaggggaggggagagcgaccaacacgttggtggtattgcgggaaggcgcagtgattgcccattatcataaacttcatctatatgacgccttcgcgatgcaggagtcccggcgggtggatcccggtcagcagatcccgccggtgattgaggtggcgggattacgcgttggcctgatgacctgctacgatcttcgctttccggaactggcgctttcgttggccctgaatggggcacagctgctggtgctgcccgctgcatgggtgaaagggccgcagaaagagcatcactgggcgacgctgctggcggcacgcgctctcgatactacctgctatatcgtggcggcaggcgaatgcggaacgcgcaatatcgggctgagccgcatcgtcgatccgctggggaccactctggcgggggccgggagcgagccgcagctgatctttgccgatctctcagcggatgaccttgcgcgcgttcgcgagcgtttgccagtgctgcggaaccgacgatttgcgccaccgcaattattatgacgtttttttaaacaaggcttgattcaccttgttacagattgctattgtgtccgcgcgtcaaatacccgtattgtttatcccaataattcgctgtgcacgtcaggatggacatctcagcgctcactcccggaggggaggctatgggccgaaacacgcagcccacgcacaggtggattacaataggacggataaatgcgtgtatgatggcgtattcgcagcttgtatagagaagaaggttagctatgggtgagattagtattaccaaactgctggtagtcgcagcactgattatcttagtgtttggtaccaagaaattacgtacgctgggcggcgacctggggtcggctatcaagggctttaaaaaagccatgaacgaagatgacgatagcgcgaagaaaaccaccgcagaagaagaagcgccggcgcagaagctctctcataaagagtaattctccggctgcgtctcctgacgggatgctggcggtacggcgaagaggccgcgacgtttatcgttgcggcctttgtcgtttttgtcgacgccgcggagaaaagatgcaactaactgttacggacaggcgaaacggatgaagcggagagagccgctgcgccgaaaaggcgcgcagcggcggaagcggtgggttatttaacttccatccctttagcctgcaggtcggcatgataggaagagcggacgaagggaccgcaggcggcgtgggtgaagcccatcgccatcgcttccgctttcatctcttcaaactcttccgggctgacgtagcgctgcaccggcaggtggtgacggctcggctgcagatactggcctaacgtcagcatggtgacgccatggcgacgcaggtcgcgcatcacttcgatgatctcgtcgttggtttcgcccagacctaccatcaggccggatttcgtcgggatctccgggtgcgcttctttaaaacgctccagcagcttcagcgaccagttgtaatccgcgcccggacgtacctgacgataaagacggggcacgttttcgaggttatggttgaagacatccggcggggtcaccgtcagaatatcaagtgcgcgatccatgcggccgcggaaatccggaaccagcgtttcgatcttaatcgacgggtttttctcgcgaatggcgctgatgcagtcggcaaaatgctgtgcgccgccatcacgcaggtcgtcacggtctaccgaggtgactacgacatagcgcagacccatatcggcgatagtttgcgccagcttttgtggctcgtttgcatctggcgcgaccgggcgtccatgcgcgacgtcgcagaacgggcaacggcgggtacagatcgcgccgaggatcataaaggtcgcggtaccgtggttgaagcattctgcaaggttcgggcaggaggcctcttcgcacacagagtgcaggccgttcttacgcatcgctgctttgattccctggatacgggacgagtctgccggaagtttgattttcatccattccggttttctgagcagagcttcacgctcagttgccacgtttttcaccgggataagggccattttatcggcgtcgcggtacttaacaccgcgttccatcacaatgggtttactcatagcgtgcgtgttccagttgcgagtcacgaaggaaagcgaattaattcaatgaaatgttgcaattatcaactatttttgaatcaagagcaggcagtataccattgaaaaggggcagaaagcagcctgcctgcccggcaaattgtaaaatagttgttgttttatccttttcccttccgtgcgctacgccttaaacgagcggatcaccgtctcgatgatctctttcagcaatggctctttcccgctcagcttattaaagtgcagcgcaacgtcaatctgctctccacccagggaagggaaatccagggtctgcagcggccagagacgggacaccatggcgaacaggcgttcggtggtcagacccagcatatcgctcccggcgatcatcgccgcctgggtcatcaggttaaaggtgctaaagccgcagcggcgctcgcccatctcttcctgtagtcggcgatggagggtggggtagcgctggccttccggcagcagcagcgcaaattcgtactccgcgagggtcgtttcatcctgcggaccgtccagggcgggatgccctgcgcggcagtacatctgtacccgatcctgatacagcacatgatggcttatcgcctggccgctgtgcaggtgggtatcaatgagcagatccacctggcgctggtcaagctgccgcgcggcgtcgacgatggcgatattgtgcaacaggatctgcgggaaggtcggcttcagcgcgctggccaggccaggcatcagcagcgctcccatcgctggcgtagtggcgatagtgatcacgcgctgctggtgcgggctaccggtgatatccagcgcgctgaggaaagcttccatgccgcggctgatgtattgatgaagatgggtggcataggcggtgggggtgacgccctgtcctttgcggataaatagcggatcggggaacaacgcccgcagtttgttaattgactggctaatcgccgagggtgtgatattgagtatcttcgcggcgttgacgatacctttatgtacgtataccgcttcaaagatcgtcaacagattgaggtcaatattacgcaggatgcgaaacatttgacgatcgtaacgttcatcctgtctgtcaggagattctgacggaggcgtattctctggcacgcgatgagtccggttgggaatgataggccaagtatagcggcccaccgcgttgccgtgcgtgacaattgattgcaaaaataacgtgttactcgtttagcgccccgctgacagcgggacgttggcctgccgcttaatcccggggaagatattcgtgtggtggatgatttagcagcgccagcagattggcgaccagtcgcggagcgaccgtctccggggaggctgccggctgccactggcgcatttgcgtcatctccataccggcatagccgcaggggttgatacgcaaaaacggtgtgagatccatggcgatattaagcgccagaccgtggaaagaacaacctttacggatccgcaatcccagagagcagattttgcgttcgccgacatagacgccaggggcgtcggcgcgggggtgcgactcgatactatattcagccagggtattgacgaccgtttgctccagtagcgtcaccagctcccgcacgcccagcttacggcgcttgaggtccaacaggacgtacatcacctgctgtcccggaccgtgataggtgacctggccgccgcgatcgctctggatcaccggaatatcgccgggcaccagcacgtgttccgctttgccggcctgaccctgggtgaatacggggtgatgttccaccagccagatctcgtcgagggtatcttcatcacgggcgtcggtaaattcatgcatcgcctgcgagacgggttcgtaaggttgcaggccaagctgccggataagaattttattgtgctgcaaaacaacatctccgccgggaagagagaattcaggttggggagtatatcacagccgtgcagaagggaatgagaagacccggcacggcggccgggtcagggaaaaggttacagcaccatccgaacgatatcgatattgcctaactcttcgtacagcgtttccacttgttcaatgtgggtggcgttgatggtgatggagaccgagtggtagttacctttgctgctcggttttactgacggcgagtaatcaccaggcgcatggcgctgtaccacttccaccacctgatcaaccagctccggcaacgcctgccccattactttgtaagtaaatggcgtagggaattcaagcagttcgttaagtttggttttcatgtcagctccggtgttacgacaaaataataactcccaccaagggcgggagttatcaggttacttggatgaatagtatatggggatggaaatcacactttcaagtgttcgatttttaaccaaaccagtggtggaacattaatttaatgtaatcaataattttgccgaagaaattaccttccggaatttcctgcaggaccaccagcggacgctggtcgatggttttaccatccaactggaagttaatggtgccgacaacctggtttttctgcagcggggcgtgcagctcagtgttattcagcacgtagctggctttcagatctttcattcggccgcgcggaatggtcaggtagacgtctttatccacccccagcgaagcgcgatcgctgtcgccgaaccaagccggttcagaggcaaactctttgccagctttaatcgggttgacggtttcgaagaagcggaagccccaggtaagcagttttttgctttctgactcacggcctttgaacgtccggccgcccattaccgcggagatcaggcgcatctggccttcggtggcagaagcgacgaggttgtaacccgctttgtcggtatggccggttttgatgccgtcgacgttcaggctgttatcccacagcaggccgttacggttcagctggcggatgccgttgaaggtgaactctttctcacgatagatggagtactcgttcggtacgtcgcggatcagcgcctggccaatcagcgccatgtcgcgcgcggagctgtactgtccgtcagcatcaagaccgtgaacggtctggaaatgggtgtttttcaggcccagagcgtttacgtagttgttcatcaggctgacgaaggcgtcctggctgccggcgacgtagtcggccatcgccacgcaggcatcgttaccggactgtaggttaataccacggatcagctgagaaaccggcacctgcatgcccggcttgaggaacatcagagaagagcctttgaaaaccgggttgccggtggcccaggcatcgttgccgacggtgaccagatcggactctttgaatttgcccgctttcatcgcctgaccgataacatagctggtcatcattttggtcagactggccgggtcgcggcgggagtcggcattgttttcagccagtaccttgccagagttgtaatcgataaggatccaggattcggcgtcaatctgcggggcgcctgggatcatcgttttgatattcaggtcatcggcgcgggcagcggaggagagcgctgcaacggagagcgccgtaatgagtaaacgagcggtgaaagaggtcttcatggtcagaacaacggcatccgtgatggagttaaaaaagtgccttactatagcaaatgctctgcgggccagcatccgacattgcgcatgagtttgttaatgacttttacatgcgcgaggtgaacgggcggcccacggcgtttagttggcgcgagtaataaaggactgcagctgcgcttcgctttgcaggcgctgctgcacggcgctggcctgtgctttatcagcaaagggacccagctgaatacgccagaccgcgccgttttgcatgacccggcctggcacagaaaactgctggctcaggcgctgctgatactgctgcgcccgcgactggtcgcttactgcgcccacctggacaacaaaattaccgctggcgctggaggtcgcggaggacgaggccgccacggcgccagcggctgcggcgatggccgcagcgggcgccacattaccctgaatggagccaggcgcggtcactggcgctgttggcgtggcgccggcggcaggagccgtcgcggcggctgccgctggttcgctactctccagcacgccgttgttcaggggcgtcggcgcgccgaggaaaccgccgctgttcaccggcgcgcccacgctgtctgccggcgtcagcgtgctgttgctgatcgggcgaacgtcagtgggcgcgggctggctcatgccagcggcgtccccaccgtccagattcggacgggcgggcagggcgtaagtctgtttggcgacggtggtacaggccatccccgggccggaaagcgaaccgtcaggcgcgacgatgatggggtcgatgcgcactttggtgttgttggaggtgttcaggcggtcagcggatgcgcgggaaagcgagatgacccgatcgttgccatagggaccgcgatcgttaatccgcacgacgatcatccgtccgttggcaaggttagtgatccgcgcgtagctcgggatcggcagcgtcgggtgcgctgcggtcaactgagtcggatcgaaggcttcgccgctggcggtcaggttgctgttgggttcagcgtcatagatcgccgcgaaaccggtctgagtaaagttggccggatcctgaacgattttgtagcttttaccgtcgcgctcataatcctgattcgccgtggcgttcggcgtttcatactgcggatcggcgccgctgatctcaaccgtcgggccattacagacggccggctgtggagtactgacagttttttgttgcacgtcatcactcgaacatgccgccagcagccccgctgctatgcagatccccagccattgcttacgcattgctaacccctttaaacgcttttcgacaacatttttctgtgggtatggatcgacattacgataccaaacccggccatcagtacgatcagggcggagcccccgtagctcaccagcggcaacggtacgcccaccaccggtaaaataccactcaccataccaatatttacgaagacataaacgaataaaatcaacattaaaccaccggccatgacccggccaaaggtggtttgcgcctgggcggcgatccacagtccgcgcataatcagcagaatataaagcgctagcaggatcagtacgccaatcaggcccagctcttcggcgaggacggcgaagataaagtcggtgtggcgttccggcagaaactccagctgcgactgggtgccgtgcagccagcctttgccgcgcagaccgccggagccaatggcaattttagactgaataatgtgatagccggcgcccagcgggtcggtttccggatcgaggagcatcatcacgcgctgacgctgatagtcgtgcatcaggaagaaccacaggatcggaataaaggcggcgaccagcaccacggcgataccaatcaggcgccagctgaggccggagaggaacagcacaaacagcccggatagggcgatcaggatcgaggtcccgaggtcaggctgcgccgccaccagcagcgtcggcaggaagattagcaccagggcaatgccggtgttcttcagcgacggtggacagacatcgcggttaataaaccgcgccaccatcagcggcacggctattttggcgatctccgacggctgaaagcgcacaataccgagatccagccagcgctgcgcccctttggagatggcgccgaaggcgtcaacggctaccagcaggatgatacagaaaatatagaggtagggcgcccagccttcatagacccgcggcgggatctgcgccatgacgatcatgatcaccacgcccatggcgatctggccgattttacgctccatcatgccgacatcctgaccgctggcgctccagataaccagcgcgctgtaggtcagcagcgccagcaggataagcagcatggtggggtcaagatggattttatcccatagcgattttttgttcggattatccgtcattattgatcctcccctgcggtaaccgccgggttttcgcttggcagcgtagtgttgttatcgcccagcatgatgtgatcgaggatctggcgcataatcgtaccgaccgccgggccggcgccgccgttttccagaatcatcgccacggcaacctgcgggttgttataaggcgcaaacgctgtcatcagtttatggtcgcgcaagcgctcggagatccggtgcgcgttataggtttcgttggccttcaggccgaacacctgagcggtacctgacttggccgcgattttatacggcgcgctggcgaagtatttgtgcgcggtgccgttgccgcggttggccacgccgtacatgccgtctttggcgatttcccaatagccggaatggatatcgcctaccggcggctcatggggctggacccagggtacgggcttgccgtcttccacggtgctctgcagcagatgaggcaccttcaccacgccgtcgttaatcaggatcatcagcgctttgttcatctggatcggcgtggcggtccagtaaccctggccgatgcccaccggaatggtgtccccctggtaccagggtttcttaaagcgcttgagcttccattcgcgggtcggcatgttgccagagcgctcctcggagaggtcgataccggtgtagtggccgtagccaaacttgctcatccactctgagagacggtcgatgcccatgtcataggcgacctggtagaaataggtatctgcagactcctcgagcgctttggtgacgttcagatggccgtggccccactttttccagtcacgatagcgtttctctgagccaggcaactgccaccagccggggtcgaagaggctggtgttgcgggtgatcaccccggcgctcagcgccgagacggcgacgtacggtttgaccgtcgacgccggcggatagaccccctgcgttgctcggttgaccagcggtgtgttcgggtcgttgagcagcgcggagtaatctttgctggagatgccgtcgacgaacaggttcgggtcatagctcggggttgaaaccagcgccagaatagcgccggtacgcgggtcggtcaccaccacggcggcgcggctgccggccagcagcgtttcaatatactgctgcagcttgaggtcgagggtgaggtagatgtcgcgtccggcctgcggaggcacctctttcagctgacgaatgacgcggccgcggttgttcacttcaacctcttcgtagccggtctgaccgtgcagaacgtcctcgtaataacgctctatacccagcttaccaatgtcgtgcgtcgaggcgtagttggccagcttgccctctttatccaggcggtcgacgtctttatcgttaatttttgagacatagccaatgacgtgagtcagcgccgaattataggggtaataacgacgcttgtagcctttgacttccacgccgggaaagcggtactggttgacggcaaagcgggccacctgcacttcgctgaggttgacctttaccggaatcgaggtaaaacgatgggagcgggcgcgctcctttttgaaaccggcgatgtcatcgtcagttaaatcgacgacgtcgcgtagcgcatccagcgtctgctgtacgttatcgactttctccggcatcatctccagctggtaaatggtgcggttaagcgccagcggggtgccgttgcgatcgtaaataatgccgcggctcggcgggatcggcaccagcttgatgcggttttcgttcgagcgcgtctgatagtcgtcgaagcgaacgatttgcacattgtacaggttggcgatcagaacgccggtaagcagcaaaatccccaaaaaagcgaccagcgcccggcgcacgaacagcgaggattcagccgtatagtcgcggaaagaattctgtaatttcattcgctgcttagtctaccctgatcatcattactcacggtggtacgggtggttggtggtgatgctccacgcccggtacagactctcggccaccagtacgcgcaccagcgggtgaggtaaggtgagggtggagagcgaccaactctgttccgccgctgctttacaggcgggagagagaccttccggaccgcctaccagtaaactgacgtcgcgcccgtcctgtttccagcgttccagttcgcgcgccagctgcggtgtatcccatggtttacccggaatatccagggtcacgatgcggttcttaccggcagcggctaacatcatctcgccctctttttcgaggatgcgtttgatatcagcgttcttaccgcgcttaccggcagggatctccaccagctcgaacggcatatctttgggaaaacggcgcagatactcgctaaagccggtctgtacccagtccggcattttggtgccaacggccaccagctgcaacttcacgcattaactccagagtttttccagctcgtacagacgacggctctcttcctgcatgacgtggaccatcacgtcgccgaggtcgacgacgatccagtcggcggcggcttccccttcaacgcccagcggcagcatgccggcggcgcgggactcctgaaccacgtggtcggcgatagacatcacatgacgcgtggaggtgccggtgcagataatcatgcaatcggtgatgctggatttgccatgtacatcaatggcaacgatgtcctgacctttcaggtcatcaattttgtcgataacaaaatcctggagtgctttaccctgcaagtgttccccctgggtgcgtgaagattgataatcataaagagcctgacagtatacctgaactgatgaaaaagtcgggtgaaatgtctgtcggcaggcgttcgtggcgggctatcatcccatccctcgccgcggattgcatcgccatttttgtaaaacaatttctgcaaaccggctttggcggatgctgcctggcagcggagaataacagcctgctctggcctgtcaatggtctggcgggaattcttcttgcggccgccagacggcctggctatttaatacccgcagggtggtgaaatcgtcgcggatttcgaggaggctccaggcgccatgggcaatgggaaagtgccacatcgccgccgcaggcatctgcaacagcagggcggtcagcaggctcaggacgccctgatggccgacgatcagcagatggtcaagatggcggcagtcggtcagcgttgggataaactcgctgacgcggcgggcaaaattctgaaagctttcgccgttggtgggggccgcatgctgccagtcggcacaccaggcggcatagttttccgcatcttctcgctggaggtcgcgatgatgacgcatctcccagtcgccgaaaaacatctcattgagcgcgggatggcgctcacgcggaatagcgcggtcgccaagcagcagatcggccgttgtcccggtccgcgccagctcgctacagaatactttatcgaaaggcgccaggcgcagtcgttcgccgagcgcgcgcgcctgagcgacgccgcgcggcgtcaggggcgttggggcatggccgctgtataacccggcaacgttggcttcggtttcgccatggcgaactaaccacaatttcatgaacaggctctgacaggcgatgaagagatggcgttacgatagcgcttttttcgcgccaggcccagcctggggtcagcaatagagtccctgctcgcggatgtaatccagcacggcggcgggcagcatctcggcgcaggactcgccgcgctcaaggcgctggcggatgatcgtcgcggaaatatcgaaccacggcgtctcagccaggtagatcacgccggaagggcggttatgcagagactccacgtcgtgggttaaatggcgatccagccagcgctgatccgcttcctgcgccatggtcagcgggtaacccgggcggcggcaaacaatcaggtggacattgtcgagaatggtttcatagttgtgccaggtgggaaaggtcagtagcgaatcctggccaatgataaacgccagcggtttgcgcggtccctgctcctggcgccactcctgcagcgtttgcgccgtccaggagggggtatcgcgccgtagttcgcgttcatcgagcgtgaacagcggtttatcggcaatcgccagcttcagcatgtgcacgcgctgggcgctggtggcttccggctgcggccggtgcggcgggacgttgttaggcatgatgatgaccttgctcaggccaatctgattcgccaggatctcaaccggcttgaggtgaccgtaatgcaccggatcgaaggtgccgccatagattgcctgtaactgagtcatatcaaccatcaataaaaacgtccgccagggctttgtggcagagcaacaacgaaagactttccagttcgggccagacgtcgtgcccgtaatcctgtttaaaggtgagctccgcgcgggtcagaagggtcaccgcctggcgtagctgttccccgctcaggcgcgtgagagcgtcgctgagcagctgacggcggttttgccagacccgatgtttatcaaacagcgagcgcagcggcgtgtgcgtcgcctggcgcttgagggtaaccagcagcagcagctcccgctgcagagtacgcagcaggatcgccggctcgcagccttcaaggcgtaactgctgcaggacgtgcagcacgcgcttacttttgcctgccagtagggcatcgacccaatggtaaggcgtaaagtgcgcggcatcgtttaccgcttgctcaacgcggggcagggttagcttaccgtccggccagagcagcgccagacgctccagcgcctgcgccagcgccagcagattgccttcgtaacagtagcacagcagctgactggccgcgtcgtcgagctgcagctgatgctgtttggcacgggcggccagccagcgcggcagctgcgcgtattccggcgtctggcaactgacctggacggcgcgctgagccagggcggtgagccatgcggcattctcctgggctttggtcagcttatttccgcgaactatcagcagcaggtcgtcgtgcagcaggccaaccagcgtggcgagctgttcattgatcgccgcgttggggccgttttccggtaggatcaacagcagggtttgccggctggcaaacaggctcatcgcctggcttaaggcgaaaatcgcctgccagtcggtgctgttgtcgattgaaaaagtatggtgctcggtaaagccctgcgcggcagcagcttcgcgaatggcgtcctggctttcctgcaacagcaggggatcgttgccaagcagcagataggccgcgcgcagcccttcagtgagctgcgcgcggagctgttccgggtacaaccgaatcatcattgacccagcgtggtggagacgcggttacccgaggaagccggcgccgcgctgctggcgaccggtttctcttcctgctgggttgcttcaacatccgctacctgaacgcttggcagcttacgaatcagctgttccgccgctttgtcgtacatttcctggataatcatatcctgctcggcgtctttcgctaatgccgcctgcgggttatcaaagaacgaccgatagaccttggtggtaatcggatagatatcgtgacccgggatcaggacgctggcatgaacggtcatgaccatctgatactccgccgtacgaccatcctggaacaccgatgcggtatctttctgaatcgacgagccatcgaggcgcagagaagggacatctttacgcagcgtgctggcgtcgatcagttccacgccgttaagacgcagctgattacgtaccgcgcggcttaacgggccgttcggatcgctcgactggaaaatcatggttttcatggtggcgggcaccttggtagtgctacgcaaatgccagccacagccggcggtgacgagcaccgccagagataacaacattgttaccagatatcgcacgcttcctcccgcgcttagccaacgaccagattgagcagtttacccggaacgtaaatcactttacgcacggttttaccgtcgagatatttcgccaccagatgttcctggccggcgcgctcgcgaacctgctcttcagttgcatctaccgcaacggtaattttaccacgaactttgccattgacctggacgacgacgagggtgctgtcttccaccatcgcgctctcatccgctaccggccacggcgcgttgtcgatatcgccttcgccgttcagctcacgccacagggtgaagctggcgtgcggagtgaacgggttgagcatacgcaccaccgccagcagagcttcctgcatcagcgcacgatcctgctcatcttcctgcggcgctttcgccagcttgttcatcagctccatgattgccgcgatggcggtgttgaaggtctgacgacggccgatgtcatcggtcactttggcgatggttttgtggatatcgcgacgcagcgctttctgatcttcgctcagagccgccacgttcagtgccgcaacctctcctttggtggtgtgctcgtagaccagtttccagacgcgtttcaggaagcggttcgccccttcaacgccagattcctgccactcgagggtcatatccgccggggacgcaaacatcatgaacagacgcacggtatccgcgccgtagcgctcaaccatcacctgcgggtcgatgccgttgtttttcgacttggacatcttgctcatgccggtgtacaccagctcgtggcccgccgcgtctttggccttcacgatgcggcctttttcgtcgcgctcaacgatggcgtcaaccggggaaacccagttacgttcgccgttttcgcccacatagtagaacgcgtcagccagcaccatgccctggcacagcagctgtttcgccggctcatcggagttcaccatgcccgcgtcgcgcatcagcttatggaagaagcggaagtagagcaggtgcatgatggcgtgttcgataccgccgatgtagatatctaccggcagccagtagttggccgctttcgaatccagcatcccttcctgatactgcgggcaggtgtagcgcgcatagtaccaggaggattccataaaggtgtcaaaggtgtcggtttcgcgcagcgccggctggccgttgacggtggtcttggcccattcaggatcggctttgatcgggctggtgatgccgtccatgaccacgtcttccggcaggatcaccggcagctgatcttccggggtcggcagcacggtgccatcttccagggtcaccatcgggatcggcgcgccccagtagcgctgacgggatacgccccagtcgcgcagacggtagttaactttacgctcgcccacgcccatggcagccagtttgtcggcaatggcgttgaagcccgcttcataatcaagaccgctgaactcgccggagttaaacaggacgcctttctcggtcagcgcctgctcggagagatccggctcggagccgtcggcagcgaggataaccggcttaatgttcagaccgtacttgctggcgaactcgtagtcgcgctggtcgtgacccggaacggccattaccgcgccggtgccgtattccatcagcacaaagtttgccgcccagaccggaatttcttcaccggtcagcggatgaatggctttaaagccggtatcgacgccttttttctccatcgtcgccatgtcggcttcggccactttggtattgcggcactcgtcgataaaggtggccagcgccggattgttcgccgcagcctgctgcgccagcgggtgacccgccgcgacggccaggtaggtacaacccataaaggtgtccggacgggtggtgtagacagtcagtttgtcagcgtagtcgttgacgtcaaaggagatttctaccccttccgaacggccgatccagttgcgctgcatggtcttcacggtgtccggccagtggtccagcttatccagatcgttcagcagttcatcggcgtaggcggtgattttaataaaccactgcgggatctctttacgctcgaccttggtatcgcagcgccagcagcagccgtcgataacctgttcgttggccagcacggtctggtcattcgggcaccagttcactgcggaggtttttttgtacaccaggccttttttgtacagctcggtgaagaacttctgctcccagcggtagtattccggggtgcaggtcgccagctcgcggctccagtcatagccgaagcccagcattttgagctggtttttcatgtaggcgatgttgtcgtaggtccacggcgctggcgcggtgttgtttttcaccgccgccccttctgccggcagaccgaacgcatcccagccgatcggctgcaggacgtttttgcccagcatgcgctggtagcgggcaatcacgtcgccgatggtgtagttacgcacgtgacccatgtgtagtcgaccagaaggataaggaagcatcgacaggcagtaatacttctctttgctctcgtcttcagttacttcaaatgtacgattttcgtcccagtgaagctggactttcgattctatctcttccgggcggtattgctcttgcatggcagccagtggtcctgttttcaatacagctacaaagtgtagccaatggatgtgttatttcagatcggcatagcatagcccaaacgcccacgtcaaaacagcttttcgcacatcaacatcggcaaaagctgcgcagattatttcgcgactctgtggcttgtcagacacagcgggagaggaataaggtctattatcagaagacgttaaccccaccggaggcgaaatgatgaacaaggttgctcaatattaccgtgaactggtctcctcgctcagcgaacggctccgccatggagagcgcgatatcgacgcgctggtgacgcaggcgcgggaaaaaatcgtccgcgccggcgatctgacgcagagcgagatcgagtcggtgattgcggcggtcaagcgcgacctcgaggagtttgcccgcagctacgaagagagtcacgaagacgagagcgacagcgtgtttatgcgggtgatcaaagagagcctgtggcaggagctggctgatatcaccgacaaaacccagctcgagtggcgggaagtctttcaggatctgaatcaccacggcgtgtaccacagcggcgaagtggtcggtctgggcaacctggtctgcgagaagtgccactatcacctggcggtatacaccccggacgtgctgccgcgctgtccaaaatgtggccacgatcagttccagcgtcggcccttcgagccctaagcgtgcgaaaaacgatgcgcgaggcttcgcgcatcgtggtttgtcttatttcaccgtgttgacttcggtgctcttgaaatactgttttccacccatgtcgctaacatatttctgcgatgagttcagtaccagcttgtcagcagttaacgtcccgactccgcatttcgccaggcccagtatgccgcaacttttaccaccattgaccactttggtggcggttaacgtcatgttgccgcccgcgctgagggttgaataattgtagatcgcgcctttatttttggtatttaaggtcaggtcgccggtgctgctgatctgcccttcgttggtgatatctgagtaggtcgtgattgaaatatttttggcagtaatattgccataattattcactacgccgtgatcggtggtgatatcggcggcattcatataaccattttggttcagccagtagctgtgggcggtaatggcgttggttgcctcaatacgaccactgctgctttgcgccagcgtgccattggtctgcagattgatattttcgccggtgatattgccgaggttatagatctcgcccgtattggcgctgccgtcctgtgtaagcgactgaatggtggtttggccagtagagttaatattgccggtgtttttaaagctgtcgccgacaaacgtcaggctggtgtgtttggcgctgattttgccttcattgaggaaatcaccgattgccgtggcggcaatctggttatttgacagcagggaggctttttcttcgttgcggattttcccgccgctggtcaggcttaatccactggtgccggtcatcgtgcctgagtcgccgttggtgatgttgccgttagcggtggcaatcagctggccgccggagagagaaccggtgttaacgatataatcgccactggagagcattaaataataggcgccggcgatgctaccgtcattggtgatgcccgtgacggtggaaacctggctcagcaaacctttgcccgttattgaccctttgttcagtaaattaccgttgctggtgagcatcagcgtgccgttggagataatagaacccttattacgtacgccaaagccgatgttattgccgaccatgctgatgctgttggcctcaatgccgccaaggctgctgacgtcgatgctgtactgcgggttaaccgtcatctggatcagggtggcctttttaccggcggaggtcaccgagccagagctgttatccatggtgaagttgcccgcgctgaccagggcgttgttggcctgcactttaccgttaatcttaatcgcgtcggcgagcagaaccgcgtagccgttggcggcgttcatgccattttcgccgatggtgagggtgccgcccgttacggtatagctgccgatggcgccatcgtcggtcatattaaccttgccggtggtcaggatagccttgttggtattaacaaagctacagccggaacaggtgatgccgttcgggttggcgattaccacatccgctttctgaccgttgacttcgataaagcccttcaggctactggcgtttttggaggtcacctcgttcaaaatcaccgaagcgctgccggcggtcagattattgttgcgggcgatattgccaaatgtgctgtggctgacatcatcgccgctgttattgaggatggtgccattggtgccgacgttgaagtcgcggtacaggttatgggagacaccggcggcgttcggcttttcaatatcgataaccgtggcgccggaagagtgcgtatagcttgtggggtcggcataaactaccgacgaggttaatactgccgccagtgcgacataagaagccttaaacttaaacattttctttattcctttaaataatgattaataaataatgtaaatatgacgagtcaataatgtgcgaattaatacctccactgtaatgaaaagcccatattcagggcgtcgctatgaaacttatccggtttactcagcggggtactaataaacagatcgtactgcgttgaccatagctgaccgcgcagcccgctgacggcgccggagagcactttgcctttttgatatagatcggcgccgataagacggcctatatccgcgcccaaatagaattgccgctcgtgggtggccagatcccagataaaatcgttgcgccagtaccatccctgattgccggacaggctgttttcaccgtcaaaaccgcgcacgctccagcgactgccaatattgaatttattatcggaagcgagtttgtccgggctgaactgggcgctgaggcggggagcccaggtaaatttgtcgccggtggcgtcaaatttcatcattgcctgcagattaccatgcacaatccgcgacagcgggctatacagcccggcctgctcttccggcgttgctgtcgagctgagccacggcaggctgcgctggatgccgatgctggcatcaacaatcttgttgttaaagtagtgctggtggttgagggtgaattcccatgaggggttctgcttgcgcatcaccagtagctcactgccgccgaagtaataatgcgaggtactcttggcgatccgcaggtcggcggtggttttttgctgccgggtgtgggagagcagacgactcagcgtggcgctgtagtagcgatttttactcttataatccatcgtcgaccagttgccgttaaactgctgacgatactggctgtatgccccgtaggcgcttagtgtccagtagccaaagggaatggagtaatacaggctgccgttgtggttgccgtcgttatgctgattgaattcaatatcgcctccgccggaaaggtacaggatatcgttgagggtggtcaggtcatagagatagagggccccgccggcctggtagcgtccgctggctttgctgccggcgtcgtcaagccaggcgccaagctgccattttttcgccaggctgcgggcgatctggatatcgctttctccctcgtgctggcccggcagcagtttcatgtgcgcggtggcgccgggcagacgctgcaggttggccatcccttgctcaaggtcgcttaagcgcaggatagtaccggaagaggtgggtagggaattccacaggcgggtggtgtccgagccgtcggcatagtcgatagcgcccactttgccatagtgcagcgtgagcctgagtatgccgtgctccagcgactgggagggcacatcaatcagcgaggtgatgtagccttgcgcgatcagctcattttgcaaggtataggccagcaggcgaatgccttcgctacccagacagcgtccctgcgcctgccgtgcggttttcgccagtaatttccgggtgagcgcctggttatcggagtcgatatcgacccggttgatcaatttgcaatgcgtttcctcaggaaaagggatcccctgcggcgccacgcgctgttgtgaagactgaaaatcctgttgctgcggcgccagcgcctcctggcgggctttatcctgctccgtctggtgagtagaagaggccaatggcgcggccccggcggctgaggtgcccgccagcgtgataaacagcagcccggtgagcgtgcgagatcgaattaacatgaagcaatatccatttgtttcattggtttggtggcgcatccattattctgcgagcggcagagaatattgatggcctttatttcggcgcaggcgaggtcaggcaagaatattatattcaattaataaaataatcgtgcgacgaacctgttacgaggcgttatatgctagcggcggtggcaaggccggtccacgaattcattattgaattctttatgaattgatcgatttaataaataagttcagcttttatcgcccaggtttattgggtacgtaaatgatagtagcgataatccgccgcataaataacattggcgaataatatggcggaaaagattaactgcgcataccgggcggtatgcgcagagaaaaaccattaatggagtattttggcgaggaaatctttggcacgctcggattgcggattggcaaagaaggcctctttatcggcatcctcgacaatcttcccttcatccataaagatcacccggttcgccaccttgcgggcaaagcccatctcatgggtcacgaccatcatggtcatcccctcgttggccagttcaaccataacgtccagcacctcgttaatcatctccgggtcaagcgctgaggtgggctcatcaaacagcatggcgattgggtccatacacagggcacgggcaatggccacgcgctgctgctggccgccggagagttgcgccgggtatttttccgcatgcgccgccaggccaacgcgctccagcaacttgaggcctttcttgcgcgctgaggctttatcgcggttaagcactttgacctgcgccagcgtcaggttgtcgataatcgacagatgcgggaacagttcaaaatgctgaaacaccatgccgacgtgcgagcgcagtttagccaggttggtctttttatcgttaaccacggtgccatcgacaataatctgcccctgctgtaccggctcaaggccgttcacagtcttaatcagcgtggatttaccggagcctgacggcccgcagaccaccacgacttcgccttttttcacttccgtggagcaatcggtcagcacctgaaagtgaccataccattttgaaacgtttttcagggtaatcattacacagtccttttcttcaaccagctgaccaacagcgaggcgctgaggctaatcacaaaatagacgccgcccgcgaacaggatcatttcgacctgggttccgtcacgctcgccaatggtggaggcggtacggaagaagtcggcgagactcaatacatacaccagcgaggtatcctggaacaggacgatcccctgggttagcagcagcggcaccatggcgcggaaggcctgcggcaggatcaccagccgcattgactgccagtgggtcatccccaacgccagcgcggcgctggactggccgcgggagatgctctgaatgccggcgcggataatctctgaatagtaggcggcttcgaacatcgaaaacgccaccatcgccgagatcaggcgaatatccgttttcggcgacagtcccagcacgttctgcaggaagcccgggacaatcaggtagaaccacagcaggaccatcaccagtgggattgaacggaatacgttgacgtaggatttagcaaaccaggccagcggcataaagctggacaggcgcataaccgccagcagggtgccccagacgatgccgaccacgatggcgatcaccgtaatcttaagggtgatcaccagccctgccagcagatagggcatggagggaacgatcgaactccagtcaaaatcgtacattatttgcctcccatattgccaggcaggcgaaccttacgctcgaccacatacataatcagcataatcaccgcgttgatgaaaacataggccagggtgatggcggtaaaagactcccaggcatgagcggagtagtccagcagtttgcccgcctgcgcggccatatcggccagaccgatggtggaggcgatggccgagtttttcaccaggttcatcatctccgaggtcatcggcggcacgataacgcggtaggcgttcggcagcagcacgtagcggtaggtttgcggcagggtcaggcccatcgccaggccggcgttcttctgcccgcgcggcagcgactggatggcggcgcgtacctgctcgcagacgcgagcggcggtaaacagccccaggcacagcatggaggagacaaagaattgaatgtttgggtccagctccgatttaaaccacatgccgatattttccggcaggaactccggcaccaccaggtaccaggtaaagaactgcacgatcagcggcacgttgcgaaacagttcgacatagcaggtgccaatgcccgagaggaagcgattgggtaccgtgcgtaaaatgccgaacagtgagccgacgagaaaagcgatgatccaggccgagatggagagggcgacggtgatttgaaaaccgctccacagccagcccaggtaggtagtgttgccgaagggggcctgttgcaggaatatcccccagttccagtctattgacatacatgactcctggaaaaaaaagggtagccagtgctaccctcgaagacggttgtccagcttgtttcggtattcgcggcggctggggaacgaccagccgccgtatagtctgtccgtgctgtgacaatcatcgggagggcaggatatcccgcccctggttgttataattagttcagtgctttgtcgttaggtgatttgaacagcgctttcatgtcgtccgacagctcgaagttgaggttaagattttttggcggaatcgggtttttgaaccatttgtcaaaccacttctccgcttcgccagaggtctgagcctgggcgacggtttcatcaaccagcgccttgaacgtcggatcgtccttccgcagcatgcagccataggcttccttcgactgcggggtgccgacgatttcccagttatccggtttcttcgccttggcgcgttcgccagccagcagggcatcatccatcataaaggccacggcgcgtccgctctccagggtgcggaaagagtcgccatgatctttggcgctgataatgcgcatattcatttttttctcatcgttcagcttatgcagcaggatctctgaggtggttccggaggtgacgacgaccgctttatccttcaggtccgggaaatctttgatcgggccgcctttcttcaccagcagacgggtaccgaccacgaagatggtatcggagaaggccgcctgtttctggcgctcaaggttgttggtggttgagccgcactcgaaatcaaaggtgccattctgcagcaacgggatacggttctgcgaggtgaccgggatcagtttgacctgcagatcgggtttgttcagttttttcttgatggcatcgacgatggcgttggaataatcctgagagtagcccacaaccttctgctggttatcgtagtaagagaacgggaccgaagattcacgatggccgacaacgataaccccgtttttggcgatcttatccagggtgttctggccagccgccggggcagcatcttccgcctgcgccagaccagcggtcattcccattaccagcattgccgtggccagtttacgtaattgcatatccaactccttatccgcagcgtcagcgacgctattgatacccattgtgattgtgtgtgttgttattgggggcacgcatccacgtgccgcatttgtatgtgtttgttagcatttagtttggcttaatgtaaagattttgctgctttattgtttatttttgcgaagcgctccgcaccaatcggaggcaaatatcttccattgcaccaaaatagcgcgaccaccgatcgtttctggtgcaacccggttgcactgggtcggacgatgccgctaccaggttaaataaagcaatgactgtgccagagtggcagatgatgggaagaaaaagccggcgacgggcgtcgccggcggagaaacttatcggcgacgctggcgcaggctcatcagcagcgcggcgaaaccaaacagcgccgtcagcgcccatagcggccagttgccggtgcgggcgtaaggggttaagccgctggtgggggtcacggtggtggtcaacacctcgcgggtaaactgcgggatcatcttctggatctcgccgcgcgggccgatcaccgcagtaatgccgttgttggtgctgcgcagcagcgggcgggccagctccagggcgcgcattcgcgccatctggaagtgttgccacgggccgatggacttgccgaaccaggcgtcgttggagatggtcagcaggaagtcggtgtccggccggaagttatcccgcacctgttccccgaggattatctcgtagcagatggccgcggtcagcttcaggttatgcgccatcagctgcggctgcacgtaggggccgcggctgaaggaggacatcggcaggtcaaagaacggcgccagcggacgcagaatcgactccagcggtacaaactcgccgaacggcaccagatggttcttgttgtagcggttggtcgagtcgtagcggtacgggttatctttgccgagagtaatgatggtgttgtaggtatcgtaacggttctgcttgttgagacgcgcatcgacaatgccggtgatcagcgagctgtcttttgcgcgcagcagatcgtccatcatgctgaggaactgctgctggttgatctccagatccgggatcgccgattcaggccagataatcagctgcgagtggccgatatgcggctgggtcagcgccaggtaggttttcagggtattgaccagctgcttttcgtcccatttcatggcctgtgggatatcgccttgcaccagcgagacctgggtcgcgcgcgccggcagcagctgataccactggatatagcgcagcgggaacggcagggcgaacagcagcgcggcaatcgccagcggcttccagttgcgctggacgagagccagggccagcaggccgctgactaccatcagcaggaagttaatcgcctcgacgcccatcaccggcgcgaggcctttcagcgggccgtcaatctggctgtagccgaactgtagccacggaaagccggtcagcacccagccgcgcaggaactcggtgatttgccagacgacaggggcagcgatagccatccgtatccagttagttttaggccacagacgggcgagcaggccggcaaacaggccggtgtagagcgagagataggccgccagcagaacgacgaggaagacgttaaccgggccgggcattccgccaaactgcgcgatgctgacatagacccagttgatacccgtgccgaacagcccgagtccccagaaatagccgatcccggcgctttgcagcgggcgtcggttgagggttaacgcctgcagaccgatcagcgaaacgatagccgctggccagaagtcataaggtgaaaaagccagcgttccgctggctccaaacaacagcgccagcaacagacgtatgcgctggcgttcaagaagagaggcaaataccatttaggttaatcgtcccgttaattaacgcctgctgctacaggctattctttttgccagccggacgcggggcacctacaaccgtgtatgactcgcggtctcccggctggccatttcagcgctaccgcttactcttccagcttcggctggggagcgtcatcgggcagctttacatgcacctgaatgatacgacgactatctgccattgctaccttgaattggtaaccatcaatgtcgatagattcgccgcgggccggcagatggccgaaggcctgcatcaccagcccgccaatggtatccacttcttcatcgctaaagtgcgtgtcgaaggcgtcgttgaagtcttcgatggaggccagggcgcgcaccgtccaggtgtggcggctcagctggcggaaatcgatatcttcttcttcgtcgtactcgtcttcaatttccccgacgatgagctcaaggatatcctcgatggtcaccaggccagagacgccgccgaattcgtcaataacgatcgccatatgatagcgctgtgagcgaaactctttcagcatgcggtcgacccgcttgctttccgggacgacaaccgccggccgtaacactttttccatgctgaaggcttcggcgtcgctgcgcataaacggcagcagatccttggccatcagaatcccttcgatgtgatctttatcttcactgatgaccgggaaacgcgagtgggcggattcgatgatgacatccaggcactcgtccagcgtctggttgcgtttcagggttatcatttgtgaacgggggatcataatgtcgcggacccgctggtcggcgatatccattaccccttcgagcatgtcacgcgtatcttcatcgataaggtcgttttgcccggaatcacggatcagcgccagcagttcatcgcggtttttcggttccccgtgaaaaagctggctgagtaacagggagaaaaatccctttttgctgtttactgtgtcactactgtgtgaattgtcgtcgctcatggcgtcgtttgggttctcatgttgatttaactgtcgctcgtcgcgcgtaaactcagcgccggacggcatgggttgcctgactttctggcaggtaaaacgcagaaacagcggccggatgaggcgcaagcaccgccatccggctgggcgctattccgcaatcttctcggaaatgtacgggtcctcatagcccagagcaagcattatctctgtttcaaggccttccatctcttccgcttcgtcgtcttcgatatgatcgtagcccagcagatgcaggctaccgtgcaccaccatatgcgcccagtgcgcctccagcggcttaccttgctcgctggcttcctgctctaccacctgacggcagatgatcagatcgccgagcagcggcatttcaattcccggcggcgcttcaaacgggaaggagaggacgttggtcggcttatccttgccgcgataggtcaggttcagctcatggctttctgcaacgtcgaccagacgaatcgttaactctgactcctcctgaaacggcggaatgacggcgtcgacccagcgttggaaaagggcttcgtccggcaggccgctggtctcttcgcaggccagctgtaaatcgaggatcacctgactcatttttgctcctgttcctgggcttcgcgtttgcgctcggcggccagctctgctttacgtttctggtctgcggcttcccatgcctcataggcgttcacgatgcgggcgaccaccggatggcgcaccacgtcttcgctatggaagaagttaaagctgatctcatcgacttccgccagtacttcgatggcatggcgcagaccggatttggtgctgcgtggcaggtcaatctgcgtgatgtcgccggtgatcaccgccttggagttaaagccgatgcgggtcaggaacatcttcatctgttcgatggtggtgttctggctttcatcaagaatgataaaggcgtcattcagcgtccgtccgcgcatataggccagcggggccacttcgatgacgttacgctcaatcagcttctccactttctcaaagccgagcatctcaaacagcgcgtcatacagcgggcgcagatacgggtcgaccttctggctcagatcgccgggcaggaagccgagcttttcgcctgcctcgacggccggacgggtcagcagaatacggcggatctcctggcgctccagcgcatcgaccgccgccgccactgccagataggttttacccgtacccgccggacccacgccgaaagtgatgtcgtgatcgaggatattggcgatgtactgcgcctggttcggcgtacgcggtttgattaccccgcgcttggtcttgatattgacggctttaccgtactcaggcacgctttcggcgctctgctccagtacgcgcgcttccttgatcgccaggtggatctgctctggttcaatatcctgaatctgaccgcgcattggcgctgtgtcgacatacaggctgcgcagaatatcggcggcagcgtgcacgcacagggcgcgaccggtcagcttaaagtgattgtcacggcggttgatctcaatgcctaaccgacgctccagctgtttaatgttgtcgtcaaacgggccgcacagggctaacaggcgtgcgttatccgctggctccagggtaatctcacgagtgtctatgttcaaactattcctctttacgcaggtggccggacgcggcgcgtggccggctaatcaggaaattatttacgtcacaggaaaatggcgcaagcattgctgtagatatagggacggagagaggaattacaaggcctgccggaaccgacaggcctgaagggatcatggctggtaaattcccacgccaagatcgttctctttacgggtgcgggcaatcactgattcgggtgattcagcgatacgcagacccatctccgcttcggtgcgcacgattttaccgcgcagcgagttggtatatacatcgacgatttcgacatcgacaaacttaccgacgaggtccggggtaccttcgaagttgaccacccggttattctccgtacgtccggagagctccatgatgttcttacgcgaggtgccttccaccaggatgcgctgtaccgtgccgagcatgcgacggctccaggccatcgcctgctggttaatgcgttcctgcaggatatacagacgctgttttttgtccgcctccggcacgtcgtcgaccatatcggccgccggggtgcccgggcgagcggagaagataaagctgtagctcatatcgaaattgacgtcggcgataagcttcatggtcttttcgaaatcttccgtggtttcgcccgggaagccgacgataaagtcggagcttatctgaatatccgggcgcgcttcacgcagcttgcgaataatcgctttatactccagcgcggtatgggtgcgtcccatcaggttcagcacacggtcggagccactctgcaccggcaggtgcaggaagctcaccagctccggcgtatcgcgataaacgtcgatgatatcgtcggtaaattcgatcgggtggctggtggtgaagcgaatgcggtcgatgccgtcgatggcggcgaccaggcgcagcaggtcggcaaagctgccggtggtgccgtcgtaattctcaccgcgccaggcgttaacgttctgccccagcagattgacctcacgcacgccctgcgccgccagctgggcgatttcaaacaggatatcgtcgcacggacggctaacttcttctccgcgggtatacggcaccacgcagtaggtgcagtatttattgcaaccttccataatcgagacaaaggcggtcggcccttcggcgcgcggctctggcaggcgatcgaatttttcaatttccgggaagctgatatcaactaccggactgcggttgccgcgcacggagttaatcatctccggcaggcggtgcagggtttgcggcccgaaaataatatcgacatagtgcgcgcgctggcgaatatggtcgccttcctgggaagccacgcagccgccgacgccaataatcaggtccgggttcttctctttcagcagcttccagcggccaagctgatggaaaactttttcctgggccttctcacgaattgagcaggtattgagcaacagcacatctgcttcttccgccacttcggtcagttgatacccatgtgtcgcatccagcagatcggccatctttgatgaatcatactcgttcatctgacagccccaggttttaatatggagtttttttgtcattgacttgctcatgctcagtaatagatatccaaaacgcggggatatatacagggtgaatttcgcattccagggcgcgtattgtaatgctttggtcgccccctgaccagtgcgagcgttatcgccgcaagagggcgaaaaatccggtaaacttaacggattctgctttaaggataatagccatgacaattcacgtaacagatgtcgccatcgtgggcggcggcatggtcggcggcgccctggcgttagggctggcgcaacagggatttaccgtgacggtgcttgagaaagcggcgccaccggcgttcgatccggcatccgccccggatgtgcggatctcggcgatcagcgcggcttcggtcggcctgctgaagagtctcggcgtctgggatgccatacgggcgatgcgcgtccatgcttatcgccgtctggagacctgggagtgggagagcgcgcacgtcgccttcgacgccgcggagctcaagctgccggagctgggctatatggtcgagaacaaggttctgcaatggggcctgtggcaagcgctggcggcgcatgaggcggttaccctgcgcgtcggtagcgaactgaaaacgatgcagcgcggcgagatgcagacggcgttgcatttgcgcgagggggagacgatccacgcccggctggttatcggcgccgacggcgctaactcccaggtgcgggagatggccggcatcggcgtgcacgcctggcaatatcagcagtcctgtatgctgatcagcgtcgaatgcgccgacgatcccggcgacagcacctggcagcagtttactcccagcggcccacgcgccttcctgccgctgttcgaccactgggcttcgctggtctggtacgacgccccggcgcggatccgtcagctgcagagcatgaccatggcgcagctccagcaggagatcgccagtcactttccggcgcggctggggcaggtgacgccgcaggcggccggcgccttcccgcttacccggcgtcatgcgctgcagtatgttcagcccggcctggcgctggtgggcgatgcggcgcacaccattcatccactggcggggcagggggttaaccttggctatcgtgatgtcgatgccctgctggagatcctggcggaagcgcgcggccgcggcgaagactgggccagcctgccggtgctgaagcgctaccaggcgcggcggcgagcggataattttatcatgcagtcggggatggatctgttttatgccggtttcagcaatgacctggcgccggtgcggatgctgcgtaatattggcctgatggcggctgaacgcgccggggtgctgaagcgtcaggcgctgaagtatgccttaggcttgtaaaaccggcttcccgggcaggggcgtagcggagagcgcctgcccggcagtcaggacggagtaagcatgtcaggacgccaatagcaaaaaagcccaccgaagtgagcttttttgcattgaagtggctggggtacgaggattcgaacctcggaatgccggaatcagaatccggtgccttaccgcttggcgataccccaattgtctgttgcgcttgaccgtaactacaccggttgagggcaacagtgcgttcactgctgaacgacttttaaatttggctggggtacgaggattcgaacctcggaatgccggaatcagaatccggtgccttaccgcttggcgataccccaacaaattgtttgcggatttatcgatgcatatcgatacgtccagaatttggtggctacgacgggattcgaacctgtgaccccatcattatgagtgatgtgctctaaccagctgagctacgtagcctaattgtcttactgcttcttcgatggctggggtacctggattcgaaccagggaatgccggtatcaaaaaccggtgccttaccgcttggcgataccccaataccgtcgcggtgaaccgcaaatatcgaagaaatatggctggggtacctggattcgaaccagggaatgccggtatcaaaaaccggtgccttaccgcttggcgataccccatccgtacaacgctaactggtgaatggtgcgggaggcgagacttgaactcgcacaccttgcggcgccagaacctaaatctggtgcgtctaccaatttcgccactcccgcaaaaaagatggtggctacgacgggattcgaacctgtgaccccatcattatgagtgatgtgctctaaccagctgagctacgtagccatctttttttcgcgtaaccttatcggcgttgcggggcgcattatgcgtattgggcctgcgagcgtcaacctctttttcaaggaaaatcgttgtaatgtgactgtttggttaggttgcgaacagctcgctggaatattcggcaattattggttatttatcgtttttcagcggtataaatccggcaaaaagaaaacggaccccggagggtccgttttgcgtttcaccgcccgtctgggcttatttgtaggccgactggtggacaccgaccgcgcggcctgatggatcgttcatggttttgaacgcttcatcccactcaatggctttcgctgaagagcaggccaccgacggaccgccagggacgcactccgccgcgctcggcagcgggaacagctcttcgaagatctcgcggtacaaatagccttctttggaggtcggcgtgttgtacgggaagcggaagcttgcggtttccagttgctggtcgctgatctgtttggcggccacttctttcagggtatcgatccagctgtagccgacgccgtcagagaactgctccttctggcgccaggcgacgctggccggcaggtaggattcaaagcattcgcgcagaatgtgtttttccattttgccgttgccgcacatcttatcctgcgggttaatgcgcatcgcgacgtcgaggaacttcttgtcgaggaacggcacgcgggcctccacgccccaggcggacatcgctttgttggcgcgggcgcagtcaaacatatgcagcgcctgcagcttacgcaccgtctcttcgtgcagttctttggcgttcggcgccttatggaagtagaggtagccgccgaacacttcgtccgaaccttcgccggaaagcaccattttgatgcccatggctttaattttccgcgacatcaggtacatcggcgtcgaggcgcgaatagtggtcacatcgtaggtttcgatgtgatagataacgtcgcggatggcatccagcccttcctggacggtaaagtgaatttcgtggtgcacggtgccgaggtggttggccacctcctgcgccgctttcaggtcaggagagccttccagaccgaccgcgaaagagtgcagctgcggccaccaggcttcgctacgctcctgatcttcgacgcgacgggcggcgaatttcttggtgatagccgagatgaccgatgaatcaagaccgccggagagcagcacgccgtaaggcacgtcggacatcaggtggcttttcaccgactcttccagcgcctggcgcagctcgttcttatcggtaacgttgtctttcaccgcgtcgtaatcaaaccagtcgcgctgataatactggcggatttcgccgtctttgctccacaggtagctgcccgccgggaactctttaatggtgcggcataccggcaccagcgctttcatttcggaggcgacatagaagttgccgtgttcgtcatggcccatatacagcgggataatgccgatatggtcgcggccaattaagtacgcgtctttttcgctgtcgtacagggcgaaggcgaacattccctgcagatcgtcgaggaactccgggcctttttcctgatacagcgcgaggatcacttcgcagtcggaaccggtctggaactggtagcgatcgccatactccgcgcgcagcgcctggtggttgtagatctcgccgttaacggccagcgcatgggttttttcggcgttgtacagcggctgggccccggcgttgacgtcgacaatcgacaggcgctcgtgcgccagaatcgctttgtcgctggcatatacgccagaccagtccggaccgcggtggcgcatcaggcgggaaagctccagcgcctttttacgcagctcgcctgcgtcagttttaatatccagtacgccaaaaatagaacacatagccttctccattaccctgtcgtgtttgatgttgtgctggcttcgtctcgtggcgaagcctgagtgcgtgcttaagaaaatgccgtaaagggggagcaggcgcaagggttttgcggccggaaaaagaaaaaacgcaaccgtgattgttgaacagtgaaaaaagagtatcttttgaacggctttattgaggaattcgtatttataggccgtttttattagatggggtaattctgatgggcgctagaaatgaaaaaccacgtcctgcgacgtggttggcatcagaaaatatcgatttccgcgacggaagggtaaatccacgacgggcggaacggcatgctgtcgatgtcgtcgagggtggagacgccggagagcaccagaatagtctccagccccgcctggaaaccggccagtatatcggtgcgcaggttatcgccgacgatcaccgtctgctcggagtgagcctgcattttattcagcgctgaacggatgatccacgggctgggtttgccgacgtaaaacggcttacggccggagatcttctcgatcccggcgcacaacgcgccgcaggcagggtagaagccgcgaccgtgcgtatccgggttagtggcaatgaagcgggcgccgttggcgacgaagaaggcggccttatgcatcatttcccagttaaaggagcgagtttccccgacgatgacaaaatccgggttcacatcggtaatggtaaagccggctttgtacagctcgtggatcagcgccccttctcccaccacgtaggcttttttgccttcctggcgacgcagaaaatcggcggtggccatcgctgaggtgtaaaaggcgctatccggaacatcaattccagcggtggcgaaacggttcgccagatcctggccggtttgcgacgggtagttggtcagcattaccagcggcatgcctttatcgaggatgcgcttgataaactcggctgcgccgggaacggcgacgttatcgtgcatcagtacgccgtcaatatcacaaattatgttttgaatggtcatggtgggtccagaatcattaacaaagacgaaactatacgcgtcatcgatgaggtttcacacctctgacgggcgaggcccgcccgtattaaggtgacgcgctatgagaaaaggggcgattagctctcaagcaaacgctgcagcagcgtgccattgagcatggcgcgtttgaccagcgcgaaggcgccgattgcagagcggtgatcgagggtggagcgcaccaccggcaggttcttacgaaacgccttaagcgcctgggcgttaatgcagccttcgatggccggaagaaggaccttttcagcttccactatttcgccggcgacgacgattttttgtgggttgaacaggttaatggcgatggcgatcgttttcccgaggtggcgccccacgtactcaatcacctcgcaggccagggcatcgcccttgttggccgctttgcagatagttttgatcgtgcagtcatccggcgtcagacggctctggtagccctgctccagcaggtggcgaacccgctgttcaatggcggcattggccgcgacggtctccagacagccgaagttgccgcagtggcagcgttcgcccagcgggtcgacctgaatatggccaatttcgccgacgttgccgttgcggccgataaaaatgcgcccgttggagataatccccgccccggtaccgcggtgcacgcgcaccagaatggagtcttcgcaatcctggcttgcgccaaaatagtgctcggccagcgccaggctgcggatatcgtggccaacaaagcaggtaacgttgaagcgtttctccagcgccccgaccaggccccagttttccaccgcaatgtgaggcatatagcggatcacgccgctttccgggtcgacgaggcccggcaggatcactgagatagcgatcagctcgcgaattttgcgctgacagttttcgataaaggtggcgatgatattcagcagggcgtgttccagcgtttcctgggtgcgctcgggcagcgggaagtgctcctcttccaggggcttgctgcttaaatcatacagggtcagagtggcgtcatagcggccaagccgcacgccgatggcgttgaagttgcgggtttctgcgatgatagagatagcgcggcggccaccggtggaggcctgctgatcgacttctttgatcaggccgcgctcaataagctgacgcgtgattttggtcacgctggcaggggcaagctggctttgttcggctatctgaatgcgcgagatgggcccatgctggtcaatcaggcggtacacggccgcgctgttcagttgttttacgaggtcaacgttaccaatttgagcttgtccgcctgctgtcatacttttacttactcagtgacgacctcgttaccattaacgatggtcttggtgattttataatcgcgtgtaaaggcggtcaggttagcgaccatgcccggcgcaatgctgccgagctgcttgtccacgccgatagcgcgcgcaggatagagcgtcgccatgcgcaatacttcgtccagtgccacgccgcaatgctcaaccagattacgcaccccttcaatcatggtcagggaagatccgctgagggtgccgttttcatctacgcacagcccattgcggtagtatattgttttcccggcaaaaatgaactggtcaatattcgcccccgccggcgcggtggcgtcggtgaccaggcacagcttgtcgcctttcaggcgcttggcgttgcgcacgttggcgtaatcgacgtgcatcccgtcgacgatgataccgcagtagacatccggctcgtcaaaaatcgccccggcaagacccggttcgcggccggtaatgtacggcatcgcattatacaggtgggtggcaaaggtaatgcccgcgcggaagccgactttcgcctctttcagcgtagcgttggagtggcccgcggagacaacgatcccggcggcgaccagtttgcggatcacttctggctcaacgcgctcaggggcgagggtcactttggtgatcacatcggcgttgtcgcacaggacatcgaccagcgccgcgtccggtttacgcacgtagtccggattgtgggtgcctttcttaacgatattcagccacggcccttcgagatgcaggcccagcgcctggttcggatgtttttgcagatattcgcgcatcacgcgcacgccttgcttcatcagatcgtcgctggaggtaattagcgtcggcaggaagctggtgcagcctgagcgttcgttggccttctgcatgatctccagcgtttcgacagtgaccgcctctgggctgtcgttaaactgcacgccgccgcagccgttgagctggacgtcgataaaaccgggggcgattattgcgccgttgactgagcgctgctcgatgtcagacggcaaatctgccagcggacaaagacgttcgataaagccattagcgataacaaccgcatggtcatcgagaatttcatgaccggtataaacccggccctgggttaatgcatacattacgacccccggtatatacgcctcatcaggtcagcgttcgttcgtttgccgccggcatgatggtgcgtacaaagaaaaagatgatcccgcgccagggcgcgggaaggactacattacagacctttaatattttcagcttctaattcgttgaaatatttcagcgtcttcactttcagctccatggtggacggttcgtcgcagacgatcaccgccttcggatgcagttgcagacaggtaatggtccacatgtggttgacgttaccttctaccgccgcctgcagcgccagcgctttctgatgacccagcaccagaatcatcacttcttctgcgtccagcagggtgcccacgccgacggtcagcgcatatttcggcaccagatccacatcgccgtcgaagaagcgggagttcgctacgcgggtttcatgggtcagggtcttaatacgggtgcgggacgccagagaagaggccggttcgttaaacgcgatatgaccatcgttgcccacgccgcccatgaacaggtggattttaccgtaggaacgaattttttcttcatagcgacggcattccgcatcgatgtccggcgcgttaccattcagcaggttgatattttctgccggaatatcaacgtggtcaaagaaattacggtgcataaagctatgatagctttccggatgctctttcggcaggccaacgtattcatccatgttaaaggtgacgacgtgcttgaagctaacctggcctgctttatgcatttcaaccagcgccttgtaggcggtcagcggggtaccaccggttggcagacccaggacgaacggacggtccgcggttggtttaaatgcattaatgcggttaacgatatggcgggcagcccatttaccgacctgctcagcggttaccaggggaatcagtctcattcttcacctctatagtcaaagtagattctggcggattggcgccagcactctaaggagagtattgcagcaactgcgccgaccggggtcaatccgtgttgatttttttaatgataaaataagttttcgttgttagccagtgcaagggaggagggaatacgatatttggtgataattatcacaaaaaatacccgtttaatttgcgatacgaattaatttttcacacactttgccggtaagtgataaaaccgaccttgttacacaataaaaaagtggctttgaaatgagcctcatcggggtctcatagggggaataagatgaatattttaggtttctttcagcgactgggtagggcgttgcagctccctatcgcagtgctgccggtcgcggcattgctgctgcgtttcgggcaaccagacctgttgaatgtacccttcatcgcgcaagcgggtggggcgatcttcgataatctggcgctgatcttcgcaattggtgtggcatcaagctggtccaaggataacgccggttctgcggcgctggccggtgcggtagggtatttcgtgatgaccaaagcgatggtcaccatcaatccggaaatcaatatgggcgtgctggccggtatcattaccggtctggtggcaggggcggtatacaaccgctgggccggcatcaagctgccggacttcctgagcttcttcggcggcaaacgcttcgtgccgatcgccaccggcttcttctgtctgatcctcgcggcgatcttcggctacgtctggccgccggtgcagcacgctatccactctggcggcgaatggatcgtctccgcaggggcgctgggttccggtatctttggtttcatcaaccgtctgctgatcccaaccggtctgcatcaggtgctgaacaccatcgcctggttccagattggtgagttcactaacgccgctggcgctgtgttccacggcgacatcaaccgcttctacgccggcgacggcaccgcggggatgttcatgtccggcttcttcccaatcatgatgtttggtctgccgggtgcggcgctggcgatgtatctggcggcgccgaaagcgcgtcgtccgatggtaggcggtatgctgctgtccgtggccatcaccgcgttcctgactggggtaaccgagccgctggaattcctgttcatgttcctggctccgctgctgtacctcctgcatgcggtgctgaccggtatcagcctgttcatcgcaacggcgctcgggatccatgcgggcttctccttctccgcaggtgcaattgactacgtgctgatgtacagcctgccggccgccagcaaaaacgtctggatgctgctggtgatgggcgtggtgttcttcttcgtctacttcctgctgttcagcgcggtgatccgcatgttcaacctgaaaacgccgggtcgtgaagacaaagccgctgacgtggtaacggaagaagccaacagcaacactgaagaggggctgacccagctggcgaccagctatatcgccgcggtgggcggaacggacaacctgaaagccattgacgcctgtatcacccgtctgcgtctgaccgtgggcgattcggcgaaggtgaacgacgccgcctgtaaacgtctcggcgcgtccggggtggtgaaactgaataagcaaaccattcaggttatcgtcggtgcgaaagcagagtctatcggcgatgagatgaaaaaagtggttacccgcggcccggtagcggcagcggcaccggctggcaacgtcgccaccgcagcgcccgcggctaaaccgcaggcggtagcgaacgcgaagaccgttgagtcgctggtttcgccgattaccggtgacgtggtggccctcgagcaggtgccggacgaagccttcgccagcaaagccgtcggcgacgggatcgcagtgaaaccgaccagcaacatcgtggtggccccggccgccggtaccgtggtgaaaattttcaacactaaccacgcgttctgcctcgaaaccaacaacggtgcggaaatcgtcgttcacatgggtatcgacaccgtggcgctggagggcaagggcttcaaacgtctggttgaagagggcacggacgtgaaggcgggtgagccgattctggaaatggatctggacttcctcaacgccaacgcgcgctcaatgatcagtccggtcgtctgcagcaacagcgatgactacagcgcgctggtgatactggcgagcggtaaggtcgttgctggccagacgccgctgtatgagattaaaggcaagtaaggctcctgagtcgagtttttgcctcagcggcgaagggaaaccttcgccgcttttttttccagcaatcggccccataatcctcttctgatacctattttacgtaactaatagttgtcactacgccctgcttgtaagatcatgtgccgttatacgttgtttacgctttgaggaacccgtgatgagtgaggcagaagcccgcccgactaactttatccgtcagattattgatgaagatctggctaccggtaaacataccaccgttcacactcgcttcccgccggagccgaacggttatctgcacattggccatgcaaaatccatctgcctgaacttcggcatcgcccaggattatcagggccaatgcaacctgcgtttcgatgacaccaacccggtgaaagaagatatcgaatacgttgagtcgattaaaaacgacgtgcagtggttaggtttccactggtccggggacgtatgctactcgtctgattatttcgatcagctgcatcagtatgcggttgagctgatcaacaaaggtctggcctatgttgatgaactctctcctgatgaaattcgcgaataccgcggcaccctgaaagcgccgggtaaaaacagcccgtatcgcgaccgcagcgtggaagagaacctggcgctgtttgaaaaaatgcgcagcggcggcttcgaagagggcaaagcctgcctgcgcgcgaagatcgatatggcgtcgccgtttatcgtgatgcgcgatccggtgctgtaccgcattaagttcgctgagcatcatcagactggcaacaagtggtgcatctacccgatgtacgacttcacccactgcatcagcgatgcgctggaaggcattacccactcgctgtgtaccctggagttccaggacaaccgccgcctgtacgattgggtgctggacaacatcagcatcccggtgcatccgcgtcagtacgaattctcgcgcctgaatctcgaatacaccgtgatgtccaagcgtaagctgaaccagctggtgactgagaagcacgtggaaggctgggacgacccgcgtatgccgaccatctccggtctgcgtcgtcgcggctacaccgccgaatccatccgcgagttctgcaagcgcatcggcgtgaccaagcaggacaataccatcgagatggcgtcgctggagtcctgcattcgtgaagatctgaacgaaaacgccccgcgcgcgatggcggtgatcgatccggtgaaactggttatcgagaactatccgcagggcgaaagcgaaatggtggtgatgccgaaccatccgaacaagccggaaatgggcagtcgtgaagtgccgttcagcgccgaaatctggatcgatcgcgcggacttccgcgaagaagccaacaaacagtacaagcgtctggtgctgggtaaagaagtgcgtctgcgcaacgcctacgtcatcaaagcggaacgcgtggagaaagatgccgaaggcaatattaccaccatcttctgcacctacgatgccgacaccctgagcaaagacccggccgacggccgcaaggtcaaaggcgtgatccattgggtaagcgcggcgcatgcgctgccggtagagatccgtctctacgatcgtctgttcagcgtgccaaacccgggcgcggcggaagatttcctcgcggtaatcaacccggaatcgctggtgatcaaacaggggtacgcggagccgagcctggcgcaggccgaagccggtaaagcttaccagtttgagcgtgaaggctatttctgcctcgacagccgctatgcaaccgcaaccaatctggtgttcaaccgcaccgtcgggctgcgtgatacctgggcgaaagcgggcgaataacatttcttttcttgtcaaagcgtcgctcccagcggcgctttttttgtttcagaatcagctaattaaacttttcattttcgcgatgcgaattaattctgtttctgcgcggtaataaatagcgcttctgatgtttcctgtcacatacaaaaaaccaatgtaatcgctttcaatgattgcgtttttccctgattttgcaatgacttccataacaaaatcatcagagataagactgtaacaaaacgacataaaatatgtgcgctttgtcataatcttaagctttgcctcacgaaaaacattgataattcgcgtcacgaaaaatagtctatctacagtggttttgcggtcttttttaccgccccacattttgcagttttatttattttttagcgattgaccgctggtcttcgccttttaaaacgtcaaagaggatatgcacatgcgtacgtttagtggcaaacgtagtacgctggcgctggctattgccgccgtcaccgcgatgtcgggctgggttgtggctccacaggccagcgcagcaggctttatcgatgattcaaccttaaccggcggtatctattactggcagcgtgagcgtgaccgtaaagatgtgaccgacggcgacaaatacaaaaccaacctttcccactctacctggaacgccaacctggacttccagtccggctatgccgccgatatgtttggccttgatattgccgcgtttaccgcgattgaaatggcggagaacggcgatagcggccacccgaacgaaattgccttctcgtcacgtaacaaagcctatgacgaagactattccggcgataagagcggcatcagcctgtataaagccgcagcgaaattcaaatatggtccggcgtgggcacgtgcgggctatatccagccaaccggccagactctgctggctccgcactggagttttatgccaggtacctatcagggggcggaggccggggctaacttcgactatggcacggcgggcgcgttaagtttctcctatatgtggacgaacgagtataaagcgccatggcatatcgagatggacgatttctatcagaacgataagaagaccaaagtcgattatctccactccgtcggcgctaaatatgatttcaaaaatgacctggtgctggaggcggcatttggtcaggctcagggctatatcgatcagtactttgctaaagccagctacaagtttgacgtcgccggcgcgccgctgagcaccagctaccagttctacggcacccgcgataaggtcagcaacggcggggtcaacgacatctatgatggcaccgcatggctgcaggcgttaacctttggttataaggtggcggatgtcctggatctgcgtctcgagggaacctgggtgaaggctgatggccagcagggctacttcctgcagcgtatgaccccgacctacgcctcttccaatggtcgtctcgatatctggtgggataaccgctccgactttaacgccaatggcgaaaaagcggtcttctttggcgcgatgtatgacatgaaaaactgggatatgccgggctgggcgttcggcgcgtcttatgtctacgcctgggatgcgaagccgggaagaatgtcctctccggatgcgtactatgaccctgactatcgcctgaaagagtcggcctatagcctggatgcaatgtataccgtacaggaagggcgggcgaagggcaccctgttcaaactgcactttacccaatacgacaaccattccgatattccgagctggagcggcggctacggcaacatcttccaggatgagcgcgacgtgaagttcatggttatcgccccgttcactattttctgatgcctgcgcggcgggcgtgagcctgccgcacctctgggagaacgacaatgaaaaaaatgctgcttattgccatgatggcagcgggcctggtggcctgcaccacgtcgccggcgccgaaagaagacaccaaactgaaagatgcctatagcgcctgtattaatacggcggaagggaatccggacaagattgaagcctgccagagcgtactgaatgtgctgaaaaaggataaacagcaccagcagttcgccaaccaggagagcgttcgcgtcctggattaccaacagtgtattcaggccacccgcaccggcaacgatcaggcggtgaaagcgcgctgcgatcagatctggaaggagatccgcagcaataatacgacccattaaatcagacgacagcggcaaacgggcggggcatatctccgcccgtttgtttttttagcgctgactctccgccggctgatagccgcggctcagccgcacgaacagtagcgcggtggcaatgaatccgcacagcgcggcgcacattagccaccagcccggcgcgcttttatcgccgctgagctcgaccagggcgatggaaatagctggcgtcagtcccccgaagatcgcggtggcaaggctgaaggccagcgaaaagcccacggtgcggacgtataccggcataacttcggtaagcgccgcgaccatcgcgccgttatacatgccaaagaagaacgagaaccatagcaggaccagcgtcatacgggtgaaatcgggcgcgacggtgagccagtgcatcaccggccaggtggtgagcagcgccagcacggtaatgcccatcagcaccggacgacgaccgattcggtcagagatcgccccgctggcgaagttccatatcaactctccggacaaagcggggatgaggaaagtcaccccaggggcgtgagcgggaagggtgccagaggcgcccataaaaaagccaaccggcaggttggcttttcagtctcagcgaagcggggaattatttttccaccgcgtcgtgggcgtgttcgtcctcgcggcaatccccttccgcacagtgaccgtacagatacagactgtggttggtcaggcggatgccgtggcgggaggcaatttcacgctggcgtaattcgatcgagtcgtcgctgaattcgatcacttttccgcagtcgaggcagatcaggtgatcgtggtgatgctgctgggtcagttcgaaaacggattttccgccttcgaaattatgacgagtcacgatgccggcgtcatcaaactggttgaggacgcggtaaacggtcgccagaccgatctcttcgcccatgtcgatcaggcgtttatataagtcttccgcactgacatgatggttatccggttcctgcagcacttcaaggatttttagtcgaggaagtgtgactttcaggccagccttctttaatgcggtattgttgtcagtcatgcggaatctgtcctgttgctaaacgatctacttccttcaacggaagtcatacagaaattaacccgacgtaatgcgtctcattatagaactgccactggtaaatgaaaactgcaagcatcaggcctggtttgctgtcaaaaacgaggcaccagctacaaactgcgtcacgtgcctcgtagaatcagaggacattgtacagatatgtgattaaaagttaaaaacttgtagctattagtttgattgcttttgtctattaatgcgacgcaactcaatgattgcgccgcttaatcatcaggcgtttttgatttcttcgaggtgcagctcttcggcaacctgcttcacccatttctcaacgcgctcgttggtcagctccggctggcggtcttcatcaatggcgaggccgacgaagtggtcgtcatccgccaggcctttggaagcctcaaaatgataccccgccgttggccagtgaccgacgatggtcgcgccgcgcggctcaatgatgtcgcggatggtgcccagcgcgtcgcagaagtattctgcgtaatcttcctggtcgccgcagccgaacagcgccaccagtttgccattgaagtcgatctcttccagcgtcgggaagaagtcatcccagtcacactgcgcttcaccgtagtaccaggtcgggataccgagcagcaggatgtcgtgggcttccaggtcttctttgctgcttttggcaatgtcgtgaacatcagcaacatctttaccaagctgcttttgaatcatttttgcaatattttcggtgttgccggtgtcgctgccaaaaaagatgccgatgattgccatgagtaaaataacctcttgaaacttaaatgatgtggtagggacgcaatgcccatagataacggcaatcatagcagaacaggcaagggcgcggaaacagcaatcacgcccgactgcacactctgctacatgaatgcgggtttttcgcggaaagttagacttttccctggctgcgcagggcggttaactgggtcatcagcatctcttcaatgagatcgctgcggctcatattacgcgcttccgccagctcgttgagcgcatcgaccgcatcggcgttgagttttaactccacgcgcttcagcccgcgaaccttatcgcgtttcagctggttacgtttgttgatgcgcagttgttcatcgcgcgacagcggattggttttcggtcttcccgggcgacgctcgtttgcgaacaaatctaatgtcgtacggtccgtttgttcttttgccatgattctgagtgacttcggggaaacaagctgccgggctctagccggcgcagatagcgcgccatcatacatcaggcgaacggctgcgccaacgaccgcgggcattctgcggcgcggtcgggcatattttagccaatcaggcggcgatgctcgtcagatagcggcggatggcgcgtaacaccgcctcgggtttctcggcatggacccagtgtccggcgccggcgatgacgtgggcccgggcctgcgggaactgggccagcagcgcgtcgcggtaggcgtcggtcacatagggcgagttgccgccgggaataaactgcgtcgggtgcggccaggccgggatggtttcccagccgacgatatgcggatactggtcccacagcaccggcacgttgaagcgccagtcgccgtcgacgaatgatttcagcaggaactgaatcacgccttcttcctgcaggtgctcgcgcatcacctgcgccgcctgctggcgggtgctggcggcggattcgctgacggcgcggatagcggcgaaaatctcatcatggcggcgaacgtgataatccaccggcgcgatatcgatcgccaccagaccgctgatgcgttcaggcgccagggcggtaagcgccattaccgctttcccgcccatcgaatggccgataaaggtggcgcgctcgatctggtgcgcgtcgagcgtatcaagcagatcctgcgccatggcggggtaggtcatctctggcgaccgcggcgacaaaccgtggttgcgcatatcgacctgcacaatatcgtggtcggcgatcaggtcgcgggcgaggatgcccaggttgtccaggctgccaaacagaccgtggaccagcacgatcggggagtggttgtgcggattctgtgcagattgcgctcggctatttaatttcatggcaaagttctttttttcgctccgtcgggttagggtattatgttggacattctgccatccggctgcaagacccagaagttttctgagttttaccgccatcctggtttgacgctatccgcggttgggatttgtacttataatcccaacgatttgtattcagaaaagatatcgcactggattaagatgaaaacaattgaagttgatgatgaactctatcgctatattgccagccacactctgcatatcggcgagagcgcatccgacattttacggcgtatgctaaaattttccgccgtttcccaaccggctacaccggtcagcaaagccgcgccgacgctggcgccagcgcctgtcgctgaggtgaaacccgctaacccggtgaaagataaagtccgcgccatgcgcgagatgctgttatctgatgaatacgccgagcagaagcgcgcggtgaaccgttttatgctggtgttgacgaccctctactccctggacagtaaagcatttgccgaggccaccgagtctctgcacggccgcacgcgcgtttacttcgcggaagatgcgcgtacgctgctgaaaagcggtaatcagaccaaaccgaaacaggttcctggtacaccgtggtgggtgatcaccaataccaataccggccgtaaatgcagcatgattgagcacatcatgcagtcgatgcagttccctgcggagctgattgaaaaggtttgcggcacgatctagctttttaacatttgcaccagaaggatcaggcaatggcaatcgataaacgtgcggggcagcctgcgcaacagagtgatttgattaacgtcgcccaactgactgctcagtactacgtgctgaagcctgaagtcggtaatgcggagcatgcggtaaaattcggcacctctggccatcgcggtagcgcggcgcgccacaacttcaacgaaccgcatatcctggccatcgcccaggccattgcggaagatcgtgcgaaaaacgggatcaccggtccgtgctatgtcggcaaagatacccacgccctctccgagccggcgtttatttcggtgctggaagtgttaaccgccaacggcgtcgacgtgatcgtgcaggaaaacaacggcttcaccccgacgccggcggtctccaacgcgattctggtgcataacaaaaaaggcggtccgctggcggacggcattgtgatcaccccgtcacacaacccgccggaagatggtggtatcaagtacaatccgccaaacggcggcccggctgataccaacgccaccaaagtggtggaaaaccgcgccaacgaactgctggccgcgggcctgcagggcgtgaaacgcatttctctggacgcggcgctggcttctggccacgttaaagaacaggatctggtgcagccgttcatcgaagggctggcggatatcgtcgatatggccgcaatccagaaagccggcctgacgctgggcgtcgatccgctgggcgggtccggtatcgaatactggaaacgcattggcgagcactacaagctcaatctgaccattgttaacgatcaggtggatcagaccttccgctttatgcacctcgataaagacggcgccatccgcatggattgctcctcagagtgtgcgatggccggcctgctggcgctgcgcgataagttcgatctggcgtttgctaacgacccggattacgaccgccacgggattgtgaccccggcggggttgatgaacccgaaccactacctggcggtagcgatcaactacctgttccagcatcgtccgcagtggggcaaagaggtggcggtgggtaaaacgctggtctcctccgcgatgattgaccgcgtggtgaacgatctgggccgcaagctggtggaagtgccggtgggctttaagtggtttgtcgacggcctgttcgacggcagcttcggcttcggcggcgaagagagcgccggggcctccttcctgcgcttcgacggcacgccgtggtccaccgataaagacggcatcatcatgtgcctgctggcggcggaaatcaccgcggtgaccgggaaaaacccgcaggagcattacaacgaactggcggaacgcttcggcgcgccgagctacaaccgtctgcaggcttccgcgacctccgcgcagaaagcggcgctgtccaagctctctccggaaatggtcagcgctgacaccctggcgggggatccgatcactgcccgtctgaccgcggcgccgggcaacggggcggcgattggcggcctcaaggtgatgaccgacaacggctggttcgcggcgcgtccgtcaggcaccgaagacgcctacaagatctactgcgaaagtttcctcggcgaagagcatcgcaagctgattgaaaaagaagcggtagagattgtcagcgaagtgctgaagaacgcttaacgacgcactaccatcaggccccttgcgggcctgattttttttgcaaggatagcgatgaaaatacaacggaagtccctgtttttgttctgggcgtggatggatctctttttcgtcctgcaattcttatggtggaatattgcccaccgccgcctccctttttacgacgatctactcgcttatctccagctattgcacacctggggctccgcggcgatctggctgtacccgctgaatgttctgctgattatcagcatcccgctatcgatgatcttttttttccgccagagccgctatgcgctgtggctggcctgggggcaggcgccgctcaggctgctgtttatgcagccttcgctatcgctgggcctgtggctgattcaggctgccggggtccggcatgtagcgatcctggcaggctttctgctgctctctgaagggctgaaaatcgccagcctctggtactgcagaggcgggattcagggcataaagcgatagccaatcccggtttcggtcagcaaatgctgcggccgtgccggatcggcctccagcttttgtcgcagatgacccatatagatccgcagatagtggctgtgctccacggcgttaggcccccacacctgattcagcagctgacgctgggtaagcactttgccgggattattcaacagcgccgccagcaggcgaaactcgataggcgtcaggtggatctcttcgctgccgcgcaggatgcggcgggcggggatattgacctccaggtcagcgaagcgcaccaccggctcatcggcctgcgccgcgccgtggcgacgcagcgcgacgcgcaggcgggcctgcagctcgccgatgccaaagggtttacttaagtagtcatcggcgccggcatccagggcggcaattttgtcatgctcttcgctacgcgctgacaggacgataatcggcatctggctccactgacgcaggtcgcgaataaaatcaatgccgtcaccatccggcaggccgagatcgaggatcgcgaggtcgggcttacgggtggcggcttcaatcagcccacgctgcagggtttccgcttcaaatacgcgcatgccgtcggcttccagcgcggtgcgcagaaagcgtcggatagcgtgttcgtcttcgataatcagaacgttaatcacaattcctcaggtagctcttccagttcagggggcgtttctccaggcagtgtaacacggaatgaggcgccgccctcgggccggttgctggcggagatggtcccgccgtggacgtcgacgatggcctgacagatggcaaggcccagcccgacgccagggatcgccgactctttgttgccgcgggcgaatttatcaaagatagtctgttcctggcctgccgggatccctggaccgttatcccatacctccagcgacagctgccgggcgtccgcctcggcgcggatgccgatgctcgcccgggcgccggcatacttatgggcattttccagcaggttgatcagcacccgctcgaacagcggcccgtcgacatgcaccagctggaggggatcgggtaaatccagctgaatatgctggccgccgaggcttggctcgagcatgcgcagcgcgctgccgaccacttcctccagcgtcagccactccttatgcagattaaagccgccggactggatccgcgccatatccaacagattgttcaccagccgggtggtgttgagcacatgctggcggatttcgttggcctgcggggcatgttttgaaccttcgctggccagatcgagggtcagaatttccgcctggccaaacagcacggttagcggagtacgcagatcgtgcgacagggcggcgagcagcgagttacgcaggctttcccgctcgctggtcagccgggcctgctcttcgctggcggtcagggtgaggcgctccagggcgctggccaccagcagggtaaaggtctccagcagccgctgctgctccgggatcatcaattggcgcagattctccggttccaccaccagtagtccccaggtgcgggcggcgctcttcaggggcaagatctgatacggcacgccgggcagggtatcggtgccggcgccggcaggctgccccttatcaaagctccagcgggcgatggcatcatcccacggggtcagccctggctggtgggttaagggcagcagttttccctgggcgtccgggagcagcagctggctgcgggcctgaaaggtggaggcgataaaccgctcgctggtggtggcgatatcctgctggctgcgacccaccgccagcgctttagacatctcatacagatggcgggtacggcgttcacggtagcgcgccacccgcgcctggtagcgcacgccggcggtgaggttgccgataagcaggcccacggtgagcatcacgccgaaggtgagcagatactggacatccgacaccgccagcgttccgcgcggggcgacaaaaaagagatcgaagctgatgacgttgatcaccgtcgccagcaccgatggccagcggccatagaccagggcgatgagcaccacccccagcagatagagcatcaccagattggcggcttcgaaggccatcaaccactgcatggccaccagggtaatgatggcgcatagcgccaccgccaccgcgcagccctgcagctgcaggcgccatttctccagcgccggacggctgtcgctggcgcgtgcggcaagggggaagggtttctcatcgagggcgatcaccaccagatcgaggtccggcgcatggcgagccagacgatcggcgaagccgctgcgatcccaccagcggcgcttgctttggcggccaatgacgattttgccgaggttatgttcgcgggcgtaatggaggaccgctttctcttccgacgggtcggagagggtagcggtttcggcccccagctcctgggccagacgcagcgcggcgagaatagcccgccgccggccttccggcagccggtgcagggaaggggtctcgacatacaccgcatgccagacgctgcccaggcgggcggcgagccgggcggcggcgcgcaccagcttttcgctgccggtgttgtgcccgatacagagcaggatcgcatcgcgggtgtgccagactttctcctggccctggcggtcgcgccaggcgcgcatctgctcatcgacgcggtcggcggtgcggcgcagggccagctcgcgcagcgcaatcagattgcccttgcggaaaaagttttcgatagcgcgctcggcctggccgccgatgtagactttgccctcattgagccgctggcgcagatcgtcaggggggaggtccaccagcaccacgtcgtccgcggcgtcaaagaagggatcgggaaccgtctcccgcacctgcacgccggtgatcccgctgacgacgtcattcaggctttccagatgctggacgttaacggtagtgaaaacatctatcccggcctccagcagttcatccacatcctgccagcgctttggatggcgggagcctggcgcattgctgtgcgccagctcatccaccagaatcagcgccggacggcgggcgagggcggcgtcgagatcgaactcatagacgtaccgcccgcgatgggcaagccgccgcggcggcagagtgctcaggccctgcagcatcgcggcggtctctttacggccgtgggtctccgccacgccaatcagaatatccagcccctgggcgcgcagccgctgcgcttccgccagcatcgcccaggttttccccaccccggcgcaggcgccaaagaacactttaagtttgccgcgatgcggggcggcggtgtgctgcagcaggcggtcagggtccgggcgcagcggctcgtcactcatttacttatccttcagggcatccagcgccatattgagttgcagtatattgaccaccggctggccaaggaagctcagcagcggggtttgtgtggcctgattcaccaactgggttacctgctcaacgctcagctggcgcgcttgagccacccggggcacctgccacagcgcggcggccggagtcaggttgttatcgagaccgctcgccgaggtggtgaccagttcgaccggcacccgcgggtcggcgtccgggttggcggcgcgcagagcctgcacgcgctcgctcaccgctttatccagcgccgggttgctggcggcgaggttgctgccgccagaggccatgggattatccgccgtctccgcggtggccgacgggcggccctggaaatagcctgcggcggtgaagttctggccaatcagcgccgagccgcgcacttcaccgttcaggcggatcagcgagccgttggcctgtgagttaaaccaccattgtcccaggctggtggttagcagaggatagacgccgccggtgagcagcgttaacagaataaatagcacaagtgccggacgaatcaatgacatagtttgttcctcacaccagaccgctcagggtcagcagcaggtcgatggctttaataccgataaagggcaccagcagaccgccgaggccgtagatccacaggttgcggcgcagcatcgccgaggcggagagcgggcgatagctgacgcctttcagggccagcgggatcaggaagacgatgatcagcgcgttgaagataacggcgctgaggatcgccgatgagggcgaatgcaggcccatcacgttcagcatggccagctgaggatagaccgcggcaaacgccgccggaataatggcgaaatatttcgccacgtcgttggcaatactgaaggtggtcagcgagccgcgcgtcattaacatctgtttgccgatatggaccacctcaatcagcttggtggggttggaatccaggtcgaccatgttgcccgcttccttcgccgcctgggtgccggagttcatagctaccgccacgtcggcctgagccagcgcgggcgcatcgttggtgccgtcgccggtcatcgccaccagccgaccttccgactggtactgacggatcagcgccagcttggcttccggcgtcgcttcggcgaggaaatcatcgacgccggcctcggcggcgatcgccgcggcggtcaggcggttatcgccggtgatcatcaccgttttaatgcccattttgcgcagctgggcgaaacgttctttgatgccgcctttgacgatatctttgagcgcaataatccccagcaccttttccccttcggcgaccaccagcggcgtggccccctggcgggcgacctcttccacctgcttatcgacatcggcagggaagtggccgccgttggcctccacgtggcggcgaatggcgtccaccgaccctttgcggatcatgcgctgatcgatattgatgccgctcatccgcgtttgcgcggtaaaggggacaaaggtggcgtgcagcgactgcagatcgcgttcgcgcagattaaagcgctgtttcgccagcaccacgatgctgcgcccctcaggggtttcatccgccagcgaggagagctgggcggcgtcggcgagggttcgctcttccacgccgcgagccggcaggaaggcggaagcctggcggttgccgagggtaatggtcccggttttatccagcagcaggacatcgacgtcgccagcggcttccaccgcgcggccgctggtggcgatcacgttggcgccgagcatacggctcatcccggcgacgccgatggccgacagcagcccgccgatggtggtcgggatcaggcacaccagcagggcgaccagtacggtaacgctgaccgcattgccgctccacgccgagaagggccagatggtggcggtggccagcaggaacaccagcgtcagggcgatcagcaggatcgtcagggcgatctcgttcggcgttttacggcgctgggcgccttccaccatggcgatcatccggtcgaggaaggtttctcccgggttcacgctgcagcggatcaccagccagtcggagagaatgcgtgtcccgccggtcaccgaggcaaaatcgccaccggattcacggatcaccggggcagactcgccggtaatggcgctttcgtccaccgaggcgccgccttcgatgacttcgccatcgcaggggataatatccccggcttccaccagcaccacgtcgcctttgcgcaggtcttccgccggcacgtggtcgaccggcgcgttatgctgcggggcgcgcagtttgcgggcgaaggccgtttttttcacccctttcaggctgttggcctgggctttgctgcggccttccgccatcgcttcggcaaagttggcgaacagcacggtaaaccacagccagatactgacggcggcggtaaaggtggcgctaccggtcagggcgccgccagccatggcgatcgccagcagggtggttaacagactgcccacccagacgataaacatcaccggattgcgccattgcaccatcgggctgagttttttcacggcatccagcagcgcctggcgcaccagcgtcggctccagcagggctaattgtttgcgactcataacagggtgctccgcatcgctcaaagtaaggaaaagtgttcagccagcgggccaagcgccagcgcaggaataaaggtcagggcgcccaccagcagcacggtgccgatcagtaaaccgataaacagggcgtcgtgggtggccagggtgccggggctggccggttgaattttcttcgccaccagcgagccggcgatggccatcaccggaacgatgacggcgaagcggccgaccagcatgcagaacgccagcagcaggttccagaacggcgtcgccgcgcccaggccagcgaaggcgcttccgttgttattggccgccgaggtgacggcatacagcacttcgctaaagccgtgcggtccagggttgaacatcccggcgcggccggcgtcggtcatcatcgccagcgccgtgccaagcagcaccagcgtcggggtgaccagaatggcgagggcgatcattttcatttcccggacatcgattttcttcccgaggtactccggggtgcggccgaccatcagcccggcgataaataccgccagcataacgaacagcagcatgccgtacaggcccgagccgacgccgccgaataccacttcgccaatctgcatcagccacatcggcaccatgccgcccagcgcggtgaaggagtcatgcatggcattgaccgcaccgcaggaggcggcggtggtgatcaccgcgaacagactgctggcgagaataccgaagcgactctctttaccttccatattcaggctactgtcggcgcccagcgtcagcaggtgggggttgccgcgagtttccgcccacatcaccacggcgacgcagaggataaagatcagcgtcattgcccacaggatggcgcgtccctgacgccgatcgcttaccacctcgccgaaggcgaagcacagcgccgccgggatcaggaagatcgccaacatctgcacgagattggtcagcgcggtcgggttttcaaacggatgggcggagttggcattgaagaaaccgccgccgttagtgcccagcagcttaatcgcttcctgtgaggcgacaggccccatcggcagcagctggtgcaccccttcgagggtggtaaagggctggtaggcctgcagattctgcggcacgccctgctgaataaagagcagggccaccagcagagagagcggcagcagcagccacagggtaatgcgcgtcaggtcgacccaggcattgccgagggtcgacattttctgccgggcgaaggcgcgggtcaggacgaagaccacggcgatgccggtggcggcggagaggaaattctgcaccgtcagaccgaccatctggctgagataactcatggtgctttcgccggcgtaagcctgccagttggtattgctgacaaagctgatcgcggtattgagcgccagatcccatgacagccccggcaggtgctgcgggttaaacggcagcacgccctggagcatcagcagggcaaacagcgccaggccgccgagggcgttaaacagcaggagcgccagcaaatactgcagccagcccatctcttcggcgcggatcccggccacgcgccacaggacgcgctcgacgccggccaggccgggaagcgggatatcgttcaccattcttgccagacacatccccagcgggcgcgccagcaccagcaataccagcagatagctggctaataataaaaatccctgggcagccatcagaatgcctccgcatgtatcaaggcataaaccagataagccagtaacaggaacaccagcccaacgccagtgagtacgcctgcagtcacaatccacctccgggtgtgttttcgatttacctggaggatagaaattacggcgcaaagatttcgcaaaaatccgcgggtgcggtgtaaaaaaagtataaaaatgacaaaggcacaaattaactgatggttagtattaatttaactttttcgtaactaatttacgtggcgaatgtaaattaagtataaatacgtgctttttagtggtcggatgagtagtaaaattacaagcagagcggtattattttgctcacacaaacatgattaattttaccggcgctgcttgccggcctgacaaaggggagagaaatgatggcgttgtacaaagcttatcctgctcatattattttgctgcgtcgtgctttcgccgtcgtggctggcgtcgcagcgctgccggtgatgctgttctggaaagatcgcgcccgctactacagctggctgcaccgggtgtggtcgaaaaccagcgagcagccggtgtggatggcgcaggcggagaaagccgctcacgatttctattaatcctcctgctgcgaagaaaataacaagaccgccgggttgccccggcggttttttttcgccgcttgtctacactcgtttttatgcgccgccttggaattggcaggtgcgtattttgccggagcgcgctatttttgccggcttagatcataagatgagtattgctgacggataataaggagtgatatggccacccatctggtctggttacgcacggatttacgcattcacgataacctggcgctggctgccgcctgccgcgatccgcaggcgcaggtgctggcgctgtatatcgccaccccggggcagtggcgtgaacatcacctggcgccacggcaggccgcttttatcgccagccatttacagagtctgcatgccgcgctggcggaacggggcataccgctgtgggtagaagaggcggacgattttaccgccagcgtcgaacggctggccgatttttgccagcagcatcaggtcagtcacctgttctacaactatcagtacgaattcaatgaacgccagcgcgatgccgccgttgagaacaccttgcgcgacgtgatttgccagggctttgacgacagcgtcctgttgccgcccggcagcgtactgaccggtggcggcgaaatgtataaagtcttcaccccgtttaaaaatgcgtttattcgccgtctgcgggacgggctgccggcgtgcgtggcggccccgaagccgcgccaggcgcctgcccgccaggcgccgccgctgcctgagcttaactacccgcaaacgccgtttgacgggctgctgtttgccgcggatgaaaaaacggcgctggcgcgtctgcgcgcgttttgtcagcaagcggcggcggattacgaggggcagcgcgacttcccggccgtggaagggaccagtcgcctgtcgccctgcctggccatcggcgtgctgtccccccgccagtgcctgcatcgtctgctgacggaacatcccgccgcgctggacggcggagccggcgccacctggcttaacgagctgatctggcgcgagttttaccgccatctgatggtctactatccgaagctctgtaaagggcggccatttactgcctggacagataaggtcgcctggcgcgcagaggaggcctccctacaggcctggcagcgcggggagaccggttttccaattgttgatgccgccatgcgccagcttaacgccaccggctggatgcataaccggttgcgcatgattgtcgccagcttcctgaccaaagatttgcgcctcgactggcgggcgggcgagcgctatttcatgagccagctgattgatggcgacctggcggcgaataacggcggctggcagtgggcggcttcaacgggcaccgacgccgcgccctatttccgcatatttaatcccaccacccagggcgaaaagtttgataaacagggggtgtttatacgtcgctggctgccggagctggcaaaggtgccggagaaggccctgcatcagccgtgggcgtgggcggataaacaagggatcacgctggattattcgcgcccgatagttgatcacaagcaggcgcggcaggagacgctggcggcctgggaggccgccagaaaaggaattactccaccgccagacggcgggtcctgactttcagcgaatgatacagccagatgaccagcaccacgccgacgcaggccagcgcgccccaggtgatctggctgaagacggtaatgtaggcgtcaatggagtagttcaccgctccggcggcgtcgaatgacgcctgcgaggtctggtcggcgataacgccggccagatagttggcgatggcccctgagagcagcatataaataccggtcagcaccccagtgacacccgggatctcaatgcgggtgatctgcgacatcgcgaccgggtcgataaacagttcggcaaagcccatcaccgccagacccagcaccatcagcggcatggacgactgaccataggccgccgaccagcgggcgctgagggtcaaaatgcagaacccggcgctcatcaggcccagaccgagggcaaatttcccccagatgcgcacggtgcgattgccgttcacgctctctttcaccagccacgccagcaccatcccgcagagcatcaccgcgaaggcgttgattgactggaacatagcggtagggacttcgtagctcatgatatggcggttaacgaagcggtcaatatacaggctgatggagctcccgccctgctgggcgaaggcccagaacagcaggctgaaggcggtcaggacgacgattaggcgcagatccttgcgctgtttatcggtttcggcgcgcaggtagatccgcgccagtaccgcgaggccaatggccgtggccaccatcagggcatacaccgaccactcctgccagaacagtaccgcaatcagcagcggggcggtaaccagcaataccagcagccagccccagttcggcaacaggaagcggcgcgcgcacagcgcctggcggttgacgccggcggtatgctggaaatgacggttgccgcagaggaaaatcaccagccccgcgaccatgccgatggccgccagggcaaagcccatcgcccagctatactcctcctgtacgtagccgcaggcgatcggcgcgataatcgagccgatattgccggcggcatacatcagcgaaaagccgccatcgcgacgcggatcggcgggttcgtacagctcgcccagcagacagctgacgttggatttaaacaacccgtagccgcagacgatgatcgccagcgacaggtacaggaaaagcggagcggtttcgctggccccgagcaccagatggccaatggccatcagcagcgcgccgagcatgaccgccatccggttgcctaacagcttatcggccagatagccgccgaggatcggcgtcacatagaccagcgaacagtaggcgctgaacagggcgtaggcatggttatcgtcatatttgagctgattggtgagatagaggatcagcagggcgcgcatgccgtaaaagctaaaatactcccagatttgcagcgccacgacgtagtagatcgcccgcggttgcgatgatgttgtctgcatatgaagtgtgtttcctggcgtaaagcgaaagtcgatcgttctgcatgaatagcgatttatcagtcatattcatggcttgaggggctttctgattatttaatatgctttattagtgcataaatatacactaatgcgcggcgggatgaatagacaaattgcgggattcgttaaaaagtcatggtcagtgacggtagcggactatcgacgacccgaatggatatggttatgttatgcctttgtataacctgattatctgctggagtggcgatgaaaaatagcgaactggaacaactgattaacgacaagctcaatagtgcggccatcagtgacttcgcccctaacggtctgcaggtggaaggacgcgaaacggtgcacaagatcgtcaccggagtgacggcctgccaggcgctgctggatgaggccgtccgtctgcaggcagatgcggtgattgttcatcacggctatttctggaaaaacgaatcgccagtgatccgcggcatgaagcgccgtcgcctgaaaaccctgctggccaacgatatcaatctctacggttggcacctgccgctggatgcccatccggagctgggcaataacgcgcagctggcgcatctgctggggattaacgtgctcggcgaaatcgaaccgctggtgccttggggcgagctgtcgatgccggtgtccggcctcgaactggcctcgtggatcgaagcgcggctggggcgcaagccgctgtggtgcggcgataccgggccggacaccgtcagccgcgtcgcctggtgtaccggcggcggccagagctttatcgacgccgcggcgcgctttggcgtggacgcctttatcaccggcgaggtgtcggaacaaactattcactctgcccgcgagcagggcctgcatttttatgccgccggccaccacgccaccgagcggggcggcattcgcgccctcagcgaatggctgacggaaacgaccgatctggacgttacctttattgatattcctaaccctgcctgacgggagagaagaaagtgcagcgagcgcgttgttatctgttaggtgaaacggcggtggtcctggagcttgagcctccggtgaccctggagagccaaaaacgtatctggggcctgacgcagcggttgaccgatcgcgaagaggtggttgaagtgatcccggggatgaacaacatcaccgttgtgctgcgtcgtccgcaggagatggcgtgggaggcgattgacaagctgcagcgctggtgggaagagagcgatgcgctggagccggaatcccgtgagataagtatcccggttatctacggcggcgaggcgggaccagatcttggcgacgtcgcgcgccatagcgggttgagcgaaaagcaggtggtcgaactgcactcttcggtggagtatatggtgtggtttctgggtttccagccggggtttccgtattttggcggcctgccggagcagctggcgatgccgcgtcgcgccgagccgcgcgtactggtaccggcgggatccgtcggtatcggcggatcgcaaaccggtatttatccgctggcgacgccgggcggctggcagctgctggggcgcacgccgctggcattattcgatccaaaacgtgaagagccggtgctgctgcgttccggcgatcgcgtgcgctttgtgccgcagaaggagggggtatgttgaaatttatccgcgccggcatgtatacctcggtacaggatggcggccgggaaggccagcgccagtgggggattagccgctgcggcgcgctggataaaccggcgatgaccattgccaatctgctggtgggcaatgcgccggaggcggcggcgctggaaattacgctgggtcaggtcgatgtgcagtttacccgccactgctggttcgcgttgaccggcgccgcctgtgaagcgacgctcgacggcgcgccggtctggttgggctggcgaatggaggcgaaggccgggcagcggctggtgctgaaaaatcctcagcatgggatccgcagctatctggcggtcgcgggcggtattgatgtccctgaagttttaggttcccgctctaccgatctgaaagtcggtatcggcggaatcgaagggcgccggttgcaggatggcgatcaagtgaagattgggaaatcgtcccgccgctttagcgcctcgcgcggcgttaaacagctgccgataggcaatattattcgcgcgctgccggggccggagtatcacgaattcgacagcgtgtcgcaggagtctttctggcgctcgccgtggaagctgagtccgcaaagcaaccgtatgggctaccgcctgcaggggcagccgctcaggcgcacaaccgaccgggaaatgctctctcatggcctgctgcccggcgtggtacaggtaccgcataacggccagccgattgtgttgatgaacgatgcgcaaaccaccggcggctatccgcgtatagcctgcattattgaagccgatatgtaccaactggcgcaaattccgctaggtcagccgatccatttcgtcccctgttcgctggaggaagcgctaaaagcgcgcgccgaccagcagcgctaccttgaacaactggcctggagattaagcgatgaaaattgatttaaatgccgacctcggcgaaggctgcgccagcgatagcgcgctgctgcagctggtctcttccgccaatatcgcctgcggctttcacgccggcgatgcggttctcatgcagcaatgcgtgcgcgaggcgctgaaaaacggcgtcgctattggcgcacacccgagcttcccggaccgggaaaattttggtcgaaccgcgatgcagttaccgccagagacggtctacgcccaggtgctgtaccaaattggcgcgctggcggcaatcgtacacgcccaggggggcgagctgcggcacgtcaaaccgcatggcatgttgtacaaccaggcggcgaaagagccgcctttggccgacgctatcgctcgtgcggtgcgcgatgccgacgccgacctggtgctggttgggctggcgggcagcgagcttatccgcgccggacagcattatcagttgacgacgcgccaggaagtcttcgccgatcgcggctatctggccgacggcagcctggtgccgcgcagccaaccgggcgcgctgattgagagcgaagagcaggcgctggcgcaaacgctggaaatggtgcagcacaatcgggtgcgcagcctgagcggcgaatgggcgcatgttaaggcggaaacggtctgcctgcatggcgatggcgctcacgcgctcgatttcgcccgacgcttgcgcgccgcgtttgccgggcggaatatcgacgtcagcgcggacctcgagtaatagtccgcctaagttattaataataattaaatcaaataattaacaacactcacaatactcacaactgaacaggacgttattatgcaagaggcgatatccctctggccgctaatcggcattgccgtgattgtggtcggttttgtattacgctttaacccggtgctggtggtgattatctccgggatcgtcaccggcgtggcggcgcatatgccaatagccactattctggagaaactgggcgagggcttcctgaatacccgtaatctgccgtttattctgctgctgccgctggcggtgatcgggctgctggagcgccatggtctgaaagagcgggcgcaggcgtggatcgcgaagatccatagcgcgaccgccggacgtctgctgatcgtctatctgtttgtgcgcgaagccaccgccgctctggggttgaccagcctcggcggacatccgcaaatggtgcgcccgctgctggcgccgatggcggagggggcggcggaaaagcgctttggcccgctgccgggcaatgtacgctaccgcctgcgcgcgatgtcggcggcgaccgataacgtcgggctgttcttcggcgaagatatttttgtcgccttcggcgcgatcatcttcatgcacaactttatgctggagtcgggtgggatccagacagaaccgttgcatattgccctgtgggggatcccgacggcgatctgcgcctttctgatccacgccgcgcgcctgtggcgactcgatcgccatctccagcgcgagctggaccggataaacgccggacaggcgaaaggcggtgcggcatgaatttccagcaaacctatttatactggctggccggcgcggtactgctggtcgtggctatcatgtcctggcgcgacaaaagcaatccgcgacgtctgacaaccggtctgttctggggcctgtacgggctggtgttcttgctcggcgactggacatatcaactggtgggcgataagcgtacggtgaatatcgctgtcggcggggtggtggtcgtcctggcgctgatcgccggttttggcggcgtgcgcctcggcagctaccatcagcgtacccaggaagagaaaaccgccagcgcgaaacgcctcggcaacaaacttttctttccggcgctggcgattccggtcgtcaccgtcattggcgtactgctgtttaacaatctgccctcatggcaggtggcgctcttcgggccgggcaaccacgcgacgctgattactctgttctcgatgactgtcggtacgctgattggcctggcgatggcgattcgtatgacgcatgaaacggtggcgcagccaatgcaggaagcgcgccgtttgcttgattccgtcggctgggcctttatcctgccgcaaatcctcgcggtgctggggctgctgtttaccgcagcgggcgtcggaaccagcatttcatggctgaccgagcactatctggcggtcgataaccgctttatcgccgtggctgtgtatgccatcggcatggcggtgctgacaatggtgatgggcaacgcctttgccgctttcccgattgtgaccgccggagttggcattccgattttagtcctgcagcacggcggcaatccggcggtaatggcggcgattggtatgttttccggctactgcggcacgctgatgacgccgatggcggcgaacttcaatattgtcccggcggcgctgctggaactgccggataaaaatgcggtgattaaagcccagataccgaccggtatcctgctgcttatcgtcaatgtattcttactctatttcctgatgttcctgtaaggagggatgatggctggcgtattgattaccggttttgagccgttcggcggcgaaacggttaacccttcatggggagtggttaagcagctggatggcatgattattcgcggacagcaggtggtggctaaacagttaccctgcgtattcggcgaagcgctgacggtgctgaaggcggcgctggaaacctatcaaccgcggctgacgattgccgtcggacaggccggcggccgtgtcgatattaccgtcgaacgtgtagcgatcaatgtcgatgatgcgcggatccccgacaataaaggccagcaaccgatcgatgaaccgatcgttgctaatggccctgcggcctgcttcagtacgctaccgatcaaagcgatcgtcagcgcgctgcgccagcaggggatcccggcctcggtgtcgcaaaccgcgggcaccttcgtctgcaatcacgtgatgtatggtttgctgcatcagctgcagggaaaaagcgggcagaagggcggttttatccatattccttatctgcctgaacaggcggcggcccacccggggcaggcgagtatgtcggtcgcgacggtacgcgcggcgctggaaacggcgattgccgtcgcccttgaacaggatgacgatgtcaaaattggcggcggcgccacccattaacagaaggatgacagtatgccggaaggtccggagatccgccgtgcggcggataaactggaggcggcaatcaaaggcgaacccttaaccaacgtctggttcgcctttcctcagttgcaaccctatcaaactcagctaattggtcagcgggtgacccatatcgccacccgcggcaaggccctgttaacccacttctccggcggattgaccctgtatagccataaccagctgtacggcgtctggcgtgtggtggatgccggcgttgagccgcaatcgaaccgcgtactgcgcgtcaggctgcagaccgccagcaaggcgattttgctctacagcgcgtcggacattgatatcctcacggcggagcaggttgccaaccatccgttcttgctgcgcgtcggaccggacgtgctggacatgacgttaaccgcggagcaggtgaaagcgcggctgctgtcggccaaattccgcaatcgtcagttttccggcctgctgctggatcaggcttttcttgccgggctcggaaactatctgcgggtggaaattctctggcaggtgggattaagcggtaagcgtaaagccgctgaactgagcgacagtcagctggatgcactggcgcacgcgctgctcgatatcccgcggctgtcctatcgtactcgcggtctggtggatgacaacaagcatcatggcgcgctgtttcgctttaaggtcttccatcgcgatggggaaaggtgcgaacgctgtgggggaatcattgagaagacgacgctctcctcgcggccattttactggtgtccaggatgccagcattaagccggctggcgggcgatttcagcatgaagcgcgttatcaggcataaaaaaacgcgccagcaggcgcgtttttatgatccggacagtgagattaacgcttaatgtcggactggaaatcgcgtttggcgtagccggtatacagctgacgcggacgggcgatcttcatgccatcgctgtgcatttcgttccagtgcgcaatccagcccacggtacgcgccatggcgaagataacggtaaacatggaggacggaatacccatcgctttcaggatgataccggagtagaagtcgacgttcggatacagtttcttctcgatgaagtacgggtcgttcagcgcgatatgctccagctccatggccacctgcagcaggtcgtctttggtgcccagctctttcagcacttcatggcaggtttcacgcattacggtggcgcgcggatcgtagtttttgtaaacacgatggccgaagcccatcaggcggaaagagtcattcttgtctttcgcacgacgaacaaattccggaatgtgctcaacggagctgatctcttccagcattttcagcgccgcttcgttggcgccaccgtgtgccggtccccacagggaggcgatgcccgcagcgatacaggcgaacgggttagcgccggaggagcccgcggtacgtaccgtggaggtcgacgcgttctgctcgtgatcggcgtgcaggatcagaatacgatccatcgcgcgctccagcaccggattgacttcatactcttcgcacggtgtcgcaaacatcatgcgcaggaagttgccggcataggagaggtcgttgcgcggataaacaaacggctggccgatagaatatttgtaacacatggctgccatggttggcattttggacagcagacggtaggcggcaatctcgcggtgacgcgggttattcacgtcgagggaatcatgatagaacgccgccagcgcgccggtgatcccgcacatcaccgccatcgggtgggaatcgcgacggaacgcgtggaacagacgggtgatctgctcatgaatcatggtgtggcgggtgacggtagttttgaattcgtcatattcggcctgagtcggcttttcgccgtacagcaggatataacagacttcaagataattagattcggtcgctaactggtcgatcgggaagccgcggtgcagcaggatcccctcgtcaccatcgataaacgtaattttagattcacaagaagccgttgatgtgaaacctgggtcaaaggtaaatacgccttttgaaccaagactacgaatatcaataacatcctgaccgagcgtgccttttagcacatccagttcaatagcagtgtcaccacccagggtgatttttgctttagcatcagacatttatggtctccttagcgcctttattgcttaagactgccgggtggtggatttgctttcggcccgcgcctgcatacgttaccagtttgttatgttgcacacagctctgcgtcagcgaaaagggcagggtacagagcaacggcgcttgatggcacgtccttcagggctgcggtgaaacaacagcaaatcagcgttttagcagtccgaatattaaaacctatataccactaataactgtcctgattacatcggtcaatactgacacactgttacataacttattctcaggtgaaagagtgaccccataacttttgagcattattgcatttaactggtaatggttgtaacaagaatgtttaatatttgtcaaatcaggtgattaaaaattaaaaaaatgttggtatcgtgaccttgatcactgttccggagaaaacccaacaaactatatgtaggttaattgtaatgattttgtgaacggcctatactgcggccaggtctccggaacaccctgcaatcccgagccacccagcgttgtttagtgatgttttaatgcctgaaaagacgttttaacatgacttctggttatagaaaggacgctgtctgacccgcaagcagaccggaggaaggaaacaataagaacagcatgtgggcgttattcatggtaagaaatgtgaaaaaacaaagacctgtcaatctggatctacaaacgatacggttcccaatcacggcgatagcgtccattctccatcgcgtttccggtgtcatcaccttcgtggcggtcggaattctgctttggctgctgggcaccagcctttcctccccagaaggttttctgacggcggcctccatcatggatagcttctttgtgaagttcatcatgtggggcattctcaccgcgctggcctatcacgtcgttgtcggtattcgccatctgatgatggactttggctaccttgacgaaaccctcgaagcagggaaacgttccgccaaaatttcttttgttattactgtcgtgctttcacttctcgcaggagtcctcgtatggtaagcaacgcctcagcactgggacgcaacggcgtacatgactttatcctggtccgtgctaccgccatcgttctgaccctctacatcatctacatggttggcttcttcgccaccaccggtgaaatctcatgggaagtgtggaccgggttctttgcctccggcttcactaaagtcttcactctgctggctctcgtttccattctcatccatgcctggatcgggatgtggcaggtgttaacagactacgttaaaccactggctctgcgcctggttctgcaactggctatcgttgtggcgctggtggcttacgttctttatggatttgttgtggtgtggggtgtgtaatgaaattgccagtcagagagtttgatgctgttgtcatcggtgccggcggcgcaggtatgcgcgcggcgctgcaaatttcccagagcggacagacctgtgcactgctctccaaagtgttccctacccgttcccataccgtatccgcgcagggtggcatcaccgtcgcgctcggtaactcccatgaagataactgggaatggcatatgtacgacactgtaaaagggtcggactatatcggcgaccaggacgccatcgaatacatgtgtaagaccggcccggaagcgattcttgagctggagcacatgggactgccgttctctcgtcttgacgatggccgtatttatcagcgcccgtttggcggccagtcgaagaacttcggcggcgaacaggcggcgcgtaccgcggcggcggctgaccgtaccggtcacgccctgctgcacactctgtatcagcagaacctgaaaaaccacaccactatcttctccgaatggtacgccctcgatctggtgaaaaaccaggacggcgcggtagtcggttgtaccgccctgtgcatcgagaccggcgaagtggtctactttaaagcccgcgccaccgtgctggcgaccggcggcgcaggccgtatctatcagtccaccaccaacgcccacatcaatacgggtgacggcgtcgggatggccatccgcgccggcgtgccggtgcaggatatggaaatgtggcagttccacccgaccggtatcgccggggctggggttctggttaccgaaggttgccgcggcgaaggcggttacctgctgaacaaacacggcgaacgctttatggagcgttatgccccgaacgctaaagaccttgcgggccgtgacgtggtggcgcgttccatcatgatcgaaatccgcgaaggccgcggctgcgacggtccgtggggcccgcacgcgaaactgaaactggatcacctcggtaaagaggttctggaatctcgtctgccgggtatccttgaactttcccgtacctttgcccacgtcgatccggtgaaagagccgatcccggttatcccaacctgtcactacatgatgggcggtatcccgaccaaagtcaccggccaggcgttgaccgtgaatgagaagggcgaagacgtggtgatcccgggcctgttcgcggtaggcgaaatcgcctgcgtatcggtccacggcgccaaccgtctgggcggcaactcgctgctcgacctggtggtcttcggccgcgcggcgggcctgcatctgcaggaatccattgccgagcagggcacgctgcgcgacgccagcgaatccgatatcgaaggctcgctggatcgcctcaaccgctggaacaacacccgctctggtgaagatccggtggcgattcgtaaagcgctgcaggaatgtatgcagcataacttctcggtgttccgcgaaggcgatgcgatgcacaaaggtctggagcaactgaaagtgatccgcgagcgcctgaaaaacgcccgtctcgacgatacctccagcgagttcaacacccagcgcgttgagtgcctggagctggataacctgatggaaaccgcctacgcgaccgccgtatccgctaacttccgtaccgagagccgtggtgcccacagccgcttcgacttcccggatcgtgatgatgaaaactggctgtgccattccctgtacctgccagagtcggaatccatgacgcgtcgtagcgtcaatatggaaccgaaactgcgtccggcattcccgccgaagattcgtacttactaatgcggagacaggaaaatgaaactcgagttttcaatttatcgctataacccggatgttgacgacgctccgcacatgcaggattacacccttgaagcggaagaaggtcgcgacatgatgctgctggatgcgctgatccagctgaaagaaaaagatccgtcgctgtcgttccgccgctcctgccgtgaaggggtctgcgggtccgatggtctgaacatgaacgggaaaaacggtttggcgtgcatcacgccaatctccgcgctgaatcagccgggcaagaagattgttatccgtccgctgccaggattaccggttatccgtgatttggtggtggacatggggcaattctatgcacaatatgagaagattaagccttacttgttgaataatgggcaaaatcctccggctcgcgagcatctgcagatgcctgagcagcgtgagaaactcgacgggctgtacgagtgtattctgtgcgcctgctgttcgacctcgtgcccgtcgttctggtggaacccggacaagttcatcggcccggctggcctgctggccgcgtatcgcttcctgatcgacagtcgcgataccgaaaccagcgagcgcctggacggcctgagcgatgctttcagcgtattccgctgtcacagcattatgaactgcgtcagtgtgtgtccgaaggggctgaacccgacgcgcgccatcggccatattaagtcgatgctgctgcagcgcagcgcgtaagcaacacggtctgtcccggatggcgctagcgcttatccgggctaccaaagcagtagccccggcaagcgttagcgccgccgggggatatagcaggaaatctttaaaaaccgccacaagatgtaccagtaatcgaggcgttcagtgcgaggtaaggcggcaactgagcgcatccccgggagcatagtgaactatgtgaccggggtaagcgaaggcagccaacgcaaccgcagcctgaacgctgaagattaatggcagtttttaaaggttccttagcggatagaaaccacaactcgtccgcaacaagtgaaccccggcacgtgcactcggtgtgcgtggtagtttctacggcgaaataagcatatgaatgcttaagggatcacgatgcagaacggcgcaatgaaagcctggctggactcttcttacctctctggttcgaaccagagctggatagaacagctctatgaagacttcttaaccgatcctgactctgttgacgccaactggcgttcaatgttccagcagttacctggcaccggagttaaaccggatcaatttcattccaaaacgcgtgattatttccgtcgactggcgaaggatgcctcacgttacacttcttcgatttccgacccagacaccaatgtgaagcaggttaaagtcctgcagctcatcaacgcataccgtttccgtggccaccagcatgcgaatctcgatccgctggggctgtggaagcaagagagagtggcggatctcgatccggcctaccacgatctgaccgaggccgatttccaggaaagctataacgtaggttcatttgccatcggtaaagacacgatgaagctgggcgagctgattgccgccctcaagcaaacctactgcggctccatcggcgcggaatacatgcatatcacctctaccgaagaaaaacgctggatccagcagcgcattgaatcggtagctggcaaagcgagctttaccgcggaagagaaaaaacgcttcctcagcgaactgaccgccgcggaaggtctggagcgctacctcggcgccaaattcccgggggcgaagcgcttctcgctggagggtggcgacgccctgatcccgatgctcaaagagatgatccgccatgcaggcaaaagcggcacccgcgaagtggtgctgggcatggcgcaccgcggccgtctgaacgtgctggtcaacgtgctgggtaaaaaaccgcaggacctgttcgacgagttcgcgggcaaacataaagaacacctcggcaccggcgacgtgaagtaccacatgggcttctcttccgatatggaaaccgaaggcggtctggtgcacctggcgctggcgtttaacccgtcgcacctcgagatcgtcagcccggtggttatcggttccgtacgcgcccgtctggatcgtctggacgagccaagcagcaacaaagttctgcctattaccatccacggcgacgccgccgtcaccggccagggcgtggttcaggaaactctgaacatgtccaaagcccgcggttacgaagtgggcggtaccgtgcgcatcgttatcaacaaccaggtgggcttcacgacctctaacccgctggatgcgcgctcaacgccgtactgcaccgacatcggtaaaatggtgcaggcgccgatcttccacgtgaacgcggacgatccggaagcggtcgccttcgtcacccgtctggcgcttgatttccgcaatacctttaaacgcgatgtcttcattgacctggtgtgctaccgccgtcacggccacaacgaagccgatgagccgagcgcaacccagccgctgatgtatcagaagatcaaaaagcatccgactccgcgcaaaatctatgctgacaagctggagcaggagaaggtggcgactctggaagatgcgaccgagcaggttaacctctaccgcgatgcgctggatgccggcgaatgcgtggtgcaggaatggcgtccgatgaatatgcattcctttacctggtcgccgtacctcaaccacgagtgggacgagagctatccggataaagttgagccgaaacgtctgcaggagttggccaaacgcatcagcacggtaccggaaggtatcgagatgcagtcccgcgtggcgaaaatttatgccgaccgccaggcgatggcggcaggcgagaagctgtttgactggggcggtgccgaaaacctggcctacgccacgctggttgacgaaggtattccggttcgtctgtccggcgaagactccggccgcggcaccttcttccaccgtcatgcggtgatccataaccagaccaatggttcaacctacacgccgctgcagcatgtccataacggccagggccagttccgcgtttgggactcggtgctgtccgaagaagcggtgctggcgttcgaatatggttacgccaccgccgagccgcgcactctgaccatctgggaagcgcagtttggcgacttcgccaacggcgcgcaggtggtgatcgaccagttcatctcctccggtgagcagaagtggggaaggatgtgcggcctggtgatgctcctgccgcacggttacgaaggccagggcccggagcactcctccgcgcgtctggagcgttatctgcagctgtgcgctgaacaaaacatgcaggtctgcgtgccgtccacgccggcacaggtttatcacatgctgcgtcgccaggcgctgcgcggtatgcgtcgtccgctggtggtgatgtcgccgaagtcgctgctgcgtcatccgctggcggtttccagcatggatgagctggcgaacggcactttcctgccggctattggtgaaatcgatcaacttgatccgcaggctgtgaagcgcgttgtgctgtgctctggtaaggtttactacgacctgctggaacagcgccgcaaaaacgagcaaaaagatgtcgctatcgttcgtatcgagcagctctatccgttcccgcatcaggcggtgcaggaagcgctgaaagcgtatgcgcacgtgcatgattttgtctggtgccaggaagagccgctcaaccagggcgcatggtactgcagccagcatcacttccgtgaagtgattccgtttggggcctctctgcgttatgcaggccgcccggcctccgcctctccggcggtagggtatatgtccgttcaccagaaacagcaacaagatctggtcaatgacgcgctgaacgtcgattaattaaaggatacacaatgagtagcgtagatattctggttcccgacctgcctgagtccgtagctgacgcaaccgtcgccacctggcacaaaaaaccgggcgacgcggtcgtccgtgacgaagttctggtcgaaatcgaaactgacaaagtggtactggaagtaccggcatcagcggacggcattctggatgcagtgctggaagacgagggcgccaccgtcctgtctcgccagatccttggccgcctgcgcgaaggcaacagcgcaggtaaagaaagcagcgagaaagccgatgcgaaagcgtccactccggcgcagcgtcagcaggcctctctggaagagcagaacaacgacgcgctgagcccggcgatccgtcgtctgctggctgaacacaaccttgacccagcggccatcaaaggcactggcgtcggcggccgtctgacccgcgaagacgttgagaaacatctggcgaaagccccggcgccggcagaagccaaagcgccagccgccgccccggcagccgcgccggcgccgcagctgggccaccgttcggaaaaacgcgtcccgatgacccgcctgcgtaaacgcgtagccgaacgtctgctggaagcgaaaaactctaccgccatgctgacgacctttaacgaagtcaacatgaagcccatcatggatctgcgtaagcagtacggtgaggcgttcgaaaaacgtcatggcatccgcctgggctttatgtccttctacgtgaaagcggtagtggaagcgctgaaacgctatccggaagtgaacgcttccatcgatggcgacgacgtggtgtaccacaactacttcgacgtcagcatggccgtttccactccgcgcggtctggtcaccccggttctgcgtgacgtcgacctgctgggcatggcggatatcgaaaagaatatcaaagagctggcagtgaaaggccgcgacggcaagctgaccgtagacgacctgaccggcggtaacttcactattaccaacggcggcgtcttcggctccctgatgtccacgccgatcatcaacccaccgcagagcgctattctgggtatgcatgccattaaagaccgtccgatggcggtcaatggcaaggtagagatcctgccgatgatgtacctggcgctctcctatgaccaccgtctgatcgacggacgtgaatcggtaggcttcctggtggcgattaaagagctgctggaagatccgacccgtctgctgctggacgtgtagtcagcaagcgtattacctaccgtaggccggataacacgcgttagcgccgttatcaggcctacaggtttaaagataattacaccctgaaggatggactgaacacatgaacttacatgaatatcaggcaaaacaactttttgcccgctatggcttaccggcgccggtgggttatgcctgtactactccgcgtgaagcagaagaagccgcttcaaaaatcggcgcgggtccgtgggtagtgaaatgtcaggttcacgctggtggccgcggcaaagcgggcggtgtgaaagtagttaagagcaaagaagagatccgcgcatttgccgagcactggctgggcaaacgtctggtgacctatcaaacagatgcgaacggccagccggttaaccagatcctggttgaagcggcgaccgatattgacaaagagctgtacctgggcgcggttgttgaccgcagctcccgtcgcgtggtgttcatggcgtctaccgaaggcggcgtggaaatcgagaaagtggcggaagagaccccgcacctgatccacaagatcgccatcgatccgctggcgggcccgatgccttaccagggtcgtgaactggcgttcaaactgggtctggaaggtaaacaggttcagcagttcaccaagattttcatgggtctggcgaccattttccttgagcgcgacctggcgctgatcgagatcaacccgctggtgatcaccaagcagggcgacctgatctgcctcgacggcaaactgggcgctgacggcaacgcgctgttccgccagccggatctgcgcgaaatgcgcgatcagtctcaggaagacccacgtgaagcgcaggcggcgcagtgggaactgaactacgtcgcgctggacggcaacatcggctgcatggttaacggcgcaggcctggcgatgggtaccatggacatcgttaagctgcacggcggcgaaccggctaacttcctcgacgtaggcggcggcgcgaccaaagagcgcgtgaccgaagcgttcaaaatcatcctctctgacgacaacgttaaagcggtgctggttaacatcttcggcggcatcgtgcgttgcgacctgatcgctgacggcatcatcggcgcggtagcggaagtaggggttaacgttccggttgtggttcgtctggaaggtaacaacgccgaactgggcgcgaaaaaactggctgacagcggcctgaatattattgcagcgaaaagtctgacggacgcagcacagcaggttgttgccgcagtggaggggaaataatgtcagttttaatcaataaagataccaaggttatctgccagggcttcaccggtagccaggggaccttccactctgaacaagcgatcgcttacggtacgcaaatggttggcggcgtgacgccaggcaaaggcggcaccactcacctgggcctgccggtgttcaacaccgtgcgcgaagccgttgaagcgaccggcgcgaccgcgaccgtgatctacgttccggcgccgttctgcaaagattccatcctggaagcgatcgacgcgggcattaagcttatcatcaccatcaccgaaggtatcccaacgctggatatgctgaccgtgaaggtgaagctggacgaagcgggcgtgcgtatgatcggcccgaactgcccgggcgttatcactccgggcgagtgcaaaatcggcatcatgccgggtcacattcacaagccgggtaaagtgggcatcgtttcccgttccggcaccctgacctatgaagcggttaagcagaccaccgactacggcttcggccagtctacctgcgtcggtatcggcggcgacccgatcccgggctccaacttcatcgatatcctgaagatgttcgaggaagatccgcagaccgaagcgatcgtcatgatcggtgagatcggcggcagcgcggaagaagaagcggctgcttatattaaagatcatgtcactaagccggttgtcggctacatcgcgggcgttaccgcgccgaaaggcaagcgtatgggccacgcgggcgctatcatcgccggcggtaaaggtacagcggatgagaaattcgcagcgctggaagcggcgggtgtgaaaactgttcgcagcctggccgacatcggcgaagcgctgaaagctattatcaagtaaaccctctctgcttgtccgcaagcagaaatctgtccgatttcgacatggttggccaccgtcaggtggccttttttgtgaccgttatcccgtctcgtcagaaccgcagcgccaacaacgaattgattttctgcgaaaagccctatctatcatattgatttaatttattatttaataagtattttcgatgcgctgtactggctaaaaaatatatcccggctgtaccgttgggaaacaaaagcggcagcgaaaaagcgtggggcaggggataaggaagaagataaaatactgtgagcggtctaacattattcggatcggttccttttttttgttttttttccacgacgttaaataatattacctatgattctcatatctctctttttagtaactggaaaagccatagtttaaacacttaattaacattaagttcaccaatattctttattgggctacataattaacacatagagtaaaaattgatttatatcaatacttaatccttggaaaaatccctcaaaaaacgttaaattgtctcaagtcaaattggctgaattcagccatcttcactatatattgatcaccgtcgaaaaatgtaaaactggaacaataaaaacatatttattgtaaggttattgcggcgtaatatattggggaatcaattgggtttttcgttaacgtatttgtaaccttaccctggcatggttttaccttcgattgaaacctgctgtggacgggcgacaaataaatttgtattggggcatgcgtatgagccagagcttctcggttcattttcggagtcttcatgcgatgagcaaggagtcatgatgttagatatagtcgaactgtcgcgcttacagtttgccttgaccgcgatgtaccacttcctgtttgtgccgctaacgctcggtatggcgttcctgctggccatcatggaaacggtctacgtcctttccggcaaacagatttataaagatatgaccaaattctggggcaagttgtttggtatcaacttcgcgctgggtgtggcgaccggtctgaccatggagttccagttcgggactaactggtcgtattactcacactacgtgggcgatatctttggtgcgccgctggccattgaaggtctgatggccttcttcctcgaatccacctttgtaggtctgttcttcttcggttgggatcgtctgggcaaagttcagcacatggccgtcacctggctggttgcgctgggttccaacctctccgcgctgtggatccttgtcgccaacggctggatgcagaaccctatcgcatcggacttcaacttcgaaaccatgcgtatggagatggtcagcttctctgaactggtgctcaacccggtcgcccaggtgaaattcgttcacactgtggcgtcgggctatgtcaccggcgcgatgttcatcctggcgattagctcctggtacatgctgaaaggtcgcgacttcgcctttgccaagcgctcctttgccatcgcagccagcttcggtatggcggcgatcctctccgttattgtgctgggtgacgaatccggttacgaaatgggtgacgtgcagaaaaccaaactggcggctatcgaagcagagtgggaaacccagcctgcgccggcggccttcaccctgtttggtattcccgatcagaatgcgcagaccaaccactttgcgatccagatcccctacgcgctgggcatcattgctacccgctcggtggacaagccggttatcggcctcaaggatctgatggttcagcacgaagagcgtatccgtaacggcatgaaagcctacgcgctgctggaacagctgcgcgccggttcaaccgatcaggccgtgcgtgaccagttcaataacgtgaagaaggacctcggttatggcctgctgttgaagcgctataccccgaacgtcgctgacgccacggaagagcagatcgccaaagcgaccaaagactccattccaagcgtcgcaccgctgtacttcgccttccgtatcatggtggcgtgcggcatcctgatgctgctgattataggcgcctccttctggagcgtgatccgtaaccgcatcggcgagaaaaaatggctgctgcgcgccgcattctacggcctgccgctgccgtggattgccgtggagtcgggctggtttgttgccgaatacggccgtcagccgtgggcgattggtgaggtcctgccgacggcggtggctaactcatcattgaccgcgggcgacctgatcttctcaatgttgctgatctgcggtctgtacacgctgttcctggtggctgaactgttcctgatgttcaagtttgcccgcaaaggacctagcagcctgaaaaccggccgctatcactttgaacagtcctctgcggctattcagtcgacacgctaagacaggagtcgtcaaatgatcgattatgaagtattgcgttttatctggtggctgctgattggcattctgctgattggttttgccgtcgccgacgggttcgacatgggggtgggcatgctcacccgcttcctcggccgcaacgacaccgagcgtcggattatgatcaacgccatcgccccgcactgggacggtaaccaggtgtggctgatcaccgccggtggcgcgctgttcgctgcctggccgatggtttacgccgcggcgttctctggcttctatgtggcgatgattctggtgctggcctcgctgttcttccgtccggtcggttttgactaccgttccaagatcgaggacacccgctggcgcaacatgtgggactggggcatcttcatcggtagcttcgtgccgccgctggtgattggcgtggcctttggcaacctgctgcagggcgtgccgttccacgtcgatgaatacctgcgtctgttctataccggtaacttcttccagttgctgaacccgtttggtctgctggccggtatcgtcagcgtggcgatgatcctgactcagggcgccacctacctgcagatgcgtaccgtaggcgaactgcacctgcgtactcgcaccgtttccatggtggcggcgctggtgacgctggtctgcttcgcgctggcgggcgtgtgggtctactacggcatcgacggctatgtggtgaaatcggtgattgaccataccggcccgtctaacccgctgaccaaggaagtggtgcgggaagctggcgcgtggatggtgaactttaacaatatgccagcgctgtgggcggtgcctgccctgggcgtggtgttgccgctgctgaccgtcgtttcgaccaaagcggataaaggtgcctgggcattcctgttctcctcgctgaccctggcctgcatcattctgactgccggtatcgcgatgttcccgttcatcatgccgtccagcaccatgctgaacgccagcctgacgatgtgggacgcgacctccagtcagcggacgctgaacctgatgacctacgtggcgattgttttcgtgccgatcattctggcctacaccagctggtgttactggaagatgtttggccgcatcacgcgcgaagacatcgaaaagaatacccactcgctgtactaaggtaaggagctatatatgtggtacttcgcatggattttgggaacgcttcttgcctgtgcttttggggtcattaccgcgctggcgcttgagcacgtggaagccaccaaagccgggaagaaagaagaaatctgatgaaatttatcgctactctgtacgcgataatggacaagcgcccgctccgggcgctttccttattgatggcgctgctgctggctggctgcattttctgggatccgtcgcgctttgcggcgaagaccagcgagctggaaatctggcatggtttcttgctgatgtgggcggtttgcagcggcgttattcacggcgtgggctttcgcccgcgtgccgttcactggcaggggattttttgtccgcttatcgctgatatcgtgctcgctttaggtctcttctttttcttcttttgaataagagatctctgttaatgctatgggcttgcataagcccataaaaatttacgccccgtttactttcccccattccaaaccacctttcccgcgcgtatagtagcgaagtttgaaagctctaacctttttttgcattaccgggatgtaaagtgaatacaacgctgtttcgatggccggttcgggtctactacgaagataccgatgccggtggtgtggtttaccacgccagttacgtcgctttttatgaaagagcacgcacagagatgctgcgccaccatcactttagtcaacaggtgctgttggctgaacgcgttgccttcgtggttcgcaaaatgacgctggagtattttgcccccgccagactcgacgacatgctcgaagtccagacggaaattacctcgatgcgcggcacctctttggttttcacgcagcgaatcgtcaacgccgagaatacagtgttaaacgaagctgaggttctcattgtgtgcgttgatccactcttaatgaagccacgtgcgcttcccaagtctattgtcgcggagtttaagcagtgactgacatgaatatccttgatttgttcctgaaggcgagccttctggtaaaacttatcatgttgattttgattggtttttctatcgcttcctgggctatcattattcagagaacgcgtatccttaactcggccgcgcgtgaagctgaagcgttcgaggacaaattctggtccgggatcgagctctctcgtctgtaccaggagagccaggggcgtcgcgataacctgaccggttcggaacaaatcttctacagcggtttcaaagagtttgcgcgcctgcatcgggccaacagccatgcgccggaagcgattgtcgaaggggcatcgcgcgcgatgcgtatttcgatgaaccgcgaactggaaacgctggagacccatattccgttcctcggcaccgtaggctcgatcagcccgtatatcggtctgttcggtaccgtctgggggattatgcacgcctttatcgcccttggcgcggtgaagcaggccaccctgcagatggtggcgccaggtatcgccgaagcgctgatcgccaccgcgattggtctgttcgccgcgatcccggcggtcatggcgtataaccgcctgaaccagcgcgtgaacaagcttgaactgaattacgacaactttatggaagagttcaccgctattctgcaccgtcaggcctttaccaccagcgaaagcaataaggggtaagccatggccagagcacgtggacgcggacgtcgcgaactgaagtccgagatcaacatcgttccgctgctggatgtcctgctggtgctgctgctgatctttatggcaacggcgccgatcattacgcagagcgtggaagtcgatctgccggacgccacggaatcgcaagcggtgaaaagcaatgacgatccgccggtgattgtggaagtctccggggtagggcagtacagcgtgaaggtggggcaggagacgctgtcccagctgccgccggagcaggtaattgccgaagcgaagcgtcgtcttgaagccaatgaaaaaacggtattcctgatcggcggtgcgaaagacgtcccttacgatgaaattattaaagcgctgaacctgttgcatagtgcaggggttaaatcggtcggcttgatgaccaaacctatttaatcgcttcaggtaggtgcgtccgtgcggcgtccggtggcgggtatcgctcgccgtcggtgcgcatcgcggatacaggcgaacagtttttgggaaccgatagtgtcaaaggcaaccgaacaaaacgacaagcttaaacgagcgatcatcatttcagtcgcgctgcacatcattctgatcgcgctgctgatctggagttcgtttgacgagcatctggatgcctctgccggcggcggcggcggatcgtcgattgatgccgtcatggtcgatccgggggcggtggtaaataactataaccgtcagcaacagcagcaggccagcgcacgtcgcgccgctgaacagcgtgaaaaacaggcgcagcagcaggcggaagagttacgtgagaaacaggcggcggaacaggaacggctgaaacagctcgaacaggagcggctgcaggcgcaggaagcggcgaaagaagcgaaggagcagcagaagcaggctgaagaagcggctgccaaggccgccgcggcggcaaaagccaaagcggacgcacaggcaaaagaagcgcaggaagccgctgccaaagcggccgccgaggcgaaagcgaaggcggatgcccaggcgaaagcggcagaacaggcggcggccaaggcggctgctgaggcgaagaagcaggccgaagccgctgcagcgaaagccgctgccgaggcgaagaaacaggcggaagctgaagcggcgaaagctgcggccgaggcgcagaagaaagcggaagcggcggctgcgaagaaagcgcaacaggaagcggagaaaaaagcccagcaggaagcggctaagcaggcggcagctgaaaaagcggctgctgagaaagccgccgcgcaaaaagcggccgctgagaaggccgccgccgagaaagccgcagccgctgaaaaagcggcggcagcgaaagcggctgcagcagagaaggctgcagctgataaagcggccaaggcggcagcagcaaaagccgcggcggcgaagaaagcggcggctgcgaaagaagcggacggcgttgacaacctgctcggcgatctgagttctggtaagaatgcgcctaaaacaggcggtggggccaaaggaaacaatgcctccgctgccgggagtggtaatactaaaaacagtgcctcaggggctgatatcaacaactatgccggacagataaaatcggcgattgaaagtaagttttatgacgcatcgtcctatgcgggcaaaacatgtaccttgcgtatcaaacttgctcctgacggtctgttgttaaatatacagtccgaaggtggtgatcctgctctgtgccaggccgctcttgccgcagcccgacaggctaagtttccgaaaccacctagccaggcagtatatgaagtcttcaaaaatgcgccactggacttcaaacctcagtgacatttttccccgtgcaaacggggaaaaacaatctatggtagtcacagggttttggtagttttgtatatttgagtttgttaacattctgctaaattatcgtgggctttctgcccggataagggagatatgatgaagcaggcattacgagtagcatttggttttttaatgctgtgggcggcggtgctgcacgcagaagtacgtatcgagatcacccagggggtggactcggcgcgccctatcggcgtggtaccgttccagtgggccggccagggcgctgcgccggaagatgtcggtggtatcgtggcagctgacctgcgcaacagcggtaaattcaatccgctggatcgctctcgtctgccgcagcagccgaccagtgcccaggaagtgcagcctgctgcctggtctgcgctgggtattgacgccgtagtcgtcggccaggtcacgcaaaatccggatggttcttatcaggttgcgtatcaactggtggacaccggcggagcgccgggcacaacgctggcgcaaggttcttttaaagtcactaagcagtacctgcgctatgcggcgcacgcggccagcgacgcggtatttgagaagctgaccggcatcaagggcgccttccgtacccgtatcgcctacgtggtgcagaaaaacggcggccagtacccttacgaactgcgcgtgtccgactacgatggttacaaccagttcctggttcaccgttcctcccagccgctgatgtccccggcctggtctccggacggttctaaactggcctacgttacctttgaaagcggtcgttctgcgctggtggttcagaccctggcgaacgcctctgtgcgtcagatcgcctccttcccgcagcacaacggcgccccggcgttctcaccggatggttctaaactggcgttcgcgctgtcgaaaaccggtagcctgaacctgtacgtaatggatctgggatcgggtcagattcgtcaggtgaccaacggtcgcagcaacaacaccgaaccaagctggttcccggacagccagaatctggccttcacctctgaccaggcaggtcgtccgcaggtatataaagtcaacattaatggcggcacgccgcagcgtatcacctgggaaggttctcagaaccaggacgccgacgtgagcgcggatggtaaaaccatggtaatggtcagctcggccggcggtcagcagcacattgccaaacaagatctggaaacgggtggtgtacaggttctgtcatcaacgtttttagacgaaacgccaagtctggcacctaacggcactatggtaatctacagctcttctcaggggatgggatccgtgctgaatctggtttctacagatgggcgtttcaaagcgcgtcttccggcaactgatggacaggtaaaatcgcctgcctggtcgccgtatctgtgataataaataattgattattaaaggaatcaaagaaatgcaactgaacaaagtgctgaaagggctgatgatcgctctgccggttatggcaatcgcggcatgttcttctaacaagaacgccagcaacgaccagagcggtgaaggcatgctgggtgccggcactggtatggacgctaacggtaacggcggcaacatgtcttctgaagagcaagctcgtctgcagatgcagcagctgcagcagaacaacatcgtttacttcgatctcgacaagtacgatatccgttctgacttcgctgctatgctggacgcgcacgctaacttcctgcgcagcaacccgtcctacaaagtgactgtagaaggtcacgcggatgagcgcggtacgccggaatacaacatcgctctgggtgagcgtcgtgctaacgccgttaagatgtatctgcagggcaaaggtgtttctgccgatcagatctccatcgtttcttacggtaaagaaaaaccagcagtactgggtcatgacgaagcggcatatgccaaaaaccgtcgcgccgtactggtttactaagagaattgcatgagcagtaacttcagacatcatttattgagtctgtcgttactggttggcatagcggccccctgggccgcttttgctcaggcgccaatcagtagtgtcggctcaggctcggtcgaagaccgcgtcactcaactcgagcgtatttccaatgctcacagccagcttttaacccaactccagcaacaactctctgataaccagactgacattgattctctccgcgggcagatccaggagaaccagtatcagctgaatcagatcgttgagcgccagaaacagattctgctgcagatagatagtctgagcagcggtggcggcgcagcatcaggtgcgcaggctccgtcgtcttctggcgatcagagcgcggctgccaccagcgcagcgccagcggccacctcaggcgccccggcgatgaccggcgatgcgaacaccgattataatgccgctattgccctggtgaaggatgcctcacgccaggatgacgcgatggtggcgtttcaaaacttcgtcaaaaagtacccggattcaacctaccagccaaacgctaactactggctcgggcagttgaactacaataaggggagaaaagacgacgcggcgttttacttcgcttcggtagtgaagaactacccgaaatcgccaaaagcgcctgacgcgatgtttaaagtcggcgtgatcatgcaggacaaaggtgataccgcgaaagcgaaagcggtttaccagcaggtgatcaataaattccccggcaccgacggtgcgaaacaagcgcaaaaacgacttaatgctcttggttgattacggcatgaccagaaatcgcgttatttctggtcttgtcgcctgaatcgccagcagttaagtgatctttatcgaaattttagttgcgctgaattctgaaatcagtaatatatgccgccgttgccaagggatatcaaacaagcccaaagcaatgccagagtgggtcgttagctcagttggtagagcagttgacttttaatcaattggtcgcaggttcgaatcctgcacgacccaccaatcgttctggtggaacgcgatagtaaaacgtgaaggataacgttgcgtcagcaacggcccgtagggcgaggcgaagccgagtcatcctgcacgacccaccgcttagtagtatccagcgtagtatcgggtgattagctcagctgggagagcacctcccttacaaggagggggtcggcggttcgatcccgtcatcacccaccaccgggtcgttagctcagttggtagagcagttgacttttaatcaattggtcgcaggttcgaatcctgcacgacccaccatctttaacatcgaacgtcggtgttaaacgtgaaggataacgttgcttcagctacggcccgaagggcgagcgaagcgagtcatcctgcactccaatcatttttatgatggggtaggtggacgcagtatcggtagtatccagcgcagtttcgggtgattagctcagctgggagagcacctcccttacaaggagggggtcggcggttcgatcccgtcatcacccaccactcgggtcgttagctcagttggtagagcagttgacttttaatcaattggtcgcaggttcgaatcctgcacgacccaccaatttcagcatttaactcagatgctgaacgtgaaggataacgttgcgtcagcaacggcccgaagggcgaggcaaagccgagtcatcctgcacgacctaccaatttctgaattggtgtcgagtgaaattattcaggtagtaccagagcgggtcgttagctcagttggtagagcagttgacttttaatcaattggtcgcaggttcgaatcctgcacgacccaccaatttcagcatttaactcagatgctgaacgtgaaggataacgttgcgacagcaacggcccgaagggcgaggcgaagtcgagtcatcctgcacgacccaccatcctgaatgatggcagcagtaaaatcccgcaaggggtcgttagctcagttggtagagcagttgacttttaatcaattggtcgcaggttcgaatcctgcacgacccaccaatgtaaaaaggcgccctaaaggcgcctttttgctatctgcattttccctgccactcatcaatgttaatactttcttaattcatcattttcccacggtcacgctgcgcttaccgtgcctgcacaggatacgaaccggtcgttcgggcagatgcgcagcaccgtccccgggaaaagggtctgatgtacaaaattcatcacgacttttagctcgtaatcggctatcttgtttagcatataaaacaccatgaccgtattaagccgccgacaggccatactgacggttatagagttaagccagtaaaacgagattgcatgatgagcgtaatgtttgatcctgaaacggcgatttatcctttccctgctaaaccgcagccgctgaccgtcgacgaaaagcagttttaccgcgaaaaaatcaagcgcctgctacgcgagcgcgatgccgtgatggtggcgcattactacaccgatcctgaaattcaacagctggcggaagagaccggcggctgtatcgccgactcgctggagatggcgcgctttggcgcccgccattcggcctccacgctgctggtcgccggggtgcgttttatgggggaaaccgccaaaattctcagcccggaaaagaccattttgatgccgaccctgaacgccgagtgttcattggatctgggctgtccgattgaggaattcaacgccttttgcgacgcccatcctgaccgcaccgtcgtggtctatgccaatacgtccgccgcggtgaaggcccgcgccgactgggtggtgacctccagcatcgccgtggaactcattgaccatctggatagtcttggtcaaaagatcctctgggcgccggaccgccaccttgggcgttacgttcagcgtcagaccggcgcagacgtgctgtgctggcagggggcgtgcatcgtgcacgacgagtttaaaacccaggcgttgatgcggatgaaggctctgcatcccgaagccgccgtgctggtccatcccgagtcgccgcaggcgatcgttgagatggccgatgccgtaggctccaccagccagctgattgcggcggcgaaaagcctgccccagcgccagctgatcgtggccaccgatcgcggtattttctataaaatgcagcaggcggtgccggagaaaacgctgctggaagcgcccaccgccggcgaaggagcgacctgtcgcagctgcgcgcattgtccgtggatggcgatgaatggcctgaaagccattgccgagggtctcgagcagggcggcgctgcacatgaaatccatgtcgacgaagcgctgcgaaccggcgcattaattccccttaaccggatgctggattttgcggctacactacggggataacctattgtcgcgtcgccagacgctgaggggaggaaatggatttttttagcacgcagaatattttagtacatatacccatcggcgctggggggtacgatctctcctggatagaggccgtggggacgattgccgggctgttgtgtatctggctggcgagcctggagaagatcagtaactatgctttcgggctggtcaacgtcacgctgttcgccatcatcttctttcagatccagctgtacgccagcctgctgctgcagctgttcttttttgccgctaacgtttacggctggtatgcatggtcgcgacaaagcagcaaccatgaggctgagctgcagatccgctggctgccgcgcagcaaagcgctgggctggctggcggcctgcgtggtagcgatcggcttgctgaccctgtttatcaacccgttctttgctttcctgacgcggatcgcggtcagcctgatgcaagcgctcggtttgcaggtcactatgccggaactgcagccggatgctttcccgttctgggactcctgcatgacggtgctgtcggtggtggcgatgatcttaatgacccgcaagtatgttgaaaactggctgctgtgggtgatcgtcaacgtgataagcgtggtgatttttgcccgtcagggcgtctatgccatgtcgctggaatacctcttgctgacgttcattgcgttgaacggcagccggatgtggataaacagcgcgcgtgagcgaggttctcacgcgttttctggctaatggtggtggtgatgatcgtgcccggcgtgcatcgtgttgagatggcactccgggccgctgcagggctggtactccatctgcaccgtggcatgcgcaatttcatatttatgttccaggaaatgcaggatgcggttgagtaacgcgtcatggtcgtgcggtggaacgacctgtacatggagcgtcatcaccggtttttcccccaccagccagacgtggacgtggtgaacatcgcgtacctccgggatagagcgacggatatcccgctgcagggccgccacatccagcgaacgcggcgcgccttccagcaattcattcagactctctttcagtaatcgccaggcactacgtaataccaggcaggaaaccagcacggaaagaatcgggtcgacaggcgtccagccggtggtgaggatcaccacggccgccacgatcgcgccgaccgagcccagcaggtcgccaagcacgtgtagcgctgcggcgcgtacgttaagattccgctcctcgctaccccgatgtaggatccaaaacgccagcacgttggccagcagaccggcgactgcaatgaccatcatcgtcacgccggctaccggctgcggatgctggaagcgctgaatcgcctcccagacaatcagcatggtgatcaccaccagagcaatagcattgagaaacgccgccagggtggttaaacgcaaccagccaaaggtatggcgggcatttggtgggcggctggcgaagcgaaccgccagcagcgcaaacagcagagcggcggagtcggtgagcatatggccggcatccgccagcagggccagcgagccggagatcgcgccgccgacggcttcaatcagcataaagccggcggtgacgataaacgcccatagcagccggcgggcgttgctgttatccggagcctggacagaggagtgcgaatgcgagtgcgccatagtgtcgtcccttaatagttatcattattacgctatgacatcataaacagagagcgataaaaaacgaagaaaaggcgagaccggctcgccttttcttcgatctgcccacctcatgtgttactgggtggtgccgtcggttttgctgttgtcttgggtcgtattgccgccgttgtccagttttttaccggtgtccggacagcggccgtctttacacatcgagtttttatgcacctcatcgctcgacatattatcctgggtcatcgtcgagcccgtggtgcccccagagccagagttgatctgactattgtccacgttgttcggcgccacgttctcacgggcatccggcgccacctgaccggcatccgcggaagagttggcctggccattattggactgggcaccggtgtctgccgccagggccgcgccgctggcaagacctaaggtggcggtgagcaaaagggtcgtcagttttttcatattcatcggatactcctgttaagccgggaaggggaaatgcgcttcccgcggtgagtgtgccagggatctgactcgctatggtttaagactccgcagacgatcgcagtgtcactatataatcctgaaacgtaagacttaattagctttaacagttaaatattgtagttcatgagcctggtttcgctactttatggcgtatttttgcctatttccaggattattccatcactactgtaaaatcacgtttacactatttcagcgaagagatagattggagggattgcatttcattgaataagtatggcaacgctggaaagaagatgaattatcagaacgacgatttacgcattaaagagatcaacgaattattacctcccgttgcgctcctggaaaaattccctgctaccgaaaatgctgcaaacaccgttgcacatgctcgcaaagcgatccatcagatcctcaaaggcgacgatgaccgtctgctggtggtgattgggccttgttctattcacgatccggcagcggcgaaagagtatgccgcccgcctgctgaccctgcgcgaggcgctgaagggcgagctcgagatcgtcatgcgggtctattttgaaaaaccgcgcaccaccgtcggctggaaagggctcatcaacgatccccatatggataacagcttccgcatcaacgacgggttgcgcatcgcgcgcaaactgctgctggacattaacgacagcggcctgccggcggcgggggaattcctcgatatgatcaccccgcagtatgtcgccgatctgatgagctggggcgccattggcgcgcgtaccaccgaatcccaggtgcaccgtgagctcgcctccggactctcctgcccggtgggctttaaaaacggtaccgatggcaccatcaaggtggctatcgatgcgattaacgccgccggcgcgccgcactgtttcctgtcggtcaccaagtggggccactccgccatcgtgaataccagcggtaacggcgactgccatattattttgcgcggcggcaaagagcctaactacagcgcgaagcacgtggcggaggtgaaaatcggtctggcgaaagcgggtcttccggcccaggtgatgatcgacttcagccatgccaactccagcaagcagttcaagaagcagatggaagtgggcgccgacgtatgccagcagatcgccggcggcgagcgcgccattatgggcgtgatgattgaaagccatctggtggaaggcaaccagagcctcgagagcggtgaaccgctgacctacggcaagagcgtcactgacgcctgcatcggctgggaggataccgaaacgatcctgcgtcagctggcggaagcggtgaaaacccgccgcggctaagctactccgcgctagcgcaggtcataaaaaaagcgtggagatttccacgcttttttgttctcaccaggagaaattacttcgctttaccctggttggcgacggcagcagctttcgccgcgatctcttccgcgttgcccagatagtaatgtttgatcggcttgaagttttcatcgaactcatataccagcggtacgccggtcgggatgttcagttcgaggatctcgtcttcgcccatgttgtcgaggtatttcaccagcgcgcgcagggagttaccgtgagcggcgatgatcacgcgctcaccgcttttcaggcgcggcagaatggtttcgttccagtaaggcacgacgcggtcgatggtcagcgccaggctttcagtggtcggcagttcggcgtcggtcagttttgcatagcgcggatcgtggcccgggtagcgctcgtcgtctttggtcagctccggcggagtgacagcgaagccgcgacgccactgtttaacctgctcgtcaccgtatttttcagcggtttccgctttgttcaggccctgcagcgcgccgtaatgacgctcgttcagcttccaggatttctcaaccggcagccaggcctgatccagttcgtccagcacgttccacagggtgtggatggcacgtttcagcacggaggtataagcaaaatcaaagctgaagccttcagccttcagcagtttacccgctgctttcgcttcgctaacgcctttctcggacagatccacgtcgtaccaaccggtgaagcggttttcgttgttccactggctttcgccatgacgaaccagtaccagcttagttacagccattctctcactcctctctacacgccatccctcgcgccgcgaacggtgcgctgaatgtgatggtgtatgtgttattgattgataactattctcattatattgccgtgatttggcgcacggcaatgcttatccctaaccatagcgaaaatagtggcgcagtgtaaggtgcttgtaatacacaggttatttttttgtcctttggtgacggaaaatagagcaggttgctgaaaaaagaggcggcagagaggagggcggggacgaaaagcagcgccccctgatggagggcgctggcgattatcgggcgataaactgatattccgtcaggctgacgtactcctggcccggacgtaatacacagtccggctgcggccattgcggatggttcggcgaatccggcaggaattcgctctccagcgccagcccctgccagtcggcgtagggctccgtcgtctgcgacggggtgccgccgagatagttgccggagtaaaactgcagcgccggagcggaggtatagaccgtcatctgcagcttgccatcctgcgaccagacctgtgccgcaggctggctggcgtcgcctttggcatccagcaggaaggcatgatcgtatcccttcaccttttgctgatcggcatccgcgaggaagtcggcggcgatggttttcggctggcggaaatcaaagctggtgttagcaacatctttcagttcgccacccgggataccgtcgctttccaccggcagatacctctgggcgaggatctggagctgatgctggcgcacatcgccctgctcaccgtcgaggttgaaatagacgtgattggtcatattcaccgggcagggttggtccacggtggcgcgataggtaatcgcgatgcggttatcgtcggtcagacgatagtgcgcggtggcctgcagggtgcccggaaagccttgatcgccatcgggcgaggtcagggcgaacagcacttcctgctcgtcggcgcggacaatgcgccagcggcgcttatcaaacccttccgggccgccgtggagctggtggcccgcgtcgtttgacggcgtgacgttgacgacctggccgtcaagcgggaaacggctgtggccgatacggttggcgtagcggcctaccgaggcgccaagaaatgcggcctggcgagcatagtcttccagctttgcgcagcccagcagcggtcggcgcaggctgccatcggccagcggcacctcggcgctgagcagcgtcgcgccccagtccgccacggtgacggtcatccccgacttattgcgcagggtcacctgctgccatggctggccgtccggggccagcgcggtggtttgcgttagcattgcccggccccctgtgacggtttgcagacatagaatgtctctttaataccggttttcgcttcatactcgttggcaacggcctgctgaacggtatcgaccagttcttccgggattaacgctaccacgcagccgccaaagccgccgccggtcatgcgcacgccgcccttatcgccgatcgcggccttaacgatctccaccagggtgtcgatctgcgggacggtgatctcgaaatcatcacgcatcgaggcgtgggactctgccatcagctcacccatccgcttcaggtcgcctttttcgagggcgctggcggcttccacagtgcgggcattctccgtcagcacgtggcgtacgcgcttcgcgacgaccggatccagctcatgggcgacggcgttaaattgctcaagggtgacatcgcgcagggcgggctgctggaagaagcgcgcgccggtttcgcactgttcacgacgggtgttgtactcgctgccgacgagggtgcgcttaaagttgctgttgatgatcaccaccgccacgcctttcggcatcgagacggctttggtgcccagcgaacggcagtcgatcagcagcgcgtggtcttttttgcccagcgctgaaatcagctgagccatgatgccgcagttgcagccgacgaactggttttccgcctcctggccgttgagggcgatttgcgcgccatccagcggcagatgatacagctgttggaacacggtgccgacggcgacttccagcgaggctgaggagcttaaccccgcaccctgcggtacattgccgctgatcaccagatccgcgccgccaaagtggctgttccgctgctgcagatgctttaccacgccgcggacatagttcgaccactgctgggtgtcgtggctgataatcggcgcgtcgagagagaactcatcggtctgattgtcgtaatcggcggcaatcacccgcaccgtacgatcgtcgcgcggcgcacagctgatcaccgtctggtagtcgatagcgcaggggagcacaaaaccgtcgttgtaatcggtatgctcgccgatcaggttgacgcggcctggcgcttgaatgacatggctggccgggtagccgaaggcgtcagcgaacagggtttgggttttctctttcagactcatcattacactccggattcacgaaaatggacgtcgctgacggcgcgcagtcgttcggcagcttgctcggcggtcagatcgcgctgagtttcggccagcatctcataaccaaccataaacttgcggaccgtcgcggagcgcagcagcggcggataaaagtgggcatgaagctgccagtggttatggtcttcgtcgttaaacggcgcgccgtgccagcccatggagtaggggaatgagcactggaacaggttgtcgtaacggctggtcagctttttcaacgccagcgccagatcgctgcgctgggcgtcggtgagatcggtaatgcgctgcacgtgcgctttcggcaacagcagcgtttcgaacggccaggcggcccagtagggcaccaccgccagccagtgctcggtgtccaccaccgtgcggctgccgtcggccatttcgcgctgcacatagtccagcagcatcggctggccctgtgcggcgtaatactctttctgcagacggtcttcccgttccgcttcattgggcaggaaactgttggcccacacctgaccatgcgggtgagggttggagcagcccattgctgcccctttgttttcaaaaacctgcacccacgggtagcttttcccgaggtccgcggtctgttcctgccacgttttaaccacgtcttccaacgcttcaaggctcagttccggcagcgttttgctgtggtctggcgagaagcagatcacccgactggtgccgcgggcgctctggcagcgcatcagcggatcgtcactctccggtgcgtccggggtgtcggtcatcagggccgcaaagtcgttggtaaatacgtaggtaccggtgtaattcgggttggtgtcgccggtcacccgggtgttgcccgggcacaggaaacagtccggatcgtgggccggcaaggtctgttttgccggcgtttcctgcgccccctgccaggggcgcttggcgcgatgcggagaaaccagaatccactgtccggttaacgggttataacgacgatgtggatggtcaacggggttaaatacgctcatgaaggttccttagtctggataaccctgcggatgacgggactgccagtgccaggtgtcctgcgccatttcgtccaggttgcgcgttacgcgccagttcagctcgcggtcggccttggcagcatccgcccagtaggccgggaggtcgccatcgcggcgcggcgcgaaatggtagttaatgggtttgccgcaggccttgctgaaagcattgactacgtcgagcacgctgctgccgacgccggcgccaaggttgtagatatgcaccccggctttgtcagccagtttttccatggccgcgacgtggccatcggcgaggtccatcacatggatgtaatcgcgcacgccggtaccatcttcggtcggatagtcgttaccaaaaatggccagcgattcgcgacggccaacggcgacctgggcgatgtagggcatcaggttgttcgggatcccctgcgggtcttcccccatgtcgcccgacgggtgggcgccgaccgggttgaagtagcgcagcagggcaatgctccactccggctgggctttctgcaggtcggtcaggatctgctctaccatcagcttgcttttgccgtaagggctttgcggggtgccggtcgggaagctttcgacatacgggattttcggctgatcgccgtagacggtagcggaggagctaaagataaagttcttcacgccagcggcgcgcatggcagagactaatttcagtgtgccggtgaggttattgtcgtaatattccagcggcttggcgacggactctccgacggctttcagcccggcgaagtggatcactgcctcaatggcgtgatcgtggaggatctccgtcatcagcgcttcgttacgaatatcgccttcaataaaggtggcttctttgccgccgagacgttcaatcaccggcagtacgctgcgcttgctgttgcagagattgtcgaggatcaccacctcgtgtccctgctgcagcagttgaacgcaggtatgacttccaatgtaaccgctaccacctgtaaccagaactttcatgattcgctccattcggcttatcgtttgtgaggaagatagcatatcaaagaagtgaaaagtgtgacatagcacaagttagtggaatcgtttacactcaagggcgaaatgatatcattgaatatattttgctttaaaaacatgtcattatattattttggcgctatttttctgaaaaataccagggatctttcgatccccggcagggggcgtcaggccacggggccgagctgataagtgtaaccgtctccactgggaacgaacgccaggcgatgggtaatacagtccggggcatcttccgcatggtgcgagacaaacagcagctgtgtggccccttcgccaatcaacacgtcgacaaagcggcgcaccagctggcggttgagggggtccagcccctgcagcggttcatcgaggatcagcagggttggatgcttcaccagcgcgcggacgataagcgccagccgctgctggccccacgacagactgtgaaacggcgcgtcggcggtacgcttatcgatgccgagaatatccagccattgctgcaccagcttatgctgcttgtcggagaccgcctgataaatgccgatcgagtcaaaatagcccgacaggatgacgttgcggacgtttgtgctgacccggtagtccagatgcaggctgctgctgacgtagccgatatgctttttaatatcccagatggtctcaccgctgccgcgccggcggccaaagagcgtgagatcgttgctgtagccctgcggatgatccccggtgaccaggctcagcagcgtagatttaccggcgccgttgggaccgacgatctgccagtgttcgcccggattcacggtccatgagaggtgattgatgaccgggcgatcgttataggagaccacgccgtcgttgagcacgatacgcggcgccgagtctgtcagcgcatgacgggccggtgggacatccggctccggcagggtgatgccgtccagtttttcactgtgcgccagctgggcgaccagcgcctgctgcagcagggaagacttctcgcccgtctcgctaagggtgcagtcagccagcacgccggcgaattgcacaaactccgggatctcatcgaaacggttgagcaccagcaccagggtgatgccggcgctgtgcaggtcggccagcagggcagccagctgctggcgggagttgacgtcgagaccgtcgaaaggttcatcgaggatcagcagttgcggatcggtcatcagggcctgacacagcagggtcttacgcgtttccccggtcgacaggtatttaaaccggcggtccagcagggcgctgatgccaaactgttcggccaggcgcgcgcagcgggcaggatctttcacctcatcctggataatctccgcggtggtgcggccggtgtcttcttcgcctgggctgagcaggtcggtgttattgcgctgccactcgtcgctgaccagcttctgcaattgttcgaaggagaggcgggttacgcgggagaagtggctttcgcgctggccgctgagcagggtcaggtcgccggccagggcccgcgcgagggcggatttgccgctgccgttgctgccgacgaacgcccagctttcacccgccgccacgctcaggtggtctatttttaaggtctttgtatcgctcaggcgaaacgtgccttgcgaaatttgcaatgatgacatgatgtatcccattttttgcagcgatgtgcatcagggatacgacttcaggcgcgtaatgtcaatggggtcagcataacgtcgcgagaatgatgcgatcggcattgaagtaagcgatcgcctccgttccttccgccaggccagcggcctgcgcctgtggcagggtggcgcacagggtttgaccgtccgccagggtcatcagtacttcgcactgtccggacccgcattcgatatgactgatacgtcccgacagctggttatcggcctggcgggctgctgcgggatcgagggtgatgccgacccatggcgctttgagcaggaccagcacctcctggccctcatcgagtcccagcttctcagcgctttgcgcggtgatggcgacgttcaggcgggtttttccgtcagccaacagtacttccacgtgctgctgcacctgctggcgatcgcggccggtaatggtgccgaaccactggttgcgggcgctggtctgcagggaaaagcgcgagatggccgccagcaggctatccagcggcagggcatcgtcatcgctgagtacatcaaacgctttctgctggatctgcgccagcagatcgtacagctggatcagacgctgcccgtagcgggtcagcaccgcgccgccgccgccctttccgccggtggcgcgatccaccagcggctgttcgctgagctggttcatctcattgatggcatcccaagcgctcttatagctgatacccgcatgcttcgccccctggcttatcgaaccggtctggtcaatctgtttgagcagggcgatccgccgcggatcggcaaacaggcgctgctgtagcttaagggtgagaagaatttcggcctgcataatcgtttcctgacaaaaaagggtattgtgaccgatagtcgcccacttgcaaaacctctctgcgcggttggtcattacccaccgcacaaatgggacgtgttttttcggctgaaatcgttacaatcaggaaatcatactatctggagtgaaccatgttagagcttttgaaaagtctggtttttgcggtcatcatggtaccggtggtgatggcggtcatcctgggactgatttacggtcttggcgaagtgttcaacctcttctccggcgtaggccacaaagatcgcagccagcaaaatcactgatttcccggcgcccggtttaaccgggcgctgtgctatttccctcctgtatcatttccttcgttttattgtcctgtgtcactataaaaacgcttcgcatatcgttatattatcgactacataacgcattgacaggagagtaagatggcaggttcttggttacgcggggttgtcggggtatcactcacgctgtgcgtcgcgggtcaggcgctggcggcagagggtaaagtgaccgttttcgccgccgcatcgttaaccaacgcgatgcaggatattgccctggcgtacaagaaagaaaaaaacgtcgaggtcgtgtcgtcgtttgcctcgtcgtcgacgctggcgcggcagatcgaagcgggtgcgccagcggacctgtttatctccgccgatcagaaatggatggattacgcggcagataaaaaggccatcgatccggcaacccgcgccactctgcttggcaacagcctggtggtggtcgcgccgaaagccagtgcgcagggggcgataaccattgatgagaaaaccgactggaccagcctgctgaaaggaggccgtctggcggtgggcgatccacagcatgtcccggccggtatctatgccaaagaagcactgcagaaactcggtgcctgggagacgttgtcgccgaagctcgccccggctgaagacgtgcgcggtgcgctggcgctggtggagcgcaacgaagcgccgctggggattgtctatggctccgatgccgtggccagcaagggggtgaaagtggtcggcaccttcccggaagcctcgcatcagaaagtcgagtacccgctggcgattgtcgatgggcaccgcaatgcggccgtgagcgccttctatgactacctgaaagggccggaagcgtccgctatctttgaacgttacggatttaccacccgctgatgtttctgagcgaacccgaatggcaggcggtgctgctgagcctgaaagtctcctccctggcggtggccttgagcctgccctttggcatctttttttcctggctgctggtccggcgcacctttcccggcaaggcactgctcgacagtattctccatctgccgctggtgctgcctccggtggtggtggggtacctgctgctggtggccatggggcggcgcgggtttattggcagctggctgtatgactggttcggcatcagctttgcttttagctggcgcggggcggtgctggcggcggcggtgatgtctttcccgctgatggtgcgcgccattcgcctggcgctggaaggtgtggacgtcaaactggagcaagcggcgagaaccctcggggccagccgctggcgggtatttttgaccattacgttgccgttgactctgccggggattattgtcggcacggtgctggccttcgcccgctcgttaggggagtttggcgcgaccatcacgttcgtctccaatattcccggtgaaacgcgcaccctcccttcggcgatgtacaccttgattcaaaccccgggcggggagggggcggcggcccgcctctgccttatcgccatcggactggcgctggtttcgctgctgatttcggaatggctggcccgcgtgagccgccagcgcatgggaggataatgatgctggagctggactttacccagaccctcggcagtcactgcctgcagatccgtgaaaccctgcccgccagcgggatcaccgccgtctttggcgtctccggcgcgggcaaaacctcgttgattaacgccatcagcggcctgacccgaccccaggcggggcggatcgtgctcaacggcagggtgctgaacgacaccgcgcagcgtatctgcctggcgccggagcagcgccgtatcggctatgtctttcaggatgcgcgcctgtttccccattataaagtgcgcggtaatctgcgctacgggatggcgaaatccatggtcagccagttcgataagctggtggaattgctggggattgcgcccttgctggatcgcctgccgggtcggttatccggcggcgaaaagcagcgagtggccatcggccgcgccctgctgaccgcgccagagctactgctgctggatgagccgctggcctcgctggacattccgcgcaaacgcgagctattgccctacctgcagcggctggcgcaggagattcatattccgatgctctacgtcagccactcgctggatgagatccagcatctggccgatcgtgtgctggtgctggaggccggtaaggtgaaagctttcggtccgctggaggaggtctggagcagcagcgtgatgcacccctggctgccggcggagcagcagagtacgatccttagcgccaccgtcgccgcgcagcacccgcagtatgcgatgacggccctggcgctgggggaccagttgctgtgggtcaaccggctcgaacgtcccgcaggcgacaccgcacggatccgcattcaggcgtcggacgtttcgctgacactggcccagccgtccgggaccagcatccgcaatatcttgcgcgccgaggtggctcagtgtctggaggtcaacggacagattgaagtgcagctcagagtgagtgaccgtctgctatgggccaggattagcccatgggcgcgggacgacctggcgatagcgccaggtcagcaggtgtttgcccagatcaaaagcgtgtcgatcgccgcctgattacagcagttggcggtagataaactcggcgatgctggtggactcattgtcgccgatgactatgttggcgcgggctttcacctcgtccaccgcgttgcccatcgccaccccggtgcccgccgcttccagcatgctaagatcgttgtagttatcgccgaaggccaccacatcctgcatcgacagcccctggtcggccacccattgcgccaggcgtttgcctttgctgttgccggcgcgcgcgatatctacctgatcgtgccacgaccattcgcactcgaggcccagcgtctcgccaacctgctgcgcaaaccgctgcaggcggggaatgtcgtcatcggtgagagcgaatttccataccgcgttaacttcgcgaaccgcctgcgccagcgaatcgacctgagcgaaaactggacgctgatcttccggtaacgcctgcgcccagttgcgggtgcggatcacatgcccggtggggtgttcataaagcatcgcgtcgtccacatatgccaggccgtggatctgctgtttggcgagcatggcagtgaggcttaccgcttgctctaccggcataggatcggcggccaaaaccttttttgcgtgataatcatacaaataggtgccattacaacaaattgcaggtgtatcgagagccagtgcctgataaaaaggatggatagcgacgtgatgacgtccggtgacgacgatgacctgatagcctgcctctctggcgcgggccagcgcctccagcgaagcgggcagaatggtttttttgctggtaagcagggtgccgtctaaatccagggcaatcacgcgtgttgtcatgtgttatttccggttgatgttgaaaagtgacctggccatgatggtacaccgccgtggcgtcaggaccaatttttccacatctgccgtgaatgtctgtatgccctttgtgccgccgtccggcggaaattcggcggacgatgcgagtatcatgggcggatgtcttataattttcagggtgctgttatcctgaaaatgaaaattccacgtgcagtgagggaaggagtagtcatgaaacaaaccgtttataccgccagcccggaaagccaacaaatccatgtctggagtcttgaagcggacggcaaactgacgctggtgcaggtggttgatgccccagggcaggtccagccgatggtggtcagccccaacaaggaatttctgtacgttggcgttcgtccggagtttcgcgtgctggcctatcgcatcacgccggataacggggcgttaacctttgcgggcgaagctgcgctgccgggcagcccgacccatatctctaccgatcaccatggccgctttgtcttcagcgcctcctacaatcagggctgtgtcagcgtgaccccgctgcacgacggcctgccgggcgaaaccatcaccgtggtggaagggctggaaggctgccactcggccaatatctccccggataatcgcaccctgtgggtgccggcgctgaagcaggatcgcatttgcctgtttaccctcagcgacgatggtttcctctcggcacaggagcccgcggaagtgacgaccgtcgagggcgccggtccgcgtcacatggtattccatcccaaccagcagtatggttactgcgtcaatgagctaaacagctcgattgacgtctgggagctgaaagatcctaagggcaacatcgaatgtgtacagaccctggatatgatgccgcctgattttagcggcgtgcgctgggcggcggatattcatatcaccccggatggccgtcatctttacgcctgcgatcgtaccgccagcatcatcacggtgttcagcgtttcggaagatggtagcgtgctggcggtggaaggctatcagcctaccgagacccagccgcgcggctttaacctcgatcacagcggtaaatatctcattgccgccgggcagaagtcgcaccatatcgcggtgtacgacatcgtcggtgagcagggactgctgcaggagaaaggccgctatgcggttgggcaggggccgatgtgggtagtggtcaacgcccactgaaccgccatcaggtaaaagaaaaaacctcgccttagcgaggttttttttgctcagagcggacaggctctgcggagaaggcgttgtcctggcgggccagaagcgtggcgacgttagatatcgtccatggtgtagccaacgacaatctccaacgtttttcggatcacgtccgcggtcaccacgtcatcggtggtttccagcgcctgaatcagccataaaataatggccttattgttcaggtgaccctcggactggagaatactgttgatggcgagcgacatgacggcggactcatcaaccagtttatcaccggcgttacggaaatagtcggagagcgcggtgtcctgcagtcttgcgtaaatatctggttgctgatgcatagtctgtctcatcacattctcactctgtttaattcaccatggttgggataatcagtggatctttttagcttccgacggcatgctgtctggcgccagcgaacctctggtttcccaacggccattgattttctttacctgtaaaggcgcgtacttccgctgacggataagcttcgcgcaaatttcttcgatcacggcagcgatgatctttctacgctggcgatctggttctgtcgcctgcattaaccgaagtcgaaccagcagggtcggggtggtaatcgggcgattcgttttcagaagcgctagaaccgcctcgccgatgatttcatcggttatttcctcagtttcactgttattcataaccgtctctatgcatgccacccttttcctgaataggcgaacggcattcaggtcagcagcaggtttgtggaagcgatcgcccctcatctgctactgcggcgctgcaacaggcgacgatcgatgacgttattcctggccagcaaacagcagaccaattaaggtctgatagtggctctcttcctccggcgcgcgagcgcggtccaggcggctcaacagtttggtgcatagcgctttgcggttgagatgacgcccttcgttaagaatatccatcacgatctgacccagggtttcctgctgggaaggcaaagatgctttgttgaaatactgggcaattgcgttcgctgtatctggaatgtaaccattctgctgcatatgtgctcctttcatttcattcatctgttaactgccattaaacttatacaataattattaacctgtacacacaaagttgcacaataatgattcatgttagtttaactatatgatttttaattgtttaattttttttgcctggcgcggttctggcttgtaaaggtggggtttagcgttgcatgttgtacaaggaaagaaaaaaagggaaaaccttgcacaaaaaagggatttttagtgtatcttttttgttaagacaaaacgtagttttacgagacccttagcctgataactgctactgtgaatgcttatccctcccatctggaatcactatgctaaccaccatcatttatcgcagccatatctgcgacaatgtctcattcaaatcgatcgaggccatggtcgccagggcaaacgaaagaaatgggcaggcggacgtcaccggtattttactttttaacgggacgcatttttttcaactcattgaggggcctgaagaaaaggttcaggatatttatcagcatatctgccaggatcctcgccactataatctggtggagttgctttgcgattatgcgccgtcccgtcgttttggtaaggtcgggatggaactgtttgatttacgcgaacacgatcgcgaggaagttctgcaggcggtgatggaccgggggacgtcaaaatatcagctcacctatgatgaccgggcgctgcaatttttccgtacttttgtcgaagccacagaaaaagcgaactattttgagattccttccgcagatagttgggtttttattcctgataaggagacgttctatcctgataccccgattatcgataatacggaaggttgttcctttgccttccagccgattgtcgaccctttcgcctgcgaaattatttcgtgggaagcgctgttgcgtacaccggacgggcaatcccccggcgcctattttgccgggctgaccggggacgatatttatctcgctgacctgcacagtaaacgggtggcgttgtcgctggcgggaaaattaggtttacgtaataaggcgttaagcattaatttactgccgatgaccatggtcaaagcgccgaatgcggtggctttcctgctcgacgaaattagtcgcaatgaccttattccggagcagattattgtcgagttcactgagcgggaagtgatttcgcggatggacgattttaccgatgcggtgcgcaaactgaagggcgcgggaattaatcttgccatcgatcacttcggcgccgggtttgccgggctatcgctgctggcgcaataccaacccgacagaattaaaatcgaccatgagctgatccgcaatatccaccaggacggaccgcgccagtcgattgtacaggcgattatcaaatgctgtacttctctggagattgcggtctcagccgtcggcgttgagcgtgctgaagagtggatgtggctggaatcagccggtatttcacagttccagggtaatttgttcgccagcgcgcgcctggggggcctacccgccgtcgcatggccggagaaaaaatgaaccaccgcgaaatcagctaaacattttttcatcttttttcccgggcgctgtgagccgcaacctgatatctttatctgtacaagaaaatagagttgtacaggatgcctgaattcgttagtttaggtattaaggtatcaggttgatgtgaggctgctatggcgttttacagtatcggtgaagtcgccgaacgttgcggaatcaatccggtcacactgcgcgcctggcagcgtcgttacggtctactgaaaccgcagcgtagcgaaggcgggcatcgacaatttgatgaagaagatatcctgcgtatcgaagagatcaagcgctggatagagcgcggtgtatcagtagggaaagtcaaagcgctgctggaggataacctgccggcggcgcgcgacgaatccgcgcatcttcaggaagagatgatgtccattctgcgttatatgcagcccgccagaatccgcgccaaattaatggcgctcagtcatcaacaccccgtcgacaccctcatcgatagcctgttagtgccggtacgacagcgtctcaagctggatcagaatacctcgctggtgattagcagcatgctggacggcctgttaattgactgcgtagcgttgtttctcgccgaagcgcgtaaaaaaaatggcaaagagacgctgctggtgggctggagcaatgaggacaggacgcgtctgtggctggaggcatggcgtctttcccaacgcggctggcatgtcaacgttctcgccgaaccgctggagtcgccgcggcctgagctatttcccgggcagcatattttcgtctggaccggacgtgccgccacgcctctgcaggaggagctgctcagccactggcaggagcagggcttcagcatccattttcacggccaaaattaagcgccccgatccgtggtgcggatcagggcttgagtgctgggttacaggtgaatctggctccaggatttgaacgtttcgctgcggctgatattaaaaaaatcggttctaccgctgcagccgagctttttaatcagattcagccggatctgataaatggtttttatatgcaggtttagcgaccggccaatgctggcgaccgcttcgccattgctgataagttgaataactttcttttcccgctcggtaaactgcaccgaggcgcctggcgccggatgggttttgtaatagcgggtgggttgatgcagaaatatctttaactcttccggcgtcgagttggccggtaagcgcagcataggcagttcactaagaaaattaagatcgttgccttcggttaacagaataaataatgtatcccgccgattatagttgtgctgcagtaccgcgaaataattgtcgctggtgaagaaaacatgttttttgcggaagtaagatgccggcaggctattcaggatcagcgacatcccatagagaagaaaaccattatcaaaccacagatcgtaatgctcagaacgatagcaagtattatggtgtgacatttttttgcctcagttagccgatagagacccaggcgcgccggtacagcaggtcgaagcctgctgccagcacagtgggtttatttaatgatgaggtttgctgtacagcatatccagcgcctgcagatagagatcggaaagtatttcgttactttccgtttgcagacgatgctggatttccgtaatcatccgctcattatttaccgttctgtgctgcttaatgagcgtattctcaatattcttcatcagggccgaattgaagacaaactctgctggaatggtatttttaatatgcatagctcgaactctcccacgtataaagcaaacagacaataaaagtcgcagcgtaccgttggtacgcgccaagtcacgaacaggaaatgtataaccaggaaccaccgtccgactcgctgcgcaatcgtcaagcttccccgctttgttgcgcaacaagcagttaacactccaaaactatagacgctgatttcactatgtacaacttttttcattactatatgtacaacgtaacggcttattttttgtgtgtgttttaatttgttgatttatagcaattttattaagtgataacttgtacagaaaagtcgggttgtgcaggatttcgctgtaaaaccagcgggaagaagctgatgatggtagaagaaagccaattgtgaaaattctgtcatggctggcgaaatgcatgaaattgcgccgatgcgcgaaggggtaaacagcaacgctgtcgtcgacaggtggctttcttccgcgtcggagtctgagcatagcggaaaatatgatgaggctttgtctgctttttgcacagtaaggtaaaggggtaacgtctgccatgtcgtaaacggcccattcgatttgttggcgaataagggctgtgctacgctttttggtaacgacgcggcggtttggcatcgttatttttcccccatttccctgtcgagtcttatacccctgtcacgaccggtaaatacggcaaaagctttctgtccctggacaggccttgaggactgaggagggaaaatgcgcggcaaaagcgtgatgctcctggccgggttagcctctctcgcgcaggcgaacgaacttaacctctattcggtgaataccggttcctatgtttaccatctgaccaataatcaaggacaatatacagagaatttcgaaaatcattttttctcagtggagcggaaattctctgcagactccaaatacagccttctgcttggcactatgaataacagcttcaacgatcgctgcctggcgctgggggtgagaagagactggtaccacagcggcagcgggtggaccttcaaaggcgtttacggctataccggcgaattcttcttcgacgcctttgagcattgcggcgatcatggctcctataaagactttaaggacgccacggggatcggcttttcaccctatatctaccacgctatccagtataacttcaccgattatttcgccgttgaaagcggcattattattcccagcgtgtttgtgatcagtatccagtggagcttccgctaaatcgtcccgttgtcggttacaaggtaatcaccttcctgagcagcgtactggagagcgcggcaagggaaatgagcaccgacaggacaaaggtcagcgctattacccccagcttggtggctagcgaatgcacagggatgagcatcaccagcaggtgaaacacggaatagtggaggatataaactccggtcatcgctttactgaccgtcgccagcacggcctctttccactcgcggttctttttaaactgcacggcgttagcggcgatcaccagcaggacgatcaggatataaatttgcgatcccgtgagaatgaacgcattacgatctgctttaaacagggcgaagaagaaatggcgttcataaaaccaggtaaataaatagacaaagggcagggcgataatcgaccctttaatcacctgtgggttgcgtatccactccgcgacctttggatcgttaaacaactgcccggttaaataaaacagtagccatgtccacaggcgatactgcggcggcaaactgaaaagatgtctgtccgggtagatcaccgagagcaggtcgtaaccgtaggagcagcacagcagcgtcaggagcacggcgaaaaagagcccgcgccgctggctgagccaggcgatcaaaggatgaaaggtatagatgacaatcagggcgaaaataaaccagggctggatcaggtagccgcgctggtaaggctcccagacataatagaccgtcacccaaaacagaaagacgatgaccacgcttttaattttaccaatttgccagttggcatcgtggcgcgtctgcgcatcaagatagccggccacgacaaaaaacagcggcgtcgcgatggtcgagataaaggtcagcagcccgaggatccagtgatagtcataatcaaagcgatcccaggtgttatagatggtgaaaaaggtcaccgctgtcatacagcctaatgtcttgataatgctcagaccggtactgttcatcgttgaggcgtcatatccttatggtgaaagcaggcgtaaataaccggcagaaccagcagcgtcagcacggtggcaaaggcgaggccgaacatgatcaccaccgccatactctggaaaaagacatcgcgcagcagcggggccaggccaagtacggtggtgaaggcggtcagcaggatcggccgcagacgagaggttgccgcatcaataatagcttgtcgttgatctttctcctgtttttcttgctctatctcttctaccagcacaatgccgttacggatcagcataccgctcaggctgagcaagccgattaaggccataaagccgaaggggatgccggtaagcagaaagccgggtgtgaccccgatcagcgccagcggaacggtcagccagatggcgacggcgtttttcagcgaactgaacatcagcaccgttatgataaacatcaccagatagccaagcggcagggttgtaaacagcccctgctgcgcctcactggagttctcggcatcgccgccccattcgatacggtagccgtggggcagcggcagtgcgtcaatgcgcggtttcacccgcgcgagaatatcacccgaggtttggccgcttagcgggctggggtcggtctggaccgtcagcacccgggtacgatcccggcggaggatcaacggatcttcccactccagggcgaaaccattgctgacgttactcagcgggatatattgctggcgactctggctccagaccagcacattattcagatggttggcatcctgacgttctgcttccggcggccggacgatcactggcagcagatcggccccttcacgatataacccggcgcgactcccggagaaattcatctccagcgcgttatcaatatcctgtttatccacccccagctcgcgtcccagcgccggggaatactgcgggcggatcactttgctgcggttctgccagtcattacgcacgctgtcggtcgccgggtccgcggcgaggatatcgcctacctgactcgccagcgcgcgcagcgtatccgggtctgggcccttaatgcgcacctcaatcgcgctatctccggaggggccgaacataatgcgtttggtgctggcgttaacctgcgggtagtatctggcaatccagtcctccacgtggcgggtgacaggggcgatgccgcgttgatcatccatccgcaccataatctgcgcgtagttgctgtactggcgctgcccgctgtaggtgagaatgaaacgcatactgccctggccgatggtggagacggtggtgaccacccccggctgaccggctatcgaccgctcgatatcccgggtcatcttctccgtggcgtttatatcggtaccgtagggtagccacaggtcgacaaagaatataggcgtattcgatgacggaaaaaaattctgccgaacaaaggtaaagccccagatcgctccggctaacagcgcgcccatcagcaccagggtcagggtcttttgctgcagcagtattcgcagcgcctgctgatagccacggtaaaagctgccgcggtaaggatcggccttttcctccgcggcggcggccgacggggcgtttttaaacagccaccacttaataagcaccggggtgatggtcagagcggaaaaccagctcagcatcagggagatcagcagcacctggaacagcgatttgcaatactccccggtagagtcctgggagaggccaatcggcgcgaaggcgaggatggcgatgatcgtcgcgccaagcagcggcagggcagagcgacggatcacatagttaatcgcgcccagcagcggagagccttgctgacgggcgatgagcaccccttcgacaatcacaatggcattgtccaccaacatactcagggcgatgataagcgctccgagggagatccgttgtagttcgatcccccagatatacatgataagcagggtgccgagaacgttgagcgccagcgacagagcaataataatcccgctgcgcacccccataaataccagcagcacgccgacgacaatcgccagggccatcagaaaattggtaataaagccattgaccgagtgggcgacctcagctgcctgatcgtaaaaaatagcgatgtcgatgcccgccggtttgtcggcggccatctgctggaggcgggcctcgagagcgtggccgacgtcaataacgttgacgcctgggataaaagaaactcccatggtcaccgcctggcgcccgttggcatgatagatactggccggcgagtcggttagcccgcgcgacagcgtagcaatatcccgcagtcgggtggtggcgctggcgccgtgagggctgaccagtagatctcccagctcatcgatgctctgaaactcaccggtggggtggaggcggatcgattcgctgccaacgcggatctccccggcgctggacaccacgttgagtcgggccaggattgcggcgagctggttgagggtgatcccgcgcgccgtcatcttcgccagcgagatatccacattgatctgctgcggaatgacgccgccgatagcgactttaccgacccccggcaccagcaccagctcccggcgcaactgttcggcatagcgcaccagctccgggttggtaaaactgtcgcccgagatagcgaagaaaaagccaaacacatcgccaaagtcatcgttgacgaaaggggggactacgccaggggggaaaaggcggctggcgtcaccgacccggcgacgtagctcatcccagatttgcggcagctcgctggaatggtactgcgaagcaatattcaccgtaatttgcgataagccattcgaggagatggagctgacgttatccagcgagggaagctgctgaatcgcgttttccagcggcagggtaacctcctcttccacctgctgagcggacgcgccagggtagtgggtgacgatcactgccgttttgatggtgaaggcgggatcttccaggcggccgatattgagcagggcgaacaggccacccacccctaacagcaaaatggctaaccagacgcgggtcgggttgttaataaactgacgggaaatatccatttataatcctcgttcacgcgtccagacccgcaccggctgcccggcatgcagctcgctcacgcccgccgcaaccacctgttcacccgcgcggagaccgtcggtgatcgccactccctgcgaagtcacctcgccgacggtgaccttacgctcctcaagatatcgatgcgcgttatcgcctttcaccacccagactaccggctcgttctttggccggttatcggggttaaacaccgcctccgctggcacaatgagggtttcccgtccggcgctggccggtaaattgccgagattgaccgtcacggtgccgctgaccccgccgacggcgggaaaatcatctggccgcggcatggttaacacgatctgccaggtgagggtgctattgtcgctgctgccggtatgctctttgtattccgcggtaaactcgcggcccggcagggtattgaacctgacgacgggacggtaggcggtattgcggatatccagggaggtgaacagattttcgggaatgctgaagaccacatccagcaggtcggtccgcgtcagggtgatcaccggttggccggcggcgaccacctgatggttgcggatatgcacgccggcggcaatcccgctaaagggcgcgatgaggctcatttgcgccagctcttcgcgagcgatttttaaggccgcattggcggcatcgcgattggcgcgctgcacgtccatctccgcctgggaaatcgcctggcgcccggccagagtctggaagcggtcgaactgacgctgggcgagagtggccgccgtttgccgctcattgacccgttgctgggcctcgcgggcattcaggcgcgccagcgtttgcccctgggcgacgcttgccccctgacgaatatctagcgactccacctggccaccccgcttaaacgacagttcggtggaatcgccagactcaatgcgtgccggaaacgttcgctgctgggtattgcccacggcggtcacctgcgccactttaaccatgcgcggggcggactcgacggtgggtgctttctgatcgcaagcggttgtaaatataataacaaccgggatgagagaaaaataacggttcacaatattcccctcagattcaggatttattttacatttttattacatggcgcctgcttattctgcgagagcggcgacgaccagataagtgaagagccccaccgctgtgcaggcgacaatggccagcgcgacaaacaaacccaggcgtaacaggctataacccaacataatttcctccctttactcccacccgaaccgtgaatgtcatttaattcggcccccactgtgaccaccggacattcggagcggcatgcctgcttgtaatcagcatagtcggagaaaatatgaagtgttaaaaaagagaatgccgcgagcgttggcggcattaaggggaaagcgcaggagatccgcagagaatatgcggtttttataatatttttcagtctattaatccgccattttctaatgttaattttcctgtgctacgtttaataacatctattccgctcgccgcttctgttgttgagatttcgttcctccccaagtaaggggctattcatcactacgcattgtattggtaataaaaggattatctcatgtataaaaatatcgttgttcccgttgacgtgtttgatgcgggcctggccgacaaagcgctctctcatgcgaaattcctcgcccaacattctgccgggcaaattcatcttatccatgttattccggccttttctcctgtattaacccgcggatttatctctgatgcccgaaagatggaagaccatttgcttaataccgctaaggaaaagctgagcgagctggtgaagaaaaatgggcttgcggaagacgccagccatctttatgtgcgcagtggcaatgttcgcgatcaagtgattgccctggccgatgagctgaaagcggatgtggtgattgtcggttcgcgcaatccggggatccagactcatttgctgggctcggaagcggccaatatcgtgcgctatgcccatgtaccagtgttcgttgtgcgctgatgatggcgggatgtcgccctgacttccgcttcagaaatcgagggaaagagtatgaatacagataaaccgggggcgccctattatcagcgctccgtcgaggagactctcgccagcgtgcagagttcgccggaagggattagcggaacagaggcggctacgcgcctgcagcagtatggcgaaaacgccctgccgcagaagccgggtaaacccgcctggctgcgttttattgcccattttaacgatgtgctgatctacgtcctgctggcggcagcgttgctcaaggcggtgatgggccattggatcgacatggcggtgatcctcgccgtggcggtggtcaatgcgctgatcggcttcattcaggagagtaatgcggaaaaatcgctgcagagtatccgcaatatgctgtccagcgaggcggtggcgatccgtcagggcaaccatgaaaccatccccaccacctcgctggtacctggcgatatcgtggtgatccgcgccggcgaccgtatccccgccgatctacgggtgattgaggcgcacaacctgcgggtggaagaggcgatcctcaccggcgagtcgacggtggtggaaaaaaccaccgagccgctaagcggcgatttaccgctcggcgatcgcagcaacctgttgttttccgggaccaccgttagctcaggggcgggaaaagggatcgtggtggccaccggcggcaataccgagctgggccatatcaaccaaatgatggcgggcattgagaaacaccgcacgccgctgctggtgcaaatggacaagctaggcaaagccatctttatccttattctggtgatgatggcggcgctgttcgtctttagcctgctgttccgcgatatgccggtctccgaactgatgctgtcgttgattagcctcgcggtggcatcggtcccggaagggttgccggcgattatctcgattattctgtcgctcggcgtacaggcgatggcccgtcagaaagcgattatccgcaagctgccgacggtggaaaccctcggcgcgatgacggttatctgctcggataaaaccgggaccctgaccatgaacgaaatgacggtgaaggcggtgatcactgccgacagcgtctatcgggtggaaggggatagctatgagccggtcggtaagatccacgccattgacgatccgacgccggtcacgatcgcgcccggctcgctgttcgagcgctatctgcgcaccatcgatctgtgtaacgacagccagcttatcaaagaggagagcgggctgtggaaaatcaccggcggcccgaccgagggggcgctgaaggtgctggcggcgaaggtcactctgccgccgctgaccagcgaactgcgcagtaaaattccttttgattcgcaatataaatacatgtcgaccctctaccggctgggtgaagaggaggtaatgctggtcactggcgcgccggatgtcctgttccgcctgtgccagtatcagcagagcgacagcggattgcagccgctggatctcccgtactgggaaggcaaaattgaagagtacgcccgggaagggctacggatggtggccgcagcctggaagccggctgccgcaggccagaccgaactgacccatcaggatctgcagcaaggggtgattttgctaggggtcgccgggatgatggatccgccgcgtccggaggccatcacggcgattgccgactgcctgcaggccgggatccgcgtgaagatgatcaccggcgaccacccgcaaacggcgatgagcatcggcaagatgctggggattggcaatgcgggaaatgccattaccggacgtgagctggaggtgatggacgacgcgcagctgagcgtagccgcgcagcagtttgatatcttcgcccgcaccagcccggaagataagttccgcctggtgcaggctctgcagagtaagaaagaaattgtcggaatgaccggcgatggggtgaacgatgccccggcgttgaagcaggctgacgtcggcgtggcgatggggatcaaggggaccgaggtgaccaaggaggccgccgatatggtgctgaccgatgataacttcgccaccatcgccagcgcagtccgcgaggggcgccgggtgtatgacaacctgaagaaaaccattctcttcgtcatgccgaccaaccttgcccaggggttactgatcgtgatcgcgctgctggcgggcaacgtactgccgctcacgccggtgttgatcctgtggatgaacatggccacctccgccacgctgtcgtttggcctggcgtttgaagccggtgagaaaaatattatgcggcggccgccgcgcgatccgaaaattcacgtgatggacggctttgccatctggcgcgtagcgtttgtggggtcaatgattgcggtcagcgcctttattctcgaagcctggctgcagccgcgcggctattcgccggagtttattcgtaccgtgctgttgcagactctggtcaccgcccagtggttctatatgctgaactgccgcgtatcggatggattctcgttaaccaaaggtctgctggccaacaaagggatctggatcgtcagcggcgtactgctgctgctgcagctgctgattatctacgcgccttttatgcagatgctgttcggcaccaccgggctgccgttccgctactgggtgatcacctttatcatcggcttcgccatgttcctgatcgtggaactggaaaaaccgctgacccgcaaatggcgttccgcctgacggcgtgaagcgctgaacgaaaaagaaaagagggggcatcgccccctctctggctgacgacaaacctgtttcgtcattgtgctcgcatttctgccgggtggcggcattcgccttacccggcctacgaaagacttcaatatcaaaccgttatgcagttatctgtaggcccacgcaagcgcagcgccgccgggcaattcctgaagattgcacgttgtcagcagtttgagagagggcatcgccctctcttttattatggttcacgcttgttgcgctttactgtttcggctcggcgaccacggtgcttcccacgccgcggttattgtactcccacatgcggttgaagccgttgtcgttgaggttgcgctgcagattgcctttgtcatcggcgctgccggtgttgccgctgaacgggcggccggagcctaccgccgccgcccacggctgggcaatattaaagccttcattgatagcgctgtcgcggatcaccacctggccgttgctgttgccatcgacgtccagcgcgcggccgagctgcgcgacgttatccccggaggcggtgaagcggctgttggtcgccaggaagccgtaggtcacgctcttcagagtagccggcgcgaagacgtaggcctctttctgggtacgggaattcaccacgcggaaatcggtgttatcaaacaccaccgcgccgcggccggaaacgatatccacatcgccttcaatgtagctgttggtcaccagggtgcgggtctgacggttgtcctgcagacggttttgcacgccgctgttggtcacgaagaaggtgttttgacggccaagaatattgaccttattgatctgcacctggtcgccatcgctgcgcaatgccaccgcctggtgggtaccggcgtcaacgctgtcgccgaggttgttggcgatggtcaggttctgcagctgcagaccattattctgtgaccagaagactgcggaacacattacgccgacggtcgccgcggatttgctttggcaactgtcgaacatataccacgccggtttacccggcatatatttaccgcctggattgaccagacgacgccaggtgttgcgatccatctcggaatcaatggcttcgctgattttcacgtcgattggcttatcgccagtaccatacagggtcagggcgcccggcgccgccggaacgtagacggttcccgggtactcgcccggcataatcgcgatatacagacgacggttagagtgacgggcaattgccgcatccaccgccgcctgaatggtggtatgggttacgccctgggttcccgcagggccgacgataaagtcaggctgcgccggcaggctgatagcagacggcgtccaggcggcggcgttgggagccagcgactggaaataggccgccggcgtgaagtttttcgcttcttcggcgttgagtatgggacgcgcggtagtgcccggtgcagtctgcgttgagggctgttgatcggcaggcgtcgagctacaggcggacagcgtcacgccgaaggccagcgccagcgccagacgggaaacggaatatgtgttcatgttgctccgggcaaaattaagcgtaatgaaataccccggctgaaacgccagggtataagtcctttaaaacctgctgttttatactaacttgaacgaaacgggaagacgtggacggaaaaacttaccgtctttacgcaacgcgcagccctgccggatggtctttagtcacaaaaaaataacatttccctgcgctattgttgactttaccggcgttatgaaaataaatgtctatacaacccatgacaagttaagcgctatgactgaagccacttccgaactcgttatctggcgaaacgggcgtctcgccaccctgaaccccgatcacgctcaaccttacggcctgctggagcgccatgcgctgctggtgcgcgacggccgcatcgcggcgattgtcgccgaagatgacgtccccagcgggcgcagtatcgatcttgaaggccggttggtaacgccgggattaatcgactgccacacccatctcgtcttcggcggcagccgggcccaggagtgggagcagcggctgaacggcgtgtcgtatcaaaccatcagcgccagcggcggcggcattaactccaccgtgcgcgccacgcgcgacagcagcgaaactgaactactggcgctggcccagccgcgtctggaacgcctgctgcgtgaaggggtgaccaccctggagatcaaatccggctacggcctcgacctgccaaacgaacgcaaaatgctgcgggtcgcccgacaactggccgatcataatggcgtggaactgtcggcgacgctgctctccgcccacgccacgccgccggaatatcaaggcgatgctgacggctatattacgctggtctgcgagaccattttgccgacgctgtggcaggagggactgtttgaaagcgttgacgtcttctgcgaaaacgtcggcttcagcccgcagcaaactgagcgcgtctttcaggcggcgcaggcgctgggcattccggtaaaaggccacgttgagcagctctcgtcgctgggcggcgcgcagctggtgagccgttatcatgggctttccgccgaccatatcgagtatctgacggaagagggcgtggcggcgatgcgcgaaagcggcaccgtggcagccctgctccccggcgcattctacttccttaatgaaacccgtaaaccgccggtcgagctgctgcgcaagtaccaggtgccgatggcggtggcgaccgatttcaaccccggcaccagccccttcgccagcctgcatctggcgatgaacatggcctgcgtcaagtttggcctgacgccggaggaggcgtgggccggggtgacgcgccatgccgcgcgggcgctggggcgccaggccagccacggccagctggcgccgggctttgtcgctaacttcgccatctgggatgctgagcatcccgtcgagatggtgtatgagccggggcgcagtccgctctggcatcgcgttgttcaaggagaattgcaatgatgctgtggcaagctacgccagccagtctctggcagggacgcgacgacagcgcggaagcgcccaatgcgctgcgcctgttccagaccatcgcccgcgcggaacgcttcgcgccgcaggagatgcccggcgatatcgcgctgctcggcttcgcctgtgacgaaggggtccggcgtaacaaggggcgtaccggggcagcggacggcccggcgaccctgcgccgggcgttggccaatatggccagccatcagggtcatgaccgctgcgtggatatgggcaccatcagcgtcgacggcgagcagttagaagtcgcgcatcaggcgctgcgcgaggcggtggccgactgtcagcgggcgggtaaacgcacgctggtcctgggcggcggccacgagacggccttcggccacggcgctggggtactggatgccttcccgggcgaaaaagtgggcattattaatctcgatgcgcatctggatctgcgctttgccgactgcgccagctccgggacgccgttccgccagttggcgctggagtgtgacgcgcagcagcgcggttttcactatacctgcatcggggttagccgggcggcgaacacccaggcgctatgggatgaagcggcgcgccgccaggtggctatcgttgaagatctggaggtgctgacagccttcgaaactcgcgtattgccggagcttgagcgcaatatcgcgcaattcgaccgtctgtatctgactatcgatctcgacgtgctgccggcgcgagaaatgccggcggtgtcggccccggcggcgctgggcgtgccgctggccacgctgctgcgcatcgttgagccgctgtgccgcagcggtaagctgcaggcggtggatctggtggagtttaacccgctgtttgacattgacggtcagggcgctcgcgtggcggcccgtgtggcatggcaaatcgcccattggtggcgctagcgatccgcgctattattttcgtttcgccgctccgcttattacgcataaggaaagccaggccatgtttgcacaacaacctcgttccgcgcccgcgcctttctatgaaaaggtgaagcaggcgatcagcgaaaagatccacagcggcgtctggcgaccgcatgaccgtatcccgtcggaagctgagctggtggcccagttcggcttcagccgaatgaccatcaatcgcgcgctgcgcgagctgacggacgaaggcctgctggtcaggttgcaaggggtgggaacctttgtcgccgagccgaaagggcagtcggcgctgttcgaggtgcgcagtattgccgcagaaattgtcgcccgtcaccatcagcaccgctgtgaggtactcctgctggaggagacccgggcggatcatattcaggcgacggcgctcagcgtcccggaaggcacccgcatttttcactcgctgatggtgcattacgaaaacgaggtgccggtgcaaatcgaagatcgctgcgtcaatgccgcagtggtcccggactatctgcatcaggactacaccgccaccacgccccatgattacctgtcgctgatcgcgccgttaactgaaggtgaacacattgttgaagcggtgcaggccacggcggaagagtgcgcgctgctgcatattcacgcccacgatccgtgcctgctgatccgtcgccgcacctggtcgacaacccacatcgtctcccacgcgcgcctgctgttccccggtagccgatatcgtctgcaggggcgctttggctcctgatccacgctggcgtcagcaaaacgtgattgctgacgcaatataacaaaattgtatcatttctgttaaatcctggcttgcgcatgcttgtatagacaagtatatgtatctacgtaaacaacgttcattgtcaggagaaaccccgatgtcgcaaagcaaatatcgccagctggacgtccgtgcgccaagaggcacgacgctgaccgcgaagagctggctgaccgaagccccgctgcgtatgttaatgaataatcttgatcccgatgtcgccgaaaacccgcacgagctggtggtctatggcggtattggtcgcgcagcgcgcaactgggaatgctatgacgctatcgtgaaggcgctgaagaacctggaaagcgatgaaaccctgctggtgcagtccgggaagccggtgggcgtattcaaaacccatgaaaactcaccgcgcgtgctgatcgccaactccaacctggtcccgcactgggccacctgggaacactttaacgagctggatgccaaagggctggcgatgtacggccagatgaccgccggcagctggatctacatcggcagccagggcatcgtgcagggtacctacgaaaccttcgtcgaagccggtcgccagcactaccagggcagcctgaaaggccgctgggtattgaccgccggtctgggcggcatgggcggcgcgcagccgctggccgcgacgctggccggcgcctgctcgctgaatatcgaatgtcagcagagccgcatcgatttccgtctgcgtacccgctacgtggatgagcaagccacctcgctggatgacgccctggcgcgcatcaaaaaatacaccgccgaagggcgggccatctctatcgcgctgtgcggcaacgccgcggagatcgtaccggagctggtgaagcgcggcgtgcgcccggatatggtcaccgaccagaccagcgcccacgacccgctgcatggctatctgccgaaaggctggagctgggaagagtatcagcagaaagccgaatccgacccgcagggcactattctggcggcgaaacgctcgatggccgatcacgtgcaggcgatgctggccttccatgagatgggggtcccaaccttcgactacggcaacaacatccgccagatggcgcaggaagtgggcgtcagcaacgccttcgatttcccgggcttcgtgccggcctatatccgcccgctgttctgccgcggtatcggcccgttccgctgggtagcgctgtccggcgatccgcaggatatctacaaaaccgacgcgaaagtgaaagagatcatcaaagatgatcagcatctgcaccactggctggatatggcgcgcgagcgcatcagcttccagggactgccggcgcgtatctgctgggtcggtctggagtggcggcaaaagctcggtctggcgtttaacgaaatggtgcgcagcggcgaagtctccgcgccgatcgtcattggccgggatcaccttgactccggctccgtcgccagcccgaaccgcgaaaccgaagcgatgcgcgatggttctgatgcggtctccgactggccgctgctcaacgccctgctcaataccgccagcggcgcgacctgggtgtcgctgcaccacggcggcggggtaggcatgggcttctcgcaacactccgggatggttatcgtctgcgatggtaccgatgaagcagcggcgcgtatcgcccgcgtcctgcacaacgacccggccaccggcgtgatgcgtcatgccgacgcgggttacgatatcgccattgaatgcgcggcggaacagggtctgaatcttccgatggttgcggcaacgcaggggaacgctaaatgaaatctttaactttgatcccgggtcaactcagcctgtcgcagctccgcgacgtttacagccacccggtaaatattaccctcgacagcggcgcgtttgccgccattgacgagagcgtggcctgcgtcaacgccatccttgccgaagggcgtaccgcctacggcatcaacaccggttttggcctgctggcgcaaacccgtatctcgacggaagatctggagaacctgcagcgttcgctggtgctgtcccatgcggcgggcgttggcgagccgctggacgatgatctggcgcggctgattatggtgctgaagattaacagcctgtcccgcggtttctccgggatccgcctgagcgtgatccaggcgctgattggcctggtgaatgccggcgtgacgccgtggatcccggccaaaggctccgtcggcgcttccggcgacctcgcgccactggcgcatatgtcgttgaccctgctcggagaaggtaaagcgcgggtacgcggcggcgactggctgccggccaccgaagcgctgcgtcaggtggggctggagccgattaccctggcggcgaaagaggggctggcgctactcaacggcacccaggcctcgaccgcttttgccctgcgcggtctgttcgaagccgaggatctgttcgcctccgcggtcgtctgcggggcgttaaccaccgaagcggcgctgggctcacgtcgtccgtttgatgcgcgcatccatgaagtgcgcggccagcgcgggcagattgatgcggcggcgttgtatcgccacctgctgaccgacgatagcgcgatctcgcagtcgcaccataactgcagcaaggtgcaggacccgtactccctgcgctgccagccgcaggtgatgggcgcctgcctgacgcagatccgccaggcggctgaggtgctattggctgaagccaacgcggtctccgataacccgctggtctttgccgccgaaaatgacgtcatctccggcggtaacttccatgccgaaccggtggcgatggccgcggataatatcgcgctggcgatcgccgaaatcggctcgctctccgagcgccgcatcgcgctgatgatggacagccatatgtcgcagctgccgccgttcctcgtcaaaaatggcggcgtcaactccgggtttatgattgcccaggtcacggcggcggccttagccagtgaaaacaaagcgctgtcgcacccgcatagcgttgacagcctgccaacctctgccaaccaggaagaccacgtctcgatggcgccggcggccggtcgccgcctgtgggcgatggccgagaacacccgcggggtgctggccgttgagtggctggcggcggcacaggggctggatatgcgcgaaggactgaccaccagtccgctgctggaagaggcgcgtcacttgctgcgcgaacgcgtgccgcactatacgcaggatcgctacttcgccccggatatcgataacgccattgcgcttctggcggcccgtcacctgacgcgtctgctgcctgccgtactgcattaatcaccgttgttctctgtacccgcgtcgggggaagtcattcccccgaccgccctacaccgcatatttgtcgtcatataaaaaaatcaggacacctgtatatgcaacaacaacacaagccacatctgctgcgcgggctcaatgcccgacacattcggtttattgcgctcggctccgctatcggcaccgggctgttctatggctcggcctcagccatcaaagcggcgggcccggcggtgctgctggcctatctgatcggcggcgcggcggtgtttatcgtcatgcgcgcgctgggcgagatggcggtgcgcaacccggtttccggctccttcggcagctatgcccgccagtatctcgggccactggccgggtttattaccggctggacctacacctttgaaatggtgatcgtcgccctggccgacgtcaccgcattcggtatctatatggggttgtggtaccccgatgtgccgcgctggatctggatcctcagcatcatcttctttatcggcgcgatgaacctgtgcaacgtgcgggtatttggcgagatggagttctggctgtctctggtgaaggtggtggcgattatcgccatgatgctggcgggggcggggatcatcttctttggctttggccacagcttcccggccaccgggctggaaaacctctggagccacggcggctttgcccctaacggctggcagggcgttatcgcctcgcttggcatcgtgatgttcgccttcggcggggtggagattatcggcgtcaccgccgcggaagcgaaggatcctaagaaggtgatcccgcaggccatcaataccattccgctgcgcattatcctgttctacgtctgcaccctggcggtactgatggcgatcttcccgtggaacagctttggcgaacaggggagtccgtttgtgcttattttcgacggtctggggatcccggcggcggcgaccatccttaacatcatcgtgatcagcgccagcatctcggcgattaacagcgatatttttggcgccagacgcatgatgtacggcatgtcgaaagaggggctggcgccgaaaagcttccagcgcatcgccagcaacggtgtgccctggatgacggtggtggtcatgggcggcgcgctgctggcggcggtggtattgaactatctgatccccgagcaggtatttgtgctaattgcttcgctggcggcattcgccacggtatgggtgtggctgatgattctgctatcccattttgccatgcgccgcggtttgtctgccgaagagcgcagccagatcgcctttcccattccgttctggccggttgcgccgctgttgacgctgctgtttatggggctggtcatcgccgtactagggatgtttgccgaaacgcggatggcgctgatcgccggcctggtctggctcgggctgctgacggtggtgtggtatgcgcgggtgcgtaaaacggcgctgcaggtagccactgaacagtaagatcaatttccccggtggcgctgcgcttaccggggctacaaatggcacggaccgtaggccgggcaaggcgtcagccgccgcccggcataaaagcggctccgtgcccgcggcaatcgcccggcggcgctgcgctagcatgggcctggggggagtgtagatactgctatcggcttgtaacggttttaatccggtaaaaacagttgttttgtattaattccgagcacattgcgctcccgaaatgtcttctacgttatgttactcatggcgcagggagcgcacagggggcggccagtcgccgccgccccctgtacgcccgggcttcggccagcaacatcgccactgcgtggtgccttcgacttatccctgcaggcttcgggtcgggccgaggcagcgtccttgcaaaacacggccctcagcccgcatccatgcgggctgccccggccttccgggaacgtctcagcgatgttgaggccgccagccccggcagtttcagcggccccatgtttggcggcgattcacatactgggtctggaccccgtaggccgggtaaggcgtcagccgccacccggcaaaataaccgcgcaatagcaccgtaggccgggcaaggcgtcagccgccgcccggcataaaagcggctccgtgcccgcggcaatcgcccggcggcgctgcgctagcatgggcctgggggtagtgtaggtcgggtaagcgcagcgccacccgaaaaacaaatggcgcctcgggtaccccggataaggcgcaagccgctatccggggaagattaactgaacagggcggtgatggaggcgctggcgagggaatggaaatggacgttaaagccgaccatcgcgccgctggcctcagcatccacctcaattttctcgacgtccagggcgtggacggtgaagatatagcggtgggtttcgcccttcggcggcgccgcgccgccgtagcctgccttaccaaaatcggtgcgggtctgaacggcctcttccggcagctccgcctgaccggaaccggccccttgcggcaggacgcgggtatcggccggcaggttagcgaccacccagtgccaccagccggagccggtcggcgcatccggatcgtagcaggtcaccacaaagcttttggttcccgcgggcacatcatcccacatcagatgcggcgaaatattgtcgccatcgtagcccatgccgttgaagacgtgacgattaggcagcttaccgccgtcctggagatcgtgactgatcagtttcatgcttcatcctcattgataatgcgctgattaacaaagaagtgtagccttcccgacgacgcaattccgctatttattcgctaaaaaatgtttcgtcctgcactgcctggttgaccgcacgggtcaggcgggtcagctgctcgggcgtgatgatgtacggcggcatcagataaatcagccggccaaacggacggatccagactccctgctcgacgaaaaagcgctgcagggcggccatgttgaccgggcgacgggtttcaaccacgccaatagcgcccagcacgcggacgtccgcgaccagcgcagatccccgcgccggggccagctcggcctgcagctgggcttcaatcgccgccacctgcggctgccattcgccgctctccagcaggcgcaggctttcgctggccaccgcgcaggccagcggattgcccataaaggtggggccgtgcataaagcaaccggcttcgccattgctaatggtttcagcaaccgttcgggtagtgatggcggcggaaagggtcatggtgccgccggtcagcgctttgcccagacacagaatgtcggcggtaatcccggcgtgttcacaagcgaacagcttgccggtgcggccaaagccggtggcaatctcatcggcgatcagcagtatcccttcccggtcgcacattttacgcacccgcttcagccactccggatggtacatccgcatgccgcctgccccctggacgataggttcgaggatcaccgcggcgatttcatgacgatgcgcggccatcaggcgggcaaacggcaccatatccatctcgtcccactcgccgtcgaagcggctttgcggcgcgggggcgaaaagattatccggcaggtagccctgccacaggctgtgcatcgagttctgcggatcgcagaccgacatcgctccgaaggtatccccgtgatagccgttgcggaaggtcagaaaacgacgacgtggttcgcctttagcctgccagtactgcagcgccattttcatcgccacctctaccgccactgaaccggagtcggcgaggaaaacgcactccagcgaggccggggtcatcgccaccagctgacggcatagcgctactgccggcggatgggtgatcccgccgaacatgacgtgcgacatttggtcaatttgccccttcagcgccgcattgaggcgtgggtgattgtagccgtggatcgccgcccaccaggaagacataccgtcaaccaactgttcgccgccggcgagggacagctcgcaaccgtgggcggacaccaccgggtagaccggcaggggggaagtcatagaggtgtaggggtgccagatgtggcgccgatcgaaagcgagatcgtccagtgtcataagcgacttgtaaaccattttgaaaacatttaggtttacaagtctacactgaacttacttacaatgaaacgtacacaaaatatttcgcgcagcatcgaggcggcaagcgagaacatccccaggagcatagttcactatgtgactgggaggcgcgagtgccgccaacaaagaggctgtgtgaaataggaagtgtacgaccttttggagaggaaaatggctcaccaacctcgctggacaatgtcgcaagtaacggaattatttaataaaccgctgatcgatctgctattcgaagcacagcaaatccatcgtcaacactttgatccgcgccaggtgcaggtcagcaccctgctgtcgatcaaaaccggcgcctgcccggaagattgtaaatattgcccgcagagcgcacgctacaaaaccggcctcgaagccgagcgcctgatggaggttgagcaggtgctggaatcagcgcgccaggcgaaaaacgccggctccacccgcttctgtatgggcgcggcgtggaaaaaccccaatgaccgcgatatgccttatctggagcagatggtgaaaggggtgaaggcgctggggctggagtcctgtatgacgctcggcaccctgaccgacagtcaggcgcagcgcctggccgaagcgggcctcgattactacaaccacaaccttgatacctcgccggaattttacggcaacatcatcaccacccgcacctaccaggagcgcctggatacgctggataaagtgcgtgatgctgggatcaaagtctgctccggcggcatcgtcgggctgggagagagcgtaaaagatcgcgccggactgctgctgcaactggctaatctgccaacgccgccggaaagcgtaccgatcaacatgttggtgaaggtcaagggcacgccgctggcggataacgacgacgtcgacgctttcgatttcatccgcactatcgccatcgcgcgcatcatgatgcccacctcctacgtgcgtctctccgccggccgcgagcagatgaacgagcagacccaggcgatgtgctttatggccggggcgaactcgattttctacggctgcaagctgctgaccacgccgaacccggaagaggacaaagacctgcagctgttccgcaagctggggatcaacccgcagcagacggcggtgctggaaggcgacaatgagcagcagcagcgtctggagcaggccttactcaccccggacactgaggaatattacaacgcggcggcgctatgagctggcagcagcgaatcgatcgggcgctggatgagcggcgggcggcggaagcttttcgccgccgcctgccggtgacgcacggcgccgggcgctggctggagcgggaaggggagcgctggcttaacttctccagcaatgactatctgggcctgagtcagcatccggcgattatcgccgcctggcaacagggggccacgcgctatggcgtcggcgccggcggctcgggccacgtgagcggctatagcgaagcccaccgcgcgctggaagaggcgctcgccgactggctgggctatccgcgcgcattgctgtttatctccggctttgccgcgaatcaggcgctgatcgccgccctggtggagaaagacgatcggattgtcgccgaccgcctgagccacgcctctctgctggaggcggcgagcctcagcccggcgcagctgcggcgctttacccacaacgatccgcatcagctcgcgcaactgctggctaagccgctggcgggcgaacagttggcggtcactgaaggcattttcagcatggacggcgacagcgcgccgctggcggccattcacgccgcgacgcaggcagcaggggcagtgttgctggtggatgacgcccacggtgttggcgtggtcggcgacgaaggacgcgggagctgcgccgcgcaggcggtgcgccctgagctgctggtggttaccttcggcaaggccttcggcgtcagcggcgcggcggtgctgtgcgacgaagcaatggccgattatctgctgcagtttgcccgtcatctgatctacagcaccgcgatgccgcccgcccaggcggtggcgttgagcgctgccctggggatcattcgcagcgatgaagggcagcagcgtcgcgacatcctggccgcccgcatccgtcagttccgtgagaggatgggcgaggtgtcgctggggttgaccgactccgtcagcgcgatccagccgctgatcgtcggcgacaacgcccgggcgctgaacctggcctgccgtctacgcgacgcgggctgctgggcaacggcgatccgtccaccgacggtgccggtcggcagcgcgcgtttgcgcctgaccctgacagccgcccatcatgctgaagacattaaccgtttactggaggtgctgcatggccacagtgaataagcaggcggtggccgcggcgtttggccgggcggccagcggctatacgcaacatgatgaactgcagcggcgctgcgccgatctactgctgcgccagctggcgcgccgcgattttgcgcaggtgctggatgccggctgcggccccggcagtatgagtcgctattggcgtgaggcgggcagcgtggtgaccgcgctggatctctccgccgggatgctcgcccaggcgcagcgtaacgacgccgcgcagcattatctgctgggggatattgaggcgctgccgctgccggacgcctgcgtcgatctggcgtggagcaatctggcggtgcagtggtgcgacgatctacgggcggcaattggcgagctgtaccgggtggcgcgtcccggcggcagagtggcgtttagcacgctgctcgccgactcgctgccggagctcaatcaggcgtggcaggccatcgacgaccggccgcatgccaaccgtttccttagcgaagcggcggtgcgcgcggcgcttagcggcctgcgcgcgaccggcgaggttcatcagattagcctgccgttcgccgatgcgctgagcgctatgcgctcgctgaagggcatcggcgccacccatttgcaccaggggcggaccgccgccccgcttggccgcggcaaactgcgcgagctgcagctggcctggccgcagcggcagggcatctgcccgctgacgtattctctttttacaggagtcattgagcgtgactaaacgtttttttgtcaccgggaccgatactgaagtcggtaaaaccatcgccagcagcgccctgctgcaggcggcgaatctgctgggttttcacactgccggctataagccggtggcctccggtagcgagcttaccggcgatgggctgcgtaatgaagatgcgctggcgctgcagcgtcatagtcgggtcgcattgcgttacgaccaggtgaacccctataccttcgccgagccgacctccccgcacatcatcagcgccgacgaagggcggccgatcgccgcggccaggctctccagcgggctgcgtgagctggaaggtctcgccgactgggtgttggtggaaggcgccggcggctggtttacgccgctctcggattccctgaccttcgccgactgggcgcaggcggaacagctgccggtcattctggtggtgggcgttaagctcggctgtatcaaccacgcaatgcttaccgctcaggcggtacgccaggcgggactaccgctggcggggtggatcgccaatgacgtacagccgccgggcaagcgccacgccgaatatctggcgacgctgaaaaaccgactggccgcgccgttcctcggcgaaataccgtggcttgccgatatcgcgcagcgcgacgatctcggccagtatctggacctcagggcgctggatccggcgttatccactgcgccagcagcggctcatccagcgccataatatcgccttcggcgacgttacggccccggtgcaagacacagaagcgatccgccacccggcggataaagggcaggtgctgctcggcgagcagcaccgtcaggccgatatcgcgatttaaccgcaacagcagatccgccagcttttgcaggcagcgcggccctctgccgcgcgagggttcatcaaggatcagcagccgcggctggacgatcagcgccctggccagcgccagctggtactgatcgtcgtcgctcagcgaggcgcctttgcgctgccgtagggcatagagctcgggaaaatgctcataaatctcgccgccgctggcgttagccccgggtttcccggccgccagggcgatgtgcaggttctcttccacgctgagttgggaaaaaatgcgtttatcttgtggcacgtagccgataccaatggcgctgcgcgattgagcggacaggggggtgagatcctgcggcggggcgccaatgtcatgccaggtcatccggccgctagccaccggcaggtggccagcaatgcagttaaccagggtggtttttcccatgccctcgcgtcccagtacgccaatgcactctcccgggcgtagtacaagatcgacattccacagcgaatgctggttgccgtaaaagtgatttactgcctgtaaattcaacatggacgttttctccttatcctggcgtcagggcgacagaaagatgctgcaaaactcttgccaggaaaaagaacgctcggaaaaaagcgctaaacgccgataccatcgggcctcgtcagcgccggggctgcacttttccggtgcccgacgctaaagggtggtgcaaaaagcagcaaaaatcgagcggctttaagcggatagttatcaaaaatagttcgataaaaatttttcgccacgcggttgaccgcaaaaggcgacaggcgccgggcggcggtggtcttgggctgcggacagttatccactattcctgtggataaccttgtgtattagagttagaaaacctgcggtaagctagagcgtacgcggcttgcggctgaattggcgcgaaaggcgtcttttctttaaagatcttaaatatcagcttgttagataaaatcaatgggtgtaagaaaagcgtcatctgctgccataaaagtttcacccgtccgcttgacaaatgttaaaaggtaaaattttctggggataaccctggcggccggaggattattccgtctgacgcgcgttttgcacccagcttgccggccaataagacccttttgtggcgttatcataagtacgcactgtttaaatatccagtataatttattggcaaaaaacggtccggggggtagaattaaacaccggccgctaattcttttttcaggttctgattgatgagtaaatcgtttgtactgcattccgcctttcgcccctccggagaccaaccggaagccatccgccgcctggaagaggggctggaggatgggcttgcgcatcagacgctactgggggttaccggctccggtaaaacctttaccatcgccaacgtgattgccgacctgcagcggccgacgatggtgctggcgccaaacaaaaccctggcggctcagctctacggcgagatgaaagagtttttcccggagaatgccgtcgagtatttcgtctcctactacgattactatcagccggaagcctacgttcccagctcagataccttcattgagaaggacgcctcggttaacgaacatattgagcagatgcgtctgtcggccaccaaagcgctgctcgagcggcgcgacgtagtggtggtggcgtcagtctcggcgatctacggcctcggcgacccggacctgtatctgaaaatgatgttgcatctaacggtcggtatgctgattgaccagcgagcgatcctgcgtcgtctggccgaactgcagtatacccgcaacgatcaggccttccagcgcggcacttttcgcgtgcgcggcgaggtgatcgacgtcttcccggcggaatccgacgatatcgctctgcgcattgagctgtttgacgaagaggtcgagcgtctgtcgctgttcgacccgctcaccggccacgtcgaagggacggtgccgcgctataccatttatcccaagacccactacgtgacgccgcgggagcgcatcgtccaggcgatggaagagatcaagctggagctggcggagcggcgcaaggtgctgctggccaacaacaagctgctggaagagcagcgcttaacccagcgtacccagtttgacctcgaaatgatgaacgagctgggttactgctcgggcattgaaaactactcgcgctttctctccgggcgcgggcccggcgagccgccgccgaccctgttcgactatctgccggcggatggcctgttggtgattgacgaatcccacgtcacggtgccgcagatcggcggtatgtaccggggcgaccgggcgcgcaaagagacgctggtggaatacggtttccgcctgccgtcggcgctggataaccggccgatgaagtttgaagaatttgaagcgctggcgccgcaaaccatctatgtgtcggcgaccccgggcgcctatgagctggataaatccggcggcgaggttgtggatcaggtggtgcggccgaccggtctgcttgacccaatcatcgaagtgcgcccggtggcgacccaggtcgacgatctgctgtcagagatccgcctgcgcacggccatcaacgagcgcgtgctggtcaccactctcaccaagcggatggcggaggacttaaccgagtaccttgaggagcacggcgagcgcgtgcgctatctgcactcggatatcgacaccgtcgagcgcatggaaatcatccgcgacctgcgtcttggcgagtttgacgtgctggtggggatcaacctgctgcgtgaggggctggatatgcctgaggtgtcgttggtggcgatcctggatgcggataaagagggcttcctgcgttctgaacgctcgctgatccagaccatcggccgagcggcgcgcaacgtcaacggcaaggccatcctctacggcgataagatcaccccctccatggccaaagccattggcgagaccgagcgtcgacgggagaaacagcagcgctacaacgaagagcacggcatcgtgccgcaggggctcaataagaaagtggtggatatcctgcagctgggccagggcctggcgaaaaccaaagccaaagggcgcggtaaagcgaaggccgttgagcctgccgggcttagcgctgtggatatgacgccaaaagcgctgcagcagaaaatccacgagctggaagggcagatgatgcagcacgcgcagaacctcgagtttgaggaggcggcgcaaatacgcgaccagctgcatcagctgcgcgagctgtttatcgccgcctcctgattctgggcgcagaccggcggagtggacgtgcggggtatagtgaaggcgcgcttctcttatcgtcctgcttgccagataacaaacatttgagaagaaaaaaggccgcgttgcggccttcttaatgtttgcttaatctcgccaggcgacactatcttcaacctgatgaggatagcgcccatgcaaaaaattaacttccgtgaatatctggcggtcgccaccgccctggtcattattgttgccttcatccatcaatgggtgctgacgttctgacccccgcgctgcgggaatagcacccacgcgcggacccctggccctggctgtcggttatgcaaaaaaaactgggcgtcatgcagctgagcgatgcgcgtgacgatgctccgtccgaggccaatgccgccgtagcgactgtccatgcgcacgaaggctttactgagttcgccgcttttcgcctcatcgatccccggcccttcatcttccaccgccatcaccggcatcaggcccgctttcaccgacacacggatcgtcgacccttcagggctgtagcggtgagcattctccaccagattgcgcaggatcacgcggattaacgtcgcatcgccagagacgacggcctcgttttcgatatccgtcagcagcagccgctgctgacgctgcgccagcatagcctccagttcgtcctgcaggggttttaccacgtcatccagcaacagcacctgctgggagctgccggcggagaaggactggccgacgcgcgccagctgcagcagctgggaaatgctggtggtcatctgatcgagacgctggatcagcgggtcgacgcccatgccatgcactttcgccagcagctcaaggtgcagccgcagcccggccagcggggtgcgtagctcatgcgccacgtcggcggtaaacagccgctcgcggtcgagggtcagattgaggcgggaaaccaactgattcagggcggtggtcaccgccgtgccttcgggcaccgattcgctgagtacgataggagtgaggttgtccggcgtgcggttctccagttcgctttgcagtcgtgaaagcgggcgggtgatcttgcgcaccgccagcatgctgatatacagcgccaggccaacgatcagcaggctcggcaccagcaggctggcaaccgcttcccgtacctcatgctccacatgtttctggttgttgtgcccttcgatggcgctggccaccagcagctggatctgctctttgctctcatgccatagccagaagacgcttatcagctggcagaccaccaggatggcgccgatggtcagcagcagccggtggcgcatggtccaggtttcagttgcaaacagagccatggtctattccgtgtcgatgttgttagccagcatatagccaaagccccggacggtgcggattcgcgatttgccaatcttttcgcgtaggttgtgaatatgcacttccagggtattggtcgccggctcgttgtcccagctgtaaatgtcgttgtagaggatctcgcgatgcaccgggctaccggctttcatcatcagccgcgacagcagggcatactctttcggcgtaagatccagcgccgtttcacccagccacaccaggcggcgagtgacgttaaggcgcagatttccgacgctgatttcattatcgccctggttgttatgccggcggagcagggcgcgaatgcgcgcattgagttcctccagggcaaagggttttaccaggtagtcatccgccccggtatcgagaccgctaatgcgatcctcaagcgtatcgcgggcggtgaggatcagcaccggctgggtcattttctcccgccgcatgcgggagagaaaatgcagcccgtcttcatccggcaggccgagatccagcacgatcaggctgtaatgattgctggccagcgatagcgcggcttcgtgcgcggtggagacgccgtcgcacacgtatccttcactttgcatcgccagaattaacccctgcaacagcagcgcatcgtcttcaatgactaagattttcatcaaccagcctctctacatggcgttaagatatcatctgccgcctggtactcgcgggtgctgacgccgagcaggccgagcagggtggagaacagattatcctgcgagtaattctctttttgcgcccgctgctgtagacagtgcgcggaaatgccgtagcgctgctggtagtcggcggagagccacagcgccatcggcacatgtttctgcgtatccggcgcgatggaatacggcagaccatgcaaatagacgccatcttctcccagcgattcgccgtggtcggacaaataaaccagactagtggtaaatttatcctgtttagattgcagtagttttatcgctttatcaacgacatagtcgacataaaggatggtgttgtcataggtattggtcaactgctcccgggtacagccctggatctcattggtgtcgcaggtcggcgtgaatttgcgaaacgccgctggatagcgattgtagtacgtcggaccgtggctgccgatggtatgcagcacaataatgccatcctgttgcaggttatcgatatagctgtcgagattatggaacaggacgtcatcgtagcactcgccatcgatgcactgcccggtgagcttcaggtcggtgacgttctggtgtggtacccggtcgcaggcgcctttgcagccgccgtcattatcgttccacagcacctggatccctgcgcgctgtagaatatccaggacgccttcctgatggtgcgccagctcttcgtcataatgcgcgcgcggcatattggagaacatgcacggcacggaaactgcggttgccgtgccgcaggaagtggtatgcggaaaatagatcacgccgtcctgccgcatcagcgggttggtgtcgcgcgaatagccgcccagtgagaagttatccgctcgcgaagtctcgccgagcacgacgatcgtcaggttcttacggggagcgttatgcatcaccgctttctgcatggcatcttcgccaatcttcaccagcggcaggttgtccatccgatgatgagcataccaggagttcacggccacaatgctgttggaagggctaagggatttcaccagctctttgttgttacggaacaccgaggcgtaatctttgtagaacagcgcggccaccagaataatcagcagcgccgaaacggcgatattgagcaggcgcatcgccgcgccgcgccaccgcgtggcgggcttacggattttcacccaccaggcgacgaataccgccaaaaccccggaaaggccgaggacggcaatcatttcgccggagagtagagcaaagctttccgccggagtggtgtcgaggatattggtgatcatgctgcggtcgatcaccacgccaaagttccagatgaagtattgcgccgaggcgctgagcagaatgaacaggctaatcaccagccggtccagcttcaggaacgaggcgagagtggtgaggatattcatcacgctaatggccacgatcggcatactgaggaataccagccagttatgcaggctatttaccggcagtaacgggaaaacctggcgataaaaagccaggttgagacagataccgatatagcaagcaaagagaatcagataagtcgtgcggctgaccaccggccgacgcagaggcaataacgacataatgcacacccacagaaaaagatgagggtatagtgccagccctattttaagacaaccttaagattttaaggtgcgccgaagagggccgcctccggcgcgcaggatcagcccggcagctggatcgctttctccagcgccccgcggagcagcgcccggtcatgacgatagggaacgtcgctggcctccagcggcgtctggatcaccaaccggtcgtcgatgccgctgatatcggcttttggaccggcgatcaccgcatccaccacccgtttgcctacatagcgctccataatcgcgatgcgctccgccagcgacagcctcgcggccgggctatgctctttgccgaggttatcgataaaaaccatcggcgccggggtgcggcgcaacgcctgggccatctcgtcgagcaacaggatcggcagcaggctggtgtaaaaactgcccggcccaatgaggatcaaatcggcttcggcgatagcctccaccgcctcgcgggtggccggtaccggcggggtgagcatcagctcctgcggcacattatcaagctgatcaatattcacttcgccataaacttcatggccttcatgatcgagcgccatcaaatccaccggttgttctgacatcgggatcaggaaagcgtccactttcagcaggtttctgatcaaattgatcgcctctaatggccgcacgctcaggtgatccagcgcctttaacatcaaatttccgaggttatgtccggaaagctcgccgttaccgccaaaacgatactcaaacatcgccgacgctacgctcggctcggcaattaactgattgatgcaattgcgcatatcgccccaggcaatgccaccttccgaacgacggatccgcccggtggaacccccgttatcggtggtggtgacaatgccggtcagccgtgagccgagcgaggagagggaggacatcacccggcccaaaccatgcccgccgccgagcgctaccacccgatcgaggtcagcgaatgtacgattgcgcatagaaattccttatttcacataaacggccacacactacccgatctacccctaaaagacgatgggaggagcccgacaaactgaccgacatcaaggcaaaaaaatgatttatggctattctgtagcgaaaatgcacgaagatagcgatatgtataagattatatagcgaaatcgccaatggcgaaactgcctgtaacgcgctactatcgacataacctgttaacactctagcctcttcgcctgtgtcaaaagatatggcgatttggccgcgacgccaccagttgtcgccagggcgtggaaagaaatgaccgcgtctcccgtatttggaaaggtgtatatggcctcacagcttaccgatgcattcgcgcgtaagttttattacctgcgtctgtcgattaccgatgtgtgcaacttccgttgcacctactgcctgccgaacggttacaagcccggcgccgtcaataacaatggctttctcagcgtagacgaagtacgccgggttacgcgcgctttctctgcgctgggcaccgaaaaagttcgcctcaccggtggggaaccctccctgcgccgcgacttcaccgagatcattgccgccgtgcgtgaaaacccggcgatccgtcagattgcggtcactaccaacggttaccgcctggcgcgcgatgtcgaacgctggcgcgatgccggcctgacggcgattaacgtcagcgttgatagcctcgacgcccgccagttccatgccatcaccggccaggacaagttccaccaggtgatggacggcattgacgccgccttcgccgccggctttgacaaggtgaaggtgaataccgtgctgatgcgtgatgttaaccatcaccagctcgataccttcctcgcgtggatccaaccccgtcgtatccagctgcgctttattgagctgatggaaaccggtgaaggcagcgacctgttccgccgtcaccatctctccggcatggtgctgcgcgatgaactgctgcgccgcggctggatccatcagatccgccagcgcagcgacggcccggcgcaggtcttttgtcacccggactacgccggcgagatcggcctcatcatgccgtatgaaaaagacttctgcgccacctgcaatcggctgcgcgtctcgtccgttggcaaactgcacctgtgcctgtttggcgaaggcggcgtcgacctgcgcgacctgatggccgaagaccagcagcaggccgcgctggaggcgcggatcgccgaagccttaacccataaaaagcagacccatttcctgcatcagggcaacaccggtattacgcagaacctgtcctatattggcggttaatcgttttcgaaaggagcattcagatgagccaggctagcgctgagtttatcccgacccgtattgctattcttaccgtttccagccgtcgcggcgaagaggacgacacttccggtcactggctgcgcgaggcggcgcaggaggcggggcaccaagtcgtcgagaaggcgatcgtcaaagagaatcgctacgccatccgcgctcaggtatcggcgtggatagccagcgataacgtgcaggtggtgctgatcaccggcggcaccggttttaccgacggcgatcaggcgccggaagcgctgctgccgctgtttgatcgtgaggtcgaaggctttggcgaagtgttccgcatgctgtcgttcgaagagatcggcacctcgacgctgcagtcccgggccgtggccggcgtcgccaaccgcacgctgattttcgccatgccgggctcaaccaaagcctgccgtacggcgtgggacaacatcatcgccccgcagcttgatgcccgcacccgtccctgtaacttcattccacacctgaagaaataatctatgtcacaactgacccatattaacgccgcgggcgaagcccatatggtcgatgtctccggcaaagcggaaacggtgcgcgaagcgcgcgccgaggcttacgttgaaatgcaggcgacgaccctggcgatgattatcgacggcagccaccacaaaggcgatgtgttcgccaccgcgcgtatcgccgggatccaggcggcaaaacgtacctgggagctgatcccgctgtgtcatccgctgatgctcagcaaagtggaagtcaatctgcaggcgcagccggaacataaccgggtgcgcattgaatcgctctgccgactcaccgggaaaaccggcgtcgagatggaagcattgaccgccgcctcggttgccgcgctgaccatttacgatatgtgcaaagcggtgcagaaggatatggtgattggctcggtgcgcctgctggcgaaaagcggcggcaagtccggcgattttaaggtgggtgaatgccatgattaaggttctgttttttgcccaggtgcgcgagctggtcggtaccgattcgctgacccttgatgccagcgaactggcgactgtcgaagcggttcgtcagcagcttgccgcccgcggcgatcgctgggcgctggccctggaggagggcaagctgctggcggcggttaaccagacgctaacctctttcgaacatccagtggccagcggcgacgaagtggcgttcttcccaccggtaacggggggctgacatgacgcaaacccgtatcgtggtcagcccggcgcgctttagcgtcagtgaggaatatccctggctggcggaacgcgatgaagacggcgcggtggtcaccttcaccggtaaagtgcgtaaccacaacctcggcgacagcgtgaaggcgctgaccctcgagcactatccggggatgactgaaaaatcgctggcggaaattgtcgagctggcgcgcgagcgctggccgctgggccgggtgacggttatccatcgcatcggcgaaatgtggccgggggaagagattgtgtttgtcggcgtcaccagcgctcaccgcggcagcgccttcgccgccggcgagtttattatggattacctgaaaacccgcgcgccgttctggaagcgtgaagcgacgccggatggcgaacgctgggtcgacgcccgcgacagcgatcgccaggcggcagagcgctggtagtgtgatacgcttacagggtgaaactttgtttatcaggagagagtcatggacagatatccgcgttccgattcaatagtgcagggccgtaccggcctgcagacttacatggcgcaggtgtacggctggatgacggtcggcctgctgctgacggcgtttatcgcgtggtttgcagcgaatactccggcggtgatgatgttcgtcttttcgagcaaaatcactttcttcgggctgattattgcccagctggcgctggtgtttgtgctgtcgggaatggtgcagcggctgagcgccgggatggccaccacgctgtttatgctctattcggcgctgaccggactgacgctatcgagcatttttatcgcctatacctattcatcgatcgccagcacctttgtggtcaccggcgggatgtttggggcgatgagcctgtatggttacaccacgaagcgcgatctgagcggcttcggcagcatgctgtttatggggctgattggcatcgtgctggcgtcgctggtcaacctgtggctgaagagcgaggcgctgatgtgggccgtgacctatattggggtggtgctgtttgtcggtctgacggcgtatgacacccagaagctgaaaaacatcggcgagcagattgatacccgcgacagcgccacgctgcgtaaatactcgatcctcggcgccttaacgctgtatctggacttcatcaacctgttcctgatgctgctgcgtattatgggcaaccgccgctaacctctttatatcaaggggttgcatctccgaacgcccggcaagcgcagcgccgccgggcgagatttcaggcacggtacccttgattttgccgggtggcggctgcgccttacccggcctacaggatcctctcacaggcttacgctccgtaggcccgcgcaagcgtagcgccgccgggcgatggcatcagacacggtacccttgattttgccgggtggcggctgcgccttacccggcctacaggctcctctcacaggctcacactccgcaggcccgtgcaagcgcagcgccgccgggcgagatatcaggtacggtacccgtggtattgccgggtggcggctgcgccttacccggcctacaggatcctctcacaggcttacgctccgtaggcccgcgcaagcgtagcgccgccgggcgattgcatcaggcacggtacccttgattttgccgggcggcggcaggcgccttgcccggcctacaggatcctctcacaggcttacactccgtaggcccgcgcaagcgcagcgccgccgggcgagatatcaggcacgatacccgtgatgttgccgggcggcggctggcgccttacccggcctacaggatcctctcacaggcttacaccccgcaggcccgcgcaagcgcagcgcggcctggccgtttcattcgcgggccagcttgcgctggttcttttgccgccgctttttcgcccggctctccagcagcagataggccaccgtcgccagcagtaatggcaggaaataatagagcgcgcgccaggcgagcagggcggcaatgatcgcgcccttcgaaatagcttccccggagagcatggcgataaacaccgcctccagcacgccgatcccagccggaatatggataatcaccccggcgatactgctcaccagcagcacccctaataccagaaaatagttaatctcgctgcccaacagcagccagattatcgcccccatcgccatccagttcgccgccgagagcaccatctgcagcagcgcgaagcgccaggagggcagcaccagccgctggcctttaatcgtcaggtgacggcgtttagcgaacgcgcagccgaacagatagcaaagcgtaaggatcagcatcaccccgccgataatgcgcagagtggtctggctgatgtaccagtgcggcggcagcttcaccagatctgccgtgaatatcaccccgcccagcagaatatagcccaaccagttggtggtaatgcttaaggaaaaaatacgggtgatggtgctgccgttcagccccagccgcgagtacagccggtagcgcataccgatcccgccgacccaggtgctgagtgtcaggttgaaggcgtagcagataaacgacaccagcatgacctggcgtttcgccagtttgtgcccgcaataggcccgaccgagcagatcgtagcagccgtaaatgaggtagctgacgataaccagcgcaatggcgctaaacaaggccagccgatcgtagccgcggatcaccttccacacgtcctgccagtcgactttttgcgcgtagatcaccaacaggacgatgacggcgataaaaaagagcacggtcagcactcttttcgccatccgccagcggggatgtgatttgctcatagttgattatccctggctggagactcgacgcggtcctgagtttcaatttccggctggaccggcgggctgactctggccagccgcggggtatgagccggtagccagccgacccatgccgggaagtggcgcagaaagtggaaagccatcacgctgacgcccagccgccaccagttgcgtttcggcagcatcgttttatcgatccgctggcaatcccgggcgataagcccgttgagattatcgcgcagcgtctggttaaacacccgatcgtggatgatcagattggcttccagattcagcgacaggctaagcggatccaggttgcttgacccaacggtggcccagtggtcgtctgccagagcgaccttgccatgcagcgggcgacggcgatattcgtaaatctgcaccccacccttaacgagatagtgatagagcaggtgggcgccaaacttcacaatgggaatatccggttcgccctgcacgatcagcttaacccgtactccgcgccgcgcggcattgcgcatcgcatgcagcaggcggtagccggggaaaaaataggcgttagcgataatcacttcccggcgggcgctggtcagcatcttcaggtagtggcgttcaatatcgtcgcggtgatcctggttgtcgcgccagacgaacagcgcctgcgcctcgccgggggtctggttaatctccggctggtggcgacgacgtcgccaccagcggcgggcggtttcgctgttgggcaggttttccagctcgaactgcaggatgtcgagcaccaccggcccttcgacctgcaccgcataatcctgcttcgcctccggaccgtagtcgctcatatgttcggcggagtagttaataccgccgacaaaggcggtggtgtcgtcgattaccacgattttacggtgcatgcgacggaacagattggtgcgcatccccatcagcttaggacgcggatcgtagtagcggaaaatcacgcccgcggcggtgagctcgcagacaaattcatcgctgagatccggggaaccatagccgtcgaggagcacctccacctggatgccgcggcgggcagcctcgagcaggaccgcgtgcagccgccggcctacctcatcttcaaaccagataaaggattcgaggatcacccgccggctggcgcgaccgatggccgcaaacagcgccggatagtactggtcgccattctccagtagcgtaatgcggttgccttcctgccaacgacatttcacaaatgtatctccacgctaaggggtgcatgatcggacagatgccgccaatgtttaagggccagcgccttcgggcgactggcgtgggcgttcttgacgtaaatgcggtcgaggcgcaacagcggaaaactgaccggaaaggtgcgcgccggccgtccgcgggcgcgggtaaagatctcttccagcccggcctgggcttttaacggctggttagcctgctgacgccagtcgttaaaatcgccagccaccaccaccggctcgcccgcgggcagggtattgacccactccgccagcatggtcaactgcgcctgccgttggtcggcgcgtagaccgagatggacgcaaatcacgtgaatagttatcccgctccgcggcggcacgatgcggcagtacagcaggccgcgcttctccccgttgccgaccgagatatcgcgattttcgtagtattcaatgggaaagcgcgacagcacggcgttgccgtggtggccttccggataaaccgcattgcgcccgtaggcgtagtcgctccacatggtgtcggcgagaaattcataatgggtcgtatccggccagttttcgatgtgcagcggatgtacctcatgagcgcccatcacctcctgcaggcaaacaatatccgcgctaacgctgcgcacggcgtcgcgcagttcgggcaaaataaaacgccgattaaacgccgtaaagcctttatgggtgttaattgtcagcacgttcaacgaaaatcccgccgttggctcagccataattctccagtaaatgtcactttcctgaataaaatagtgtagtagacgtcacaaaaagatgcggtgttacggaattttccgtaaagtgcggtactctgagtagcagagaaaaatccttcaggagagaagccatgaagtggcaacaacgtgtacgcgtcgcaacgggtcttagttgctggcagattatgttgcatctactggtcgtggcagtactggtgatgggttggatgagcggcgcgctggtgcgcgtcggattgggactgtgcgtcctctacagcgtcacgctgctggcgatgctgtttttacagcgtcaccatgaggcgcgctggcgcgatgtgggagacttccttgaggagctcaccacgacctggtacttcggcgcggccatgatagcgctgtggctgctgtcgcgcgtgctgcacaacaacctgctgctggccctcgccgggctggtgatactggcaggcccggcggtggtctcgctgctggcgaaagataagagccgttaccctaaagcgttcgggctacaacaaggcggcaacgcagcgaatccccagaagcatagataactatgcgactggggtgagtaaggaaagccaacgccgttgtagtttgaacgatgacgggtattacgcaatcttccttcggaacatcgcatacgccgctgagccggtggtggccgctatgaccagtagcggccacaaacttccccacacaatctccagactcgcatccttcagataaatttgcttggtgatatcggtaaagtggcggatgggatttatccaggtcagatcctgcagccactgcggcatgttttccactggtgagacgtaccccgacaggagaatagccggcatcataaagacgaacacgccgataaacgcctgctgctgggtggcgcacagcgacgaaatcaataagccaaagcccaccagcgatagaccgtaaatcaccatggtgaaatagaacagcagcagcgagccggcaaacgggatctgataggcccagataccaatcgccagcacgatagttgcctgcagggtggcgacgatcagcgccggcaccgccttgccgacgaaaatttgccaggtggcgaggggggagaccagcagctggtcaagggtgccctgctcgcgctcgcgagccaccgacagcgaggtgacgatcatcaccccgatggtagtgatcatggcgataagcgacggcaccacgaaccatttatagtcgagattcgggttgtaccagttgcgcaccaccagctcgctgttgttcggcttcgctttaccctccagcagctcctgctgatagtttttcacaatctgttgcagatagttggcggcgatttgcgcgctgttggagttgcgtccgtcgagcagaagctgcagcggggcggttggatagttatccagattgcgcgagaaatcggccgggaagcgcaccaccagcagagctttttgttcatcgatggtcggcgggatcgcctgcgggctttgcagcagcaggacgtgggtaaaggctttggcgcgggcaaagcgctgagtgagttccaccgcgtggcgaccgctgtcctcgttgtagatagcgatggtggcgttggtcacctccagcgtcgcggcaaagggaaacagcagcacctgaatcagcaccggcatgattaaaatcgcccgcgtctgcggctcgcgcagcagcgactgcagctctttgcggattaatgtccataaacggtgaaacataatagctcctttggcccattcaaccacgccgggcggcactgcgtttgcccggcctacgggatcggcgaaccgtataatcgatgttggttaaaccgtaggcccggtcggcgcagcgccaccggacaaaacctaatccagacgccgtttggttttcagccacgtcagaccgataaacatcaccgccgacgcaatcaaaaacagcacgttgaccagcagcaccaccggaatattgcccgccagaaacaggctttgcagagtactaacgaaatagcgcgccgggatcacataggtcaccgcgcggatcaccgccggcatactgtctatctggaaaataaacccggacagcataatcgacggtaaaaaggcggcgttcagcgccacctgcgcggcgttaaactggttgcgggtaatggttgagatcagcagccccatccccagggtgctgagcaaaaacagactggtaatgacaaacaggatcggcagcgagccgcgatagggcacgccgagaataaataccgacaccagcatacacaacagcatcgccagcatgccgaggaaatagtagggaatgagcttgcacagcagcagttcggcgcgggtgatctccgtcgacagcagcgcctccatggtgccgcgctcccattcgcgggccaccaccagcgaggtcagtatggcgccgaccacggtcatgatgatggtgatcgccccggggataataaagtgctggctaatagccgccgggttaaaccagtagcgcatctgcacgtcgatcagcggttcaaaggtttcgccgcggtcttccgcccgctgctgctgccagatttgccaaataccttccacatagccctgagcgaagttggcggtattgggctcgctgccgtcggtgatgagctgcagcggtgcgtcggcgccggggcgggccatctggcggtcgaaatccaccggaatgaccaccatggcgcggatgcgcccggcctgcatcatctcaatcagctgcctgcggctgtcgctgacggtggcatcgatatagggcgagccggtcatggtatggacgaaatccagcgcctcttcgctctgctgctcaagcaatacgccgacccgcagcctgctggagtcgaggttaatgccgtagccgaagataaacagcagcagcagggggatcaccaccgcgatcagccaactgctgggatcgcgcacaatctgccgggtctctttgacgcacagggcgcggacccgccgccaggagagaatgctattgcccatggctattctccttgtcccagcggttaatcagggtaataaacgcctgctccatggtcgggtccgtctggctgtcgtccgccgcctgggccttcagcgcgtccggggtcccgctggcgataagcttgccgtgatagaccagcccgatgcggtcgcagtattccgcctcatccatgaagtgggtggtgaccattaccgtcacgcctttatcaaccatgctattgatatgtagccagaactcgcggcgggtaaggggatcgacgccggaggtgggttcatcgagaaacagaatatcgggttcatgcatcagggagcaggccagcgccagccgctgcttgtagccgagcggcagctcgtcggcggcgtggcgggcgatacttttcaggccaaaggcatcgctcatccgggcgattttttcattttgcgccctgccgcgcaggccatagacgccggagaaaaagcgcaggttttgctcgacgctgaggttgccgtacagcgaaaatttttgcgccatatagcccagatgctggcgcgccttgccagagctgaccttgagatccattcccagcaccagcgctttgccggaggtgggcaccagcaggccgcacatcattttgaaggtggtggatttcccggcgccgttggggccgagcaggccgaaaatttcaccgcgcttaacctggaaatcgacatggtcggtagcggcgaaatcaccaaactttttcgttaacgactgggcttcaatgaccgtttcctctttgctgccgtcaacgcgatggataatcgcccccaacggcgattcagcggtcccggcgccgccgagcaggtcgataaacgcatcttcaaagcgcggcgcggtgtcggccacctgcagcggcggcatgtcgccatgctgctggacttcctcaatgcgcgcgtcctttttcaggatcagacgcaccgatttgccctggatcaccccgtcgctaacctgcggcagcttcagcgcccgctgcagcaggcggcggttgttctcctgcgggctggaaaccagaaagctgcgcccggccatggtttgcgtcagcgccgtcggctcaccctggtagagcagtttgccttcgttcatcagcagcacatcgcgacactgctcggcttcatcgagataggaggtgctccacaggatcagcatgccgtcgccggccagctcgtgcaccttctgccatagctcgcggcgcgagatagggtcgacgccgacgccgggctcatcgagcagcagtactttcggatcgcccaccagggtacaggcgaggcccagcttttgcttcatcccgccggaaagcttgcctgccagccgttcggtgaatggaccaagggaggtgaactccagcaggcggtcgaaaattttcttccgcgcctcgccggtgacgctgcgcaggtcggcgtacagggtcaggttttccatcaccgtcagatcttcatacaggccgaacttctgcggcatatagccgagcaccgcgtgcagggcgctgtcgtcttttagcgggtcgaagcctatcacgctggcgcgaccctcatcaggcttgagcaatccggcgagcattcgcatcagggtggttttccccgcgccgtcgggtcccaccagcccggtgacgtagccggcgcggatcgtgcaggtgagcggcgctaccgctggcctgtccataccgggaaaacggcggctcaggccgtttaaggcgatgacggtctcactcatgtccgttcccgtggctaaaggagatggtcaccggcattccctggcgcagcgcgccgtcggcatcagtcaccacaatgcgcagacggtagaccagatcggtgcgcagatccggggtctcgacggtcttcggcgtgaattcagcgctcggcgagacaaaaccgattttgccgtgatagggcttatccggccggctgtcggtatagagcagcacttcttgtcccggctgcgcctggccgaggtttttctcgtcaacataggcgcggacccacaccggatgcgttaacgacagcgtcagtacggtaccgccggcgttgagcatagtgccgggctcgacggcgcgggtcatcagcgtaccgtcagaaggggcggtgagcacggtatcgtgcaggtccagtttggcctgggccagcgccgcctgcgcctgttccagactggctttggcctgggcaatctcctgcgggcggttaccggcgcgatactgacgcagcttatcctgcgccgatttgagcgttgcctgcgcctgatcgcgcgaggagcgggcattctccagatcgttggcggaaatggcgctgctggcgcgcagcccgagctggcgctgataaaagttttgcgcatagtcgtaagcggcctgcgcctgtttcaccgccgccgcggcctgggcaatctcttccgcgcggtagccggccatcatcaggtcatactgcgcctgggcggtggatacattggcctgggcctgcagcagggcattttcatacggcgcgcggtcaagctcgccgagagtttgcccggcgcggatgctgtcgccttcgtcgacggtcagcgaggccagcctaccgccaacgcggaagctcatgttgacggtgcggatatcgacattgccatacagggtcagcggctgctgccggctgctctggtaccaccaccagccgccgcccagcgcggcgagaagaatcacgatcagcagaatgacgacgacgggttttttcatcagcccaaactcctttgcgataacccatgcaggatgaaatcgatatgacaggtaatgacttcgaaaatctgttccgttttttgcgcgtcaaactgcgtccagccggtgcgcagcaggatagtttcacgcccgagacggaaagcgagcacctcgcccagcagggcgtgggtatggaggatcatttgcgtatcactggcttcgcagccggtccaggcggcaatcagccgggtgagataatggtgcaagggggcaatcacctgctggtggatcagatggtaggcggcggtcggcgccagctgctcacgggaaatgaatttgcttaagttaaccgtgtcgtcctgggtgagcagcaggatcatgttgtggcaggcgctaaggatgaggtcgcggatcgcctggcgatccggcgcttccccggcaagcaggtgctccgccgcttcggcctgcgggcgaaaattgtcgccgataaaatcggcgatccactgggcgcaggcaagatacagatcgtctttcgagccaaaataataggtgatagcggcgatattctgcccggcctgggcggcgatatcgcgggtggtggcgtgctggccgtactcgccaaactgggcgatagcggccgcgataagctgattttttgcctgttcgcctttactggtcatcgcgctcggtaaaagttaaacaatcgattgattaactttaggcgccgactggcggtttgtccaccagccgggatcaaatatggaacccttcctctttcagctctccggcgacccaggcgaagaagcgctggaccttctccttctgttcattagcgtgggggaggacgaagtggtgcgcgccgaccggcatgctccgctcgtcggcaaataccggcgtcagctgcccctggcgcacgtgtccgccggccagcagattgctctcgaggatcacgcccatccccattctggccgcctcgatgctcatatatgaccggtcgaaattaaaaatgaagtttttatgccagccgcggaccttgtgccacgacagccagttgctccagttaatcaaggtgctgtcggagtggatcagatcgcaggccagcagatcttccacagcctgcacaggatggctggctaaataagacgctgcgctgtagggcaggacgcgctcatttttaatggttctgaccagcagcgtcggccactgtgacagcccgtgacgaatatcgatatcaatattatcccgggagaactggatgctttcgtatgaacaggtcaggctgatttttaacgccggccacgcctggcggaatttatccagacggggcatcagccatagcaggccgaagctcggcgccgaatgaatgcgtaaataatcctgatggatatcgttgatcacctggctggtggcctggccaatcatattcagcgccccggagacctctttgagatatttttctcccaccgccgttaacgtgacgcctttgctgctgcgggagaacagttttttccccagaaagtgctccaggctggctatctgatggctgaccgccgaggcggtaatattgagattctctgcggccagattaaggctgccggtagcggcgacttcaataaaagcctggatattgcgtaaagagggcatcggcagatttttattgggtagcggttggctcatggcggcatcctgcgcggggcgcgaataaaagaaaatagcgaacagcgtggcgcagccgggatgtacagcatagggaaaagcgaaaaaacaacgttaatttgtgatgggcttaacaatttatcttgttaaaagcgcgcaggtcagaaaacgctaaaaatttgcgggaagtcactaactcaatttttctcaatcataattgaggttttttgaataccgtttcattttggggttgttatattcctctcacaggcctgataacaatctgcgatgctcttgcatcgcaattataaaacacctaaccacctgtttcgctggcgaaaagcatttatctcttgctcctgtatggatagtaaaacgcggtgatccgaagcggcagcttacagcgaagtggatgaggtataaaacgaggaaaccctatgtcacgtatagatacgctggtctgtactgacgccaggaaaacgaaatatcgtttcgtggttttgacgatgatttttctggtgtatgccatcaattacgccgaccgaacgaatattggcgcggtactgcctttcatcattgatgagtttcatatcaataattttgaagccggggccatcgccagtatgtttttcctcggctatgcggtaagccagatcccggccggctttttcatcgccaaacgcggtacccgggggctggtatcgctctccattttcggcttctccgcctttacctggctgatgggcacggtgagctccgtgtttggcctgaagctggtgcggctgggactggggctgagcgaagggccttgcccggtggggctggcttccaccataaataactggtttccaccaaaggagaaagccacggcaaccggcgtttacatcgcggcgaccatgtttgcgccgattattgtgccgccgctggcggtgtggattgcggtgacctggggctggcggtgggtctttttctccttcgcgatacccggaattgtggcggccatcgcgtggtatctgctggtcaaatccaagcctgctgagagcggatttgtttcccaaagcgaactggcagagattaatgccgggcgtgaaagtcataataatagcgtacgcgaaaatatcttaattgccgaaagattcacctggctggataaaatcattcgggtaaagaaaatggcgccaattgatacggcgaaaggcttattcacctcaaaaaatattctcggtgactgcctggcgtattttatgatggttagcgtgctgtacggattattaacctggatccccctgtatttagtcaaagagcgcggtttcgatgtaatgagtatgggcttcgtggccagtatgccgtgcatcggcggctttattggcgcgatcggcggcggatgggtttcggataagctattaggccgccggcgtaaacccaccatgatgttcactgccgtgtcaacggtggtcatgatgctaattatgctgaatatcccggccagcaccctggcagtttgtattggattattctttgtcggcttttgtttaaatatcggctggccagcctttaccgcgtacggtatggccgtttcggatagcaaaacctatccaatcgcctcttccataattaatagcggcggcaacctcggtggatttgtcgcgccgatggcggctggtttcttgcttgataaaaccgggagttttaattctgtatttacctattttggtatctgcgccgccattggtttggtggtgattcttttcctcgatgaaccacaataacggaaatatatcctgttaattaatatgacgtaatgtcatggagtgaaactatgttattaaaagataaagtcgccattattactggcgcggcctccgcacgcggtttgggcttcgcgactgcgaaattattcgccgaaaacggcgcgaaagtggtcattatcgacctcaatggcgaagccagtaaaaccgccgcggcggcattaggcgaaggccatctcggcctggcggccaacgtcgctgatgaagtgcaggtgcaggcggccatcgaacagatcctggcgaaatacggtcgggttgatgtactggtcaataacgccgggattacccagccgctgaagctgatggatatcaagcgcgccaactatgacgcggtgcttgatgttagcctgcgcggtacgctgctgatgtcgcaggcggttatccccaccatgcgggcgcaaaaatccggcagcatcgtctgcatctcgtccgtctccgcccagcgcggcggcggtatctttggcggaccgcactacagcgcggcaaaagccggggtgctgggtcttgcgcgggcgatggcgcgcgagcttggcccggataacgtccgcgttaactgcatcaccccggggctgattcagaccgacattaccgccggcaagctgactgatgacatgacggccaacattcttgccggcattccgatgaaccgccttggcgacgcgatagacatcgcgcgcgccgcgctgttcctcggcagcgatctttcctcctactccaccggcatcaccctggacgttaacggcggcatgttaattcactaagcgaggcaaacagatgaagatgaccgaatcacaaaaagtcgccgcggcggcgtggcgtattcgccgttacgccctgcaaatgggggaagtgcaggggcagggctatatcggccaggcgctgggctatgccgatgtgctcgccaccgccttcagccatgccatgacctatcgcccggaagatcccgagtgggaggggcgcgatcgcttcctgctctctcatggccattacgctatcgcttattatgccgcgctgctggaggcgggcattatcccggaagccgaactggaaacctacggctccgacgacagccgcctgccgatgtccggcatggcgacctacaccccggggatggagatgtccggcggctcgctggggcaggggctgtctatcgccgtcggcatggcgctcgggctgcggcagaaacagagtaaggcctgggtctacaactccatgtccgatggggagctggacgaagggtcgacctgggaggcggcgatgtcggcggctcactatggcctgagcaacctgattaaccttgtcgatgtcaacaaacagcaggctgacggcgattcacgcaaaatcctcggctttgagccgctgcaggataaatgggccgccttcggctggtacgtacagcgcgtggacggtaacgatctgccggcggtgatggccgcctttgacaacgcgaaaagttattccggcaatcagccgcgggtcattttatgcgacacgctgatgggcaaaggggtgccgttcctcgaaacccgcgataaaaaccattttattcgcgtcgatgccgacgaatggcaaaaagcgatcgcggtgctggacgctaacaaaccggaaggagtgctgtaatgagccagagtcaaccccgtttaaaaacgtcggcgatgatcgcctcgattgctgatgaaggccaggcgaccgtccctgcgcccttcggcgtcgcgctgtcaaaactggcggcgcagcgcccggaaatcgtcggcatgaccgcggacctgtcaaaatataccgacctgcatattttcgcccaggccttcccggatcgctttttccagatgggcatggccgaacagctgctgatggcggcggcaggggggatggcgaaggagggatttattcctttcgccaccacctatgccgcctttgcaacccgtcgcgcctatgattttattcaccaggtcatcgccgaagagcatctgaacgtgaagatctgcgcggcgctgccgggcctgacgaccggctatggccccagccatcaggccaccgaagatctggcgatcatgcgcggtatccccgggatggttatcgtcgatccttgcgatgcgctggagatagagcaggcggtaccggccattgccgatcaccaggggccggtgtatatgcgtctgctgcgcggtaaggtgccgctggtgctggataaatatgactatcagttcgaactgggtaaggcgaagctgctggaggacggcaacgatgtgctgattatctcctccgggctgatgaccatgcgcgcgctggaggcggctgaaaagctgcgggccgataatatcggcgtggcggttctgcacgtgccgaccatcaaaccgctggatgagaaagcgattattgaacaggcgtcgaagccgggccgcctggtggtaactgcggagaaccacaccgcggtcggcggcctgggggaagcggtggccgcgctgctgatgcgtaagggcgtacgctgtgagctggatagcgtggggctgcccgacgcgttcctgttagccggcgccctgccgaccctccacgatcgctacggcatctccaccgcgaagattgtcgaaaaaattaagtatcgtctgcgttaaccgcgctgctatgacccactggccgctgagcgcgctcggcggccttctcatgcccgccagccaggcgcggcattcttttgcagattttatgcggcctgtcacaaaatctgctagactgcgccccttcatggcattgtggtttttgccatctcttatcgcaataatctccctgaaaactacgcccttcaccgggccggggcggttcggagttgttatgtcttttgattcccttggcctgaatcccgatatcctgcgcgctgtcgctgagcagggctacgttgagccgacccctatccagcagcaggcgatcccggcggtactgcagggccttgacctgatggctagcgcccagaccggcaccggtaaaacggcgggctttaccctgccgctgctgcagcgcctgatccagaatgagccgcacgcaaagggccgtcgtccggtgcgcgcgctgatcctgaccccgacccgtgagctggcggcgcaggtgggcgagaacgtccgcgattacagtaaatacctgaatattcgctcgctggtggtcttcggcggcgtgagtatcaacccgcagatgatgaagctgcgcggcggcgtcgacatcctcgtcgccaccccgggccgtctgctggacctcgaacatcagaacgccgtcagtcttgataaagttgaaatcctcgtgctggacgaagcggaccgtatgctggatatgggctttattcatgacatccgtcgcgtactggccaaactgccggcgcgtcgacagaacctgctgttctcggcgaccttctccgacgagatcaagggcctggccgagaaactgctgcacaacccgctggaagtggaagtggcgcgtcgtaacaccgcgtccgagcagatcacccagcacgtccattttgttgacaagaaccgcaagcgtgaactgctgtcgcagcttatcggcgaaggcaactggcagcaggtgctggtgtttacccgtaccaagcatggcgccaaccacctcgcggaacagctcaacaaagacggcatccgcagcgcggcgatccatggcaacaagagccagggagcgcgtacccgcgcgctggccgactttaaatccggcggcattcgcgtgctggtggcgaccgatatcgccgcccgcggtctggatatcgaagagctgccgcacgtggtgaactacgagctgccgaacgtaccggaagattacgtccaccgtatcggccgtaccggtcgcgcggcggccaccggcgaagccttatcattggtgtgcgtggatgagcataagctgctgcgcgatatcgagcgcctgctgaaaaaagagatcccgcgcatcgcgattgccggctatgagccggatccgtccattaaagccgaacctatccagaacggtcgccagcagcgcggcggcggtcgtgggcaaggtcagggacgcggcggccagggtcagggacgcagcggacagccgcgcagccagaataatgccccgcgccgtcaggacggcgaggcgccgaaagcgcgcactcaggacggcaaaccgccgcgccgccgtcgcccgcgtaaaccggctggcgaataacacgctgatgtccgggccgcgataacgcgccccggctcaggcccgtctgtccgctacgcggcggcgggcctttttctttccattacactatttgtcgagcaggcttccacactccgcagaaagcaatacctccgggcgggcaaaaatggcacaatagtggctgtttatacagtattcaggttttctcatggctttgaccgctgcgctgaaagcgcaaatcgccgcctggtataaggcgcttcaggaacagatcccggactttattccgcgtcccccgcagcggcagatgatcgccgatgtggcgaaaacccttgccggggaagagggcaggcatctggctatcgaagcgccgaccggtgtcggcaaaacgctgtcatatctgatcccgggcatcgccatcgcccgcgaggaacaaaaaacgctggtggtcagcaccgccaacgtcgccctgcaggatcaaatctacagtaaggacctgccgctgctgcgtaaaatcattcccgacctgcgcttcaccgccgcctttggccgcggacgctacgtctgtccgcgcaacctgacggcgctggccagcaccgcgccgtcgcagcaggatctgctggcctttctcgatgacgatctcaccccgaataatcaggcggagcagaagctgtgcgcgaccctgaagcaggatctcgacagctaccgctgggacggcctgcgcgaccataccgacaaagccatcgacgatgggctatggagccggctgagcaccgataaggccagctgcctgaaccgcaactgccactactatcgcgagtgcccgttctttgtggcgcggcgggaaattcaggaggcggaagtggtggtggccaaccatgcgctggtgatggcggcgatggagagcgaagcggtgctgccggagccgaaaaacctgctgctggtcctcgatgaaggccatcatctgccggacgtcgcccgcgacgcgctggagatgagcgccgagatcaccgccccctggtttcgcctgcagctggatctgttctgcaagctggtggccacctgcatggagcagtttcgtccgaaaaccacgccgccgctggccaatccggagcggctcaccgctcattgcgaagagcttttcgagctgattgcctcgttgaataatattctcaatctctatatgcccgccggtcaggaagcggagcatcgcttcccgatgggcgaactgccgcaggaggtgatggagatctgccagcggctggcgaagctcaccgagttgctgcgcggcctggcggagctgttcctgaacgatctcagcgaaaagaccggcagccatgacgtggtgcgcctgcatcgggtgctgctgcagatgaaccgcgcccttggcatgtttgaaagccaaagcaagctgtggcgcctggcgtcgctggcgcagtcctcaggcgcgccggtaaccaaatgggcgacgcgggtggtgcgcgatggccagatccacgtctggttccactgcgtcgggatccgcgtcagcgatcagcttgaacggctgctgtggcgcagcgtgccgcatatcgtggtgacgtcagcgacgctgcgctcgctaaacagcttctcgcgcctgcaggagatgagcggtctgaaggagaaagcgggggaccgcttcgtggcgctggattcgccgttcaaccacgtggagcaggggaaaattattattcctcaaatgcgttatgaaccgctgatggataacgaagagcagcacattgccgagatggcggcctattttcgccagcaggtggagagcaaaaaacatctcgggatgctggtgctgtttgccagcgggcgggcgatgaaccgcttcctcgagcatgtgaccgatctgcgcctgatgctgttggtgcagggcgaccagccgcgctaccggctggtggagctgcatcgcaaacgggtggaaagcggcgagcgcagcgtgctggtgggtctgcagtcctttgccgaaggtctcgatttaaaaggcgatctgctaagccaggtgcatatccataaaatcgcttttccgcccatcgacagcccggtagtgatcaccgaaggcgaatggctgaaaagcctcaatcgttatcccttcgaggtacagagtttgcccagcgcctcctttaatcttattcagcaggtggggcgtttgatccgtagccataactgctggggagaggtggtgatttacgataagcgtctgttgaccaaaaactacggcgcgcgtctactgaacgcgttacctgtttttcccatagagcagccgggcgttccggaggttatagtaaaacggaaagcaaaacagacagcaaaacagacgggccgcaaacgtcgctgacgccggcgcgtgatgcaccagggggagccatggagtacagcaaaattataaaagaggtgggtcgcggtaagaatcatgcccgcgatctcgatgaagagaccgcccgtgcgctctacgcgcggatgctgaacggcgaggtgccggagctggagctggggggaatattaatcgccctgcgcattaaaggcgaaggcgaagcggagatgaaaggtttttacgccgcgatgcagcagcatacgctgcgcctgaccccgccggccggcaagccgatgccgatcgttatccccagctacaacggcgcgcgcaagcaggcgaacctcacgccgctgctggcgatgctcctgcacaagctgggatttccggtggtggttcacggcgtcagtcacgatcccacccgggtgctgaccgaaaccatttttaccctgctggacattccggccaccctgcacgccggacaggctcaggcgcagctggagggccatgaaccggtgtatatcccggtgggggccttctgtccgccgctggagaaacagctggcgatgcgctggcggatgggcgtacgcaacagcgcccataccctggccaagctggccacgccgtttggcgaaggggaggcattgcgtctctccagcgtgtcgcatccggaatatgttccccgggtggcgaacttctttcgcgagaccggtggccgcgcgctgctgatgcatggtaccgagggcgaagtgtacgccaacccgcagcgctgtccgcagatcagcctgattgatgagcagggcgtgcgggtgctgtacgaacgccagactgagatggcagcggaggcggtggtcctgccgacctcgaaagaccctgaggtcaccgcgcgctggattgaacgctgcgtcgctggcgtcgaaccggtgcccacctcgttgaagatccagcttgcctgctgtctgctggcctgcggggaagtcacctcgctggagcagggcctcagccgcgtcaacgactgttggtgatcggatctgcaggataaaaaaagcccgtccggtggctcggacgggcaaggcaagggtattaaaggtcttttcagggttaattcagtggcttacagatgggtgcagcgattatttatagataaccgcagtaccgctcagtttgttgttggtgttagcggaagtaatgctgtagccggtcgcgccagcggcttcggctttagcagccagttttgcttccagaccatctaaagtggttgcgccttgcgcagacaccacgccgatcttattcatgctttcagcctgagcgggggtaaccggttcggcggcaaaggcgccgaaggaaagagcggtcagagcgatggcagcggcagcatatttgatgtttttcatagttaatctctcgcaggttgttctgttcaggggacgatgttccgtcgatgtgataagtatcacgcttttctgcgagagataaaatcgaaggaaattcacagtcttcatcgaattttttgaatgattaataatttactgattattaataaattatttctcattcttttcgtcacgaagcgtagcgaggaacaccgacgcgtttaagggcacatattgcgactttttccgccaaaaaatgtgcgcgaaaagataatgcgaaaggctgtcataaacggtaaaggaaagtcagcgtagctggctatccttggaaccgcgacgattatatcctgaaaatgtattgttatgtaaatctttctcctgctggcacttcacgcagtatctgacccctgggatggcctgtcgacgggcctccggaatcggctctccgcattcatcacaaaatttgttgctttcgccgcgcggaagctcgcggcgggcgcgagccaccgcatcgtcaatagtgctgtcgatctgatcctgtacggcgccgtcgcctgcccaacctgatgccatcgtctgcctcctgtaaaaggttattgataaattatagctgaaccgtacagccggttaccgctgctggcggcattgatccgccaggctatcgccccctgacggtgggccttatccgcgagggcggccgccaggtcgtccagggtgctggcgccgaaggcggagacggtgccgacagggcggagcggcccgttatagggcagtacgggtggcggtggcaggggagaggccgcggtggcatgagcggtgagcgccgcggcgaacagcagcgagacgaatttcatcagcatatcctcataaaccgcatgggacatagcttaagtgtaggtctttccagaccgcgcgacagggaatgtttaatgcaaaacagtgcgttttgcatgctaccggcgcaggggagcgctactctggccggtagattatttagcgggcgtcagggcggatcatgtcaaagcgcaggctgtcatcaataccgtaataggcgctcgggccaccggcgcgcaggatcggctgggcccgggcggtttgatagataccgttgtccagcagtgattcatcgatatgcacggcgaccacttcgccgagcaccagccacgtatcgacagggttgccgtcggcggtggtgagttgaatacactgcgacagacggcactcaaagttcaccggactctccgcgacccgtggagcgctgaccaggcggctggcggcggcggtgaggccggcgcgcacgaattcgtcctcatggtgcggaatcgaggctgacgtttcatgcatcgccatggccagcggtcgcgtcgccaggttccagacaaactcctttgtttcgacgatatttcgcacgctgtctttccagccgctgctggcgaaaccaatgatcggcggccgatagttaaagcagttaaaaaagctgtatggcgccagattacgctggccctcggcgtcctgcgaggcgatccagcctatcgggcgaggcccgattatcgcgttcagcgggtcatgcggcaggccgtggccctgcgaaggttgataaaagtacatgctgcacctgtcacggataatggagatatccagactcccttatttaccgcgccgccgtcaacgggtatcttacgcggctgttcaaaggagattgtcatgaaagcccagaaaccggggttacacccgcgtaaccgccaccatcaacgctacgacctgcccgcgctctgccaggcccatcctgacctgcagggctacattacgctcaatccgctgggtgagcagaccattgattttgccaatccgcaggcggtgaaggcgttgaataaagcgctgctggcgcatttctacgcggtcaaacactgggacattcctgacggctttctctgtccgccggtgcctgggcgggccgactatattcatcatctggcggatctgctggccggggatagcggcgaggtgccgaaggatgccacgatccttgatattggcaccggcgccaacctcatctatcccctgatcggcgctcacgagtatggctggcgctttaccggcagtgaaatcaacccgcaggcgttcgccagcgcgcaggcgattatcaatggcaacccgggcttgacccggcagatccgcctgcgccggcaaaaagagagccaggctatctttcacggcgtgatccataaaaacgagacctacgacgccacgctgtgtaatccgccgttccatgactccgcagagagcgcccgggcggggggcgagcgcaagcgccgcaacctcggactcggcgccgaaagtggcctcaattttggcggtcaacagcaggagctgtggtgcgaagggggcgaagtagcctttatctcgcagatgatccgcgaaagccaggccttcgcccgccaggtgaaatggtttacctcgctggtgtcgcgcggcgataatctgccgccgctctaccgcctgctgaccgaggtcggcgcagtgaaagtggtgaaaaaggagatggcccaggggcaaaagcaaagtcgctttatcgcctggagctttatggacgacgccaaacgccgtcgtccattctaacgctactcggcggccgggctgtcggcgcccggcatcggcagctgctgccaggtctgtaccggcgcgcgaaccccggcgcgatcgaagtgctttttcacctgggtgtcgagggcaaaacgcaccgtccactgcttcagcggcagggtagtgaagctgacgcgtagcgtaaaggcggtattgctcagccccaccagcccggcgaacgacggttcgccaatgatcagaccgcggatctcctcttgggccagcagatcgtccaccgccgccttcagcgcctggctggctttatccagatcctcatggcggtcaacgtcatagttagccacaaccgagccaatgccacgcacgaagttggcaaaggtggtgatcgaggaccagggaataatgtgataggcgccggtatcctgacgtacccccacggagcgaatcgacattcgttccacggtgccggtcaaagggccgatggtgaccaggtcgccggtgttcatcccgttctcaaactggataaatatgccagtgataatgtctttgaccagggtttgcgcaccaaacgaaatggccagccctaacgccccggcgcccgccagcagcggcgcaatgtttaccccaatttccgagagcaggatcatcaccgtgatggtgctgatcaccaccgccagcgcgttgcgaaacagcgtcagcagcgtccgggcccgcgcgctgggcagcggacggccatgaatatccgatgccagccggttttcaatcaggctggccagaaccgtccagccaatggcggagaagaagaggatcagggcgatgcggatcagcacatccaccgttttttgcccggcatcgttgtgcagccattcccggaagtcaaacaggccccaggcgctcaacagcagcatgatggcgacacagacggtgagaatgcgcgccgccttcagcgaggcggagatccagccatttagacgcttttgcagttcagggtagttgcgctgagtggcgggcgacagggtgatggttttggctatccagcgcgacaggatgccagataccagcgccgcgccgccgataatcgccaggctttgcagggtggcgcccatcatgaatttcaggctgttgcccgggtcgaacagggaaaagaaaaaaagcaccacaaagtaggcgcaggccagccagtgccagaccagcgcgaaggcgcggataaacaggctaaagaaagcgagtgagtggtcggccaggtggatcaacccttgagtaatcaccgctttgttatgaaaaatcaggtacagcgcccacagcgtaatgcacagcatgatgacgacgttagccagcgcgccaacctgaacattcacctgattggaaataatcggcaccgcgacgatcagaccgtaaccaatcaggctgctgagcgcgctcaggcgcaggctccagtatgacgcggcctcgtcgctgaggttaaagggccgcagggcaggaatgcgcgggcagaaaatgagccgcagaatagctttaaaaaactcgatcagcgcgaaggcgttgaggaaaaggctctgctggaaggcgatggtagggttattcccattcaggcgatcgcttagcagctgaccgacaaacagggttagcgccagcagcagcaggtcgatgataaacgccccggcgatggtcaggggcagctggagccagttaccgcgatcgcggtttttatgccgtccccattcgcccattttgcgatacagcggcagcgccgcgaggcgtaccagccaccagaaggcaaacaccagcccggccagcagtaaaaaatgccaggccgcgctggtaaaggtttgcggattaaagggcttatgcggtgagccggtgatattgcgccacagctgggaaaagcgtgatgagagctgttcgccatattcccggcttatctgggtgacgttctccagtaccgtggtctcttctttcaccgccggtggcgtcagcgtcggggtgctgtcgggcggcggcgtggcggctgctttacgcagctggtcaatgagctcctgacgggcggagtcgttggccagcacatcggccagtgcggcataagccgctcttttctgttccacatcgggttcgctggcgctgtttttatcagtgttagccgtcggcacgccggggagggtggcggcggaaagcggggcagtaaacagtgcagcgagcaaaagcaggatccacggcatgggcacctccgttgcaacgtaaacgggtaagtatagaagccgctggcggaaggggagggaagaggattctggaaaagcggctctcatcgtgggggagagagccgttgcgggtcaggcgacgtgttgcaggaattcacgcaggcgcgggctgggcgggttcttcaccagctcctggggattgccgtcttcagcaattcgtcctttgtcgatgaagattagtcgcgaggccactttttcggcaaagccgatttcgtgggtcacaatcaccatcgtcatgccctcttccgccaggtcctgcatcaccttgagcacttcatggcgcagctccgggtcgagcgcggaggtcggttcatcaaacagcatcatcttcggcttcaccgccagcgcgcgggcgatggccacacgctgttgctggccgccggagagttcggacggatagtgatgcgcgcgctcagccagaccgactttcgccagcagctctttcgcctgcttctctgccgcctgcttgctggcgccgcgtacccgcagcgggccaaacatcacgttttccagcgccgtgaggtgcgggaacagataaaactgctggaaaaccatcccggcttcctgacgaatcagacgttcgtccaccttcgggtcgttgaccttcagaccatcgacaatcagatcgccgctggtgatctcttccagcttattgatgcagcgcagcatcgttgatttaccggaaccggaagggccgataatgaccaccacttcaccctgattaattttcagagagatatcgtgtagcacctgggtcggaccaaagtgcttggagacgtttttaaattcaatcacaggattttcatccttctttcaagacgacgcagaataaagctcaggaccagggtgataatcaggtagatcacggctacagcgctccagatttccagcgcgcggaagttgcccgcgatgatctcctgtccctgacgggtcagttcggcgacgccgatgacgatgaacagcgaggtatccttgatgctgatgatccactggttgcccagcggcggcagcatgcggcgcagcgccagcggcaggatcacgtggcgaatggtttcgcgacgcgacaggccaagcgccaggcccgcttcgcggaatcctttatgtatggagagcaccgcgccgcgggtgatttccgcgatataggcgcccgagtttatcatgatggtcactaccgccgcggagaaggggtcgatgcgcagatcgctaaaggccatcggcagcgcaaagtagatgaacataacctgcaccacaatcggggtgccgcgaatgatttcaataaagaccagcgcgatgtggttggcgatccagccgccgaagcagcgggcgaaaccggccaccagaccaattatcagaccgccggccaggccgaggacggaaatccacagcgtcattttggcgccttccagcaaaatcggaatggcaggccagatggcactccagtcaaactgcataatacgttcctgttaccgtgtcgagagcagaggaaagcctccgccaaaataccgtctcccgccgagcctgtgccggaagaccgttgtggtgtcgccggacctcggtccggcgaagtacgtttttattatttgggttcagtgccgaaccattttttataaatttcgttataggtaccattgtcgcgcagcgttttcagcgcaccgttcactttctcacgcagctcgtcgctgcctttcgggaaggcgataccgtagttttgcgcttccagtgattcgcctaccgctttgaacttaccgttgcccgcggttttgatgaagtacagaatattcggcgtatcgtgcagcacggcatccgcgcgaccggttcccagctccatataggcgttatcgatgttcgggaactgacgcagatctttggttttgatattggctttcgcgtagtcaacggagccggtgccgctcttcaccgcgaccactttaccgttcagatctttgacatctttgatgtcgttattattggcgttgaccatcaccagcaggccgcttttgtagtagccgtcggagaagtcgatcgcttttttacgctcgtcggtaatggtgatccccgccagcgccagatcgatatttttggtttgcagcgccgggataatgccgctgaagtccattggcttcagggtgtagtcgagcttcagctctttggcgatagccgcccacaggtcaacgtcaaaacccacatacttatcgccttgcttaaattcgaacgggacgaacgccgtatcggtggcgacaaccagggtcttattggcggcatgggaagaaaccgcaaaagccagggtcagtgcagccagtgaaactttaaatacagacttcatagcatttccttttatatccacgggacgatcccctgcgagaacgactagcctaatgaaaaaatcgtgccacttttacaagctgttgtttttcaacaaacgaagcgtaagtcgttgcacaagatcgatcatttcaggcagtgactgcaccatgatggggcgtcattttggtgcgtcataagggtgctgaattaccagcccatttttagcgcaaaccctgatgggaaaacaatctcgacgtaacgattgtgtgaggtgattattacaatctttttacttttgcgcgcattttcatcaatctggtgccctgaaacggtgcaaggccagtggaggatgaaaagcaaaggatggaatatagggcagggagaaacgctgaggcgccgccgaccgcgctgggccggcggcaaagccttactcgatgttggcttcaatgaaccacaggaatttatccagatcgcgggaagccgcggtgaagatatctgcagtgtcttcgtcttttgcttcgtcgatcgccttacgcacatcgttcgccactaccgcgtagcggtcagccagggctttcaggtgatcctgaacgtgatggatgtccagcgggtagctctgcagcggggttttgctgttaatgacctgagtggtacccagggcgacgccgcccagctgcaccgcgcgctcggccatggtgtccagatgttcggtcagcgcggtacgaaagccatccagcatttcgtgcacggcgataaagttcgcaccgcgcatattccagtgtgcctgcttggtgataagtgacaggtcaatgaactggatcacctggcgattcaacagctcaatggtcgctttcttttcgctgtcagcgacatcgttgcgggtatagaccagattagacgcttttgatttaaccagttttgcggtactcatcgtttcatatcctcttgatattgatgctcatcacacttcagatctgaatgatgtggagcgttgtcccaaatgacttcggaaataagtatagcaagggttttcaagagtgaggcatcggcaggctatatcactccgatagcgcaaagtggttggttattttaaaaatatttaaatatcagctatttatatttggctgaacggcccggatttctctcgggccggcgccgtaacagaatgttaattgatatcgacctgctcgactttactctgccgttgcatagtcagcgtggcgcccatcgaggcgataatgatcgcgccgagcgccagggtctgggagagcttcagcgtttcaccgaggaagatcataccggagagggcagctaacgctggctcaaggctcatcagcgtgccgaaggtgcgcgtcggcaagcgcgtcagggccatcatctcgagggagtagggcagcgcggtagagagaatcgcgatccccaaacccagcggcagcagcgaccactgccacagcgtatcggtggcctgtgccatgcctaacggcacaaacaccagcgaggcgatgagcgaccccatcgctaccgtggctggaccatgctcttcaccggcacgctgtccggtcagaatatagaccgcccagcacgccccggcgccgagggcgaacagcgcgccggttaaatcgacctgcgccacgttctgccccagcggcagaagataccatagtccgaggatcgccagcgccacccagacaaaatccagcgggcggcgcgaaccaaacagcgccaccgtcagcgggccggtaaactccagggccaccgccacgccgagcggaatgcgctgcagggataaataaaagagatagttcatcgccccgagcgctaggccgtacagtagcagcggcacgcgctgcgccggggagaaacgtagccgccatggcttgaacaccaccaccagaatcagcgttcccagcgccagacgcagggcggtgacgcccggggcgccgaccaccgggaacagcgatttagcaagcgatgcgccgctttgaatcgaggtcatggcgactaaaatcaccagtatcggcaaccatgccgccgcttttctggatggaccgggcatcctttctcctgtcaggttttgtcaaaaggggtaaaagttccagtgtactggaattacctgccggcggttgagctaatgttgaaaaaaacaggggcaaaaacagtacaatggcgaaaactgctgagaaattcaccaggcggttaggattaatctggatgcttgcgaatttcttaatgagcgttaagatgtaagttaacgccaaaaattgttgttttccatattgttacagaaatatggaaacttttggttacatgaaaaagtatgttagacaatgtaaactccaaagagtttcccaaaagtttttgatatatttaaggcttaggacttattagaaacacatttgaggtggttatgaataaaattgcacgtctttcagcactggccgttgttctggctgcatccgtaggtaccactgcatttgctgcaacttctaccgtaaccggcggttacgcgcagagcgacatgcagggtaaagcgaacaaagctggcggtttcaacctgaaataccgttacgagcaagataacaacccgctgggcgttatcggttccttcacctacaccgagaaggataacaacagcaacggtacttacaacaaaggtcagtactacggcatcaccgctggtccggcttaccgtctgaacgactgggcaagcatctacggcgtagtgggtgttggttacggtaaattccagaacaacaactaccctcataaatccgatatgagcgactacggtttctcttacggtgctggtctgcagttcaacccgatcgaaaacgttgctctggacttctcctacgagcagtctcgtattcgtaacgttgacgtcggcacctggattgctggcgtgggttaccgcttctaatcactccggtgatatgaaaaatccgcctctcggggcggattttttttgcctgctgacggccggcccgggcgactggccgggccggcgcgattaattgactgtgaactcatcggtaccgaggtgagcgtagtccaccttctgcagctggaagttggtgatgtacaccggaccggccttttgctcagagataaaccgatagcgtggggtgatttccgccgcctggatcccggtccactgggagaagaaactgaggaaatcattcgccgaacgctgcgccttaatcactttatgcgctttgtcatcgctggatagcaccataaacggcacctggaagttctgctggaacttatcatcatgcgccagatactgcacctctttgccccgctccttgaacgccagaccatgatcggaaaaataggtcagggaaaaagtgtcaccggaattttgcaactgatgataaagcttagccagcagcgaatcggtctgcgtcatgctgtagaggtagcatgaggtctctttcgactgaacgaaaaccgtgtatttgcccttggtccgatcgcaggcctgtgggtgagagcccatcaggtgcaggacaatcagctgcggctgggtacgctgggttgagagcacctgctcggtcagcttcagcaactgctcgtcctgggtgtttttattggcttcgaaatcgccgtttttcaggaactgtacttcatccgcccgtttggcgatgctggcgatagcggtgtcgtactcgccaatttgcccctggttggagaaccaccaggtctggaaaccggcgcggttggcgagggtgacaaagttatcctgatactgtggtttgccatcgaccacccggttaagcgtcaggccgagcgatttctgcgttgagccgctggcggcgatgtagttgttaaacagataaccgtttaccgagctggcaaacggcgtgttgtcccaatggccaccgaaagcgccgagggcatcgcggcgcgcgctttcaccgatcaccaccacatagagatggtattttggctttaccgccagcacgtgccagctgtctttcatgccagccagctgcgccatccgggcctgttcgtccagcacctcgttgttattcaccaccacgtctttgacaaaacgaaaggccggataaccggtgtcaatcaccttgaatacaccgccccaggcaaggttttgcaccggctggagaaagaagatcccgatgctgaacaacaggcccagcgtatccatttttccccagcgtgatggctcaacgatcctacgacgaaccgcaatgaccccgagagcgaagatgaagaccgccagcagatagttgtaccacgggaagatggtcaggatttccgtagactcttccacgttggtggcgtgcagcgccagcagagtgttgaagttgggggcaccgtaggcctggccaaagggatagtacagagccgccagcagggaataggcgccgaccaccgctttctggacgcgcggaaaggcgcgccagagcagatgtaacacgcaggtaaatgccacggtataaagcaggctaaattcatagcccagcgccaggttaattaacagcgactgtaaaaagtagaatcccgtccatgggttcagtgccagtcggcgggcgaccagcgtatctttcagggtggtgacattcatagtaaacaatcaaaaagaggccatgcgcatcccctggcgtcaaggggtaaaacctgctggacagtgcgtgaagagggtctctgcgagccgcgaatgtggcagggctgtgcaaagatagggcttgtaaatggtaaggtcaaccagacataacagattgttttgcgagggcgcttacaaaacttgaaaaaaggtcagggaaacggggggaaccggtcattttaccggcagaaaatgacagaaaaatgaagcggcgtaccgcgacgccgccttaggaattgggtttgccctgctgcggtttaccgttgatcatctcgcacagcataccgatcagcattaatcgtactttaaagggggaatggctaaacacgtttatgcacctcttgaattcattcatctgctctcctcctgccagttcgctccgtcattccctgatggatgtttgcattatatacagatatagcacaggctatattttatagctatggctaaaacgttaattttttgtgctcttggcgcaatccattacaatgtggatctttttatacgatgcttgacgcgtcacacgaatgaggaagcacaatgaaccgtcgcgcaggtaagccaataacaaaaaaagtgacgcagttagtgaatgttgaagagcacgtggaagggtttcgccaggtgcgggaagcgcatcgccgcgagctgatcgatgactatgtggagctgatctccgatctgatcaacgaagtgggcgaggcgcgccaggtggatatggccgcgcgtcttggcgtttcgcaacctacggtcgctaaaatgctcaaacgcctggccagcgtcggtcttattgaacagatcccctggcgcgggatcttcttaaccccggaaggtgagaagctagcccaggagagccgcgagcgccatcaaatcgtggagaacttcctgctggcgatcggcgtcagcccggagattgcccgacgtgatgcggaagggatggagcatcacgtgagcgaagagacgctggcgatgttcctgaaatttacccaaacacagggatctcaggaagcatgactcttcccttcgtccagtcgctgctgcgcgatcgttttctccatttgctgctgattatcgcctgcgtgctcagcgccatcgtgccgtttgtcccggcaagctggccggcggccattgactggcataccatcgtcacgcttagcggcctgatgttgttgactaaggggatcgaactgagcggctattttgacgtgctgggccgaaaaatggctcgccgctttgtgactgagcgccagctggccatctttatggtgctggcggcggcgctgctgtctacctttcttaccaacgacgttgcgctgtttattgtggtgccgttgacgctgacgctaaaaaaatggtgcgccatcccggtgaaccggctgattattttcgaagcgttggcggtgaacgccggttcgctgctgacgccgatcggcaacccgcagaatattttgctgtggggacgatccggcctctctttcttcgggtttatcggtcagatgctgcctctggcagcggcgatgatgctgaccctgctggcgctgtgctggttctgttttccggcgaagcggctcagttaccagagcagcgacagggcgccgtcatggcaacctaagctcgtctggagctgtctgggactgtatgtggtgtttctgacggcgctggagatgaatcaggccctgtgggggctggcgctggtgctgctgggcttcctggtgctggcccgggcggtgatcgtccatgtcgactggtcgctgttgctggtgtttatggtgatgtttattgacgtccatctgctgacccagcttccggcgctgcaccaggtgctgagcggggtggggaccctctccggcggtggactgtggctgaccgctattggcctgtcgcaggtgatcagtaatgtgccctcgactattctgttgctcaactatgtcccgccgtcgatactgctcgcctgggcggttaacgtgggcggctttggcctgctgccgggctcgctggccaatattatcgccctgcgtatggccagcgatcggcgcatctggtggcgcttccatctctactccattccaatgctgctatgggcggcactcagcggctactggctcttcaaactctgcgcctgatctcaacagaatcgcgccatcattcacatcgatcgccaggatcgcctttcggggcgatctttttttgtccggctcacagaaaccgatcccgacctttgcttaccttttcactttccggtatatgactagtcattatgtttaaatgactagtcatataccgaggcgcagcatgaagaacagactaccggcagattttttatggggaaactccgtctccagcatgcagacggagggggcgtggaacgagggtggcaaggggatgtcggtgtatgatatccgtcaaccggcggagttcgcctccgactggaaggtggcgaccgactcttatcatcgttatcgggaagatttcgatctgatgcaggatttgggcatgaactgctaccgttttcagatcgcctggagccgggtgtgccctgacggagatggcgaattcaatgaacaggggatcgccttctaccatcaatttatagatgaactgatcgcccgcggcattgagccgatgatctgcctgtatcacttcgatatgccgctgtcgctggcggagcgctacaacggttttaccgaccgccgggtgatggacgcttttatccgctacggccagaagatgatcgcctgctatggcgacaaggtgaaatattggctcacctttaatgagcagaatctgtaccattcgccggaagcgtttctgatttccggctatctgcagggggagaagaccctgcgcgaactgtatctgatccagcatcatgtgatgatggcgcacgtccatctgactcactatctgcaccagacgaagccgcagtgtctgatgggcggaatgctggctcacgctctggtctatccggctacctgcaaaccacgcgatatcctctgcgcccagcagctggatgagttcttaaaccagaacctgctgcgcgcctacgcgggtgagggttatagtccggaggtgatgcattttgtcgccgcggaagggttcgatgatatctatcgtcgggaggatctcgccctgatggcgacggtgaaggtcgattatctggcgttcagctattacgccagccgcacattgaacagcgacgcgatcccgccgggaacggcggtcaacaactatatgctgtttggcaaccaggataacccgttcctgaaagcgacggaatggaactggcagattgatccgctgggcttccggacgatcatcactcgttactataacgattggcgcctgccggtgttcccgattgaaaacggcatcggggtgattgagtcctgggacggcgaacatcccattgccgatgattaccgcatcgcttaccatcgcgaccatatcaacgccatgaaagcggccatctttgaggatggggcgcaggtgatcggctatctcggctggggattaatcgatatcctgagctcacagggcgatatgcgtaagcgctacggcgtggtgtacgtcaatcgcgaaaaccatgacctcaaggacctgcggcgggtgccgaagaagagctatgcatggctgaagcaggtgttccgcagcaacggcgaagcgatgtaacgctgccctggcggtcagatggtgtatccagcccgccagccactcactgaatggataaggaccgggaaatgacggcgaagtatctgcaaatcgcgcgggaaataaaaaaacgcatcatcagccagcagtatcctgccagcgcgccgctacccgaccagtttgcgctggcggcggagttcagcaccagccggatgaccatccagcaggcgatgcgccagttaatcgtcgaagggctgatctatacccgtaaagggcagggcacctttgtgcggaaaaatttccttcagctgtcgcagtgggagctgcccggcagcgactatttcggcgccaccaaaacctgggagcatcttggcgaggtgcaaagcgaagtggtgcgctttgcggtgcgctttcccagcgacaaggagcaaagttcgctgcttatcgacgccgatgccccggtgtatgactttgttcgcctgcggctgctcaacggcgggccggtatcgctggatctgacggtcatgccggtggggctggtgccggggttaaccaaaagccatctggaaggttccgtgtttcgctatgtgcaggagacgctggggctgaagctgatgggatcttaccgcgtggtgcgggcgatgaagcccggggaactggataaacagcatcttcactgcgaaccgaccgatccggtgctggaggtggagcaggttatctatctggaggatggcacgccgctggagtacgcccactgccattatcgctacgatcacggcgggattattctggtgaataacggctaggccggggctcctgctggcggctgcgcatagcggggttacggcgtggtagggtttggtagcccgggcgagcgttagccgcctcgagggaaaatgccgataaaaaaacggcgggcatcaggcccgccgtttttcttgtcagcacaacttagttcagacgcaccggcataccggagcggttctggatagcctgctcaaccacgttctgatcgacatcagactggctggtaactgcctgtaccggctgagtcagggtgatcggcacgatctcgccgccctggaactgcgcttcggtggtcgacagcgggttgtgcacctcgatgtaacggctgccgtccggctcggtggtcgcttttaccggctcatcgataaactgtacgcgggtgccgaccggcacgttctcaaacaggaatttgatgtcatcgttacgcagacgcacgcagccgtggctcacgcgcaggccgataccgaagttagcgttggtgccgtggatggcgtacagacggccgatatacagcgcgtacagccccatcgggttatccggaccggccggtacgacggctggcagcgggttgccggcggcggcgtattcagcatgcattttggcggtcggtgtccaggtcgggccggccttcttgcgttcgactttggtggtccagttgatcggcgtatctttacctaactggccgataccgatcggcagaacgatcacggtattggtgcctttcgggtagtagtacagacgcatttccgcgctgttgataatgatcccttcatgcacggtatccggcagaatcagctgctgagggatgttcaggacgctaccgcccttcggcaggtaagtatccacccccgggttggcttccagcatgttggaaagccccatctgatatttcgccgcgaagtattccagcggctgtttgttatcatccggaatggtaatgacctgattctgaccaaccaaacggctgccatcggttggcaaaggataggtgacagcagacgctgtattgcaaaagcctacgatggcgaaggctgccgctaagagtgtagataatttcatagtctttaatgtcgtgtgcgaaatcaacgccacacaggcctttgttaatgattgagacagtagatgggagcgcattatatgtgcattccgctgaacaggtaaatcagatgtgtacgaaatcacatttttttccctgtcgcctcggctgccgcggtccggcaggcggccgaagcatcgctcgccgcgcgggtaaagggcggttactcttccagcagccgggcctgcagcgcggcgcgaaccggcgcggtaagctggtactctgccgccagccaggcgtcgacggtgccatagcgctggtgaatagccgacagcgcggcggcgagataggactcttttaccgtcagaatatccgccaggctttggcgcccctgggcagtgaggtcgttgccgagcagctccaacatccaggcctccacctgcgtcagcatgccgtgggtaaggagatactcctccatcaccgtttcgctgtcgcagccgacggcgaacagcgttaacgcgcagccgacgccggtgcgatctttgccgaccgcgcagtgttgcagtaaagcgccttcaaaaggcgtggtcagccaggcggcgagctggcgataggccgggttgttaaacggcagctggcggtagagttgcagcataaactgctcgccgttcagcgcgttaagggtggcggcattcagctcggtgaccttcgcatttacctcgctcaccggcggattggccggcgcgttaagataatgggtaagcgggctaagcttgtccggagtacgggctacctctccggggtcgcgatagtcgagcacccggctgagcggcaaagtatcgaggtggttgagatcctccgccgttaaccggtttagcgcgccggatcgcaatagcttgccgctgcggacgcggcgtccgtcggcggcaagctggccgcccaggtcgcgaaaattgatgccgccctgcagggataaaaaagccgggtgtcgcgataggctgctggtcatgggactccttataaatacgtacagaataaccgtttgagcgcgggtttccggctcatctgacaaagaccttagcacaagcgccgcggtggaatttaccgcaggccgtgaaaagtgtgtcatttgctggcataatgtctgctgtatcacacccctcatactcttttttcaggatatccccgtgctagtatccagcaacgttaccatgcagtttggcagtaagccgctgttcgaaaatatctccgttaaatttggcggcggcaaccgttatggtctgatcggcgccaacggcagcggtaaatcgacctttatgaagatcctcggcggcgatctcgaaccgacgctgggcaacgtttcactcgacccgaacgagcgcatcggtaagctgcgtcaggatcagttcgcctttgaagcgttcaccgtgctggatacggtcatcatgggccacggcgagctgtgggaagtgaagcaggagcgcgatcgcatctacgccctcgctgagatgagcgaagaagatggctacaaagtggccgacctggaagtcaaatatggcgaaatggacggctactcggcggaagcgcgcgccggcgaactgctgctcggcgtcggcattccggttgaacagcattatggcccgatgagcgaagtcgcgccgggctggaagctgcgcgtcctgctggcgcaggcgctgttttccaatccggatatcctgctgctcgatgaaccgaccaacaccctggacatcgacaccattcgctggctggagcagacgctgaacgatcgcgacagcaccatgattatcatttcgcacgaccgtcacttcctgaacatggtctgcacccacatggcggatctcgactacggcgagctgcgcgtgtatcccggcaactacgacgaatacatgaccgcggccacccaggcgcgtgagcgtctgctggcggacaacgccaagaaaaaagcgcagattgcggacctgcagtcgttcgttagccgcttcagcgccaacgcctctaaatcgcgtcaggccacctcgcgcgcgcgccagattgacaaaatcaagctggaagaggttaaagcctccagccgtcagaacccatttatccgcttcgagcaggataagaaactgttccgtaacgcgctggaagtggaagcccttaccaaaggctttgatgaaggtccgctgttcaaaaacgtcaacctgctgctggaagtgggcgaaaagatcgccattttgggcgccaacggcgtgggtaaatccaccatgctgaaaaccctggtaggcgaactgcagccggacaacggcagcgtgaaatggtctgaaaacgcgcaaatcggctactacgcgcaggaccatgagtacgagttcgaaaacgacctaacggtcttcgaatggatgagccagtggaagcaggaaggcgacgacgagcaggcagtacgcagcatcctcggccgtctgctgtttagccaggacgatatcaaaaagccggcgaaggtgctttccggtggcgagaaagggcgcatgctgttcggtaagctgatgatgcagaagccaaacatcctggtgatggacgaaccgaccaaccacctggatatggagtcgattgaatcgctgaacatggcgctggagatgtatcagggcaccctgatctttgtctcccacgaccgtgagtttgtcagctcgctggcgacccgcgtcctggagatcactccggaccgcgtgatcgacttcagcggcaactacgaagactacctgcgcagcaaaggtatcgagtaatccctgtccgttacccgggtagcggctacgccttacccgggcgacacgcggtgccgtttttttgtcgggtggcggctaacgccttacccgacctacggttcttgcgacctgcctttaatgtcttcaccgcgctggctgaaactaccggcctaaggtcagaacctccactccgttccttcaacgccattcaccagcagcttacgcttttctcctaccggtaatgacagcttcagcgctttccacgccgggcgatagttgccgcgggcgttgatatccaggtttatgctgctggcgctgcaggtcatttcccactccagccatagcgcatccccctgtttatagccccagctttcgccgtcgtcttcaaacagcagaccgcgggttgagccggtacctttcagcgggaacagctgcagttcgcgacgatcgtctttttgcgcatcgacatggctgatacgttcactaagcggcagaccggcgccggcgcggaccaacagcggcagtttttccagcggcgcgtccagcgtcacccactggccgccggcgaaccactgatggctgtagaaatcgtaccaaccggcctgattatccggcagccatacttcacgctggcgggcgcccggctcgaccacgctggccaccagcaggtcgcggcccagcaggaagtcatcgcattcggcgaaggtctgcgcatcgtgctggtgatcgaggaaggtcgggcggagcatcggctcatcatcagcatgcgcctgccatagcagagtgtacagatagggcagcaggcggtagcgcagctcaatggctgagcggatcgccggagtgatggccggatacatccatgcttcgtttaccgtctggtcgtcattccacgagtgaatggtaaagcgcggatgcatgacgccattttgtacccagcgcacaaacagttccggctcgggtttatcgccggagaaaccgccgacgtcgtggccgacgttaaacagcccggaaaggctcatccccaggcccatgcggatgttatagcgcagcgtatcccagttggtgcggttgtcgccgctccaggtctggacgtagcgctgcatcccggcgcagccggagcgggagatcagatatgggcgcttttgcggcgcaaagcgctgctgggcttccagcgaggcgcgcatcatcaacagcggcatcaccgggcgaatatgtttgatggcgatttcacggccaaagccgtagcagcgggcttcgccgtcccatacttcgtattcgttattatcgttccaggtcgaatcgatgcccatctccagtagctgggtggtcacgccttcctgccaccaggccaaggtttgcggattggtgaaatcgagatgcgacccttcatcatcccagaagctggaacgctccggagcgtcagtttgcgaatcgcgaatgaagagaccgcgctccgccacctcgccgtagcgcgggtgatcctgcagcaggcacggtttgatattggcggccagcttcagcccggcatcgtgaaacgactggctcatcactttgggctgcggcaccttgtcgtagttccagttaaagacgtagcgcttgccgttgattgaggtatagccggaagagagctggaacgaatcgcaggggatcgcgtgctgctcgcacaggcggataaagttcatcagctgattttgcgcatccggcgcgtcggtatagtgcatggtggagccgctgtagccgaggctccatttgggtccaaacagcgttttaccggtcaggcgaacgaaggctttggtcacatccagcacctgcttaccggtaaacaggtaataatcgatgtcgccggcttccgcctgccagcggcgataggcggtgtggtagttgtcgatctcgttccccagatccagccagcagctgctcaggttgtcatagaacaggccgtagctgatatcgctgcgctgggtgatggtgaacggaatatgtttatacagcgggtcagtgctgacggcgttgtagcccatggcatcgaggttacgcatctcatagcgtttaccggtgcgctgcaggtcgccggccttttcgcccaggccgtagaaacgctcatctttgcggcggctcagataatgggcgacgccgtcgccgtgggcattcgccaggtaggcgctggtcggacggtcattggcaagcggctgccattcgccggcctcgtcgcgatagctccactccagccacagcggctggtgaacggtgacgcgcagctggcgggtggcgatagtcagcgtatcgccctcctgggccagctgccaggccgggagactaaaaccgctgaggtcatcccgggcgcggccttcccacggcacatcctgctgcggagcgatgctccaggtgcgatccagcgccagctggccctggcgttttagcaggacgcggaacaaattctcttccagtacatacaggcacagggtgtgctggccatcgaccgtcagttcaacgtgatgctccagctgttgatgcaaactccagtgtttcagcgtcttcatatcttacatccactctcaggcgcgcttggcgcgacgttcagcaataaatgccaccaggaaaacggcgccaatcaggtcaaagaaacccatggcgataaatagcgggttgaagccgattttgtcggcggtcaccccgattaataacgagaacaagaagctggcgatccacgctgcggagccgcgcataccgttgaccgtcgccatttgtcccttgtcgaaagactccaccaccagcgcgctgagcatgcaggagatgatctgatggccgaagccgccaatggagatcaggatgatggtgatatagggatcgcgggtgatggcgacgagggccagggagagcatcaggaacgcgccggttaccgagctggcgatcaccgagttcactcgcgtacagccgaaccagcgaacatacaggcgggtgaggtagccgctgaccacgctgccgagatcggcggcgagaaacggcagccaggcaaacatggcgatctgcttcaaatccatgccgtgctctttcgccaggtacagcggcacccagaaactcagcaccgcccaggcgggctcggccataaaggcggggatggcgatcccgtagaaacgtttatttttcgagacggttttgagcgcggtaaagaagggctgttttaccggcggggcttcgttatcctgtttgatgtactccagctcgcttttgctgagattggggtgcttttccggggtctgatagaaggcccaccatagtactacccacagtagcgccagcgcgccggtaaacataaacgccccttgccagccgaaggaggcgtgggcgaagtagatgatcggcggggccagcatcgcgccgatggagaacccaacgccagcccagccggcggcaatcgggcgttcagatttcggaaaccattcgccgatggttttggcgttcgccggagtagcggccgcctcggccccacccataaagaagcgcaaaatagccaggtgcagccagctaccggccccggcgtgggcgatacaggccagcgcccacagggtggcgcagatcataaagccaagcttcaggccgatgacgtcgataagccagccgcacagcggctggaaaatcgtgtaagccagctgaaacgcgccgacgatccacgagtattgttcggtagtaatgccgagggtcgctttcagttccggcgcgataattcccagcgagttgcgtgtgatgtagttgacggtaacgccaagtaaaaacaggaccagcacccaccagcgcaggtttttcactacccggcgcgttttgctgacggcgatatcattgttgaggccttgactcatagcacactccacaagacgtttgtagggggaaagtgacggtctcactccctgagtggtcacgtagatttattaactatttgaatagtctatttttaatctcaacatcattggtataactagtatgggagatgttggaccaattcaggctagggcagaaaaatcgtctggcaaagcgctatttatgcaagttttttcatgaaatgagcgagatcgcatatttgacagcggaatttgcttgtaacgtgtgctttggcgattatgaaaattctttcatttttcaatcggagctggatcacaaaatggataaaaagctgcgcgtcgccgaaattgccgcccgcaccgggctatcgcccagcaccgtttcacgcgtcctggccgggaaagcgaataccagcgacaaggcgcgccgggcggtgctggactgcgcccgcgagctgggtgtcatgcaggggttggccgccgggcgtctgctgctcaatcatctgctggtgtttgccccgcagcgcgcattcgatgagcgatcggatatcttctactaccgggtgatccagagtatcaataacgcgctggcggcgcatgaagtgcgcctgcgctactgcgcgctggatgagaacgacagcgacgccaacctgtttcttgcccgcatgaatgaacctgagacccaggccgcggtgctgctggggatcgacgatccgcatattcatggcctggcggcggatctgggcaaaccctgcgtattgatcaactgtcgggatgaagggatgcggctgccgtccatcgctcccgatcatcggctgatcggccagtgcgcggcccgctatctgtttgatatggggcatcgggcggtgatgaacgtgatgtgcctgcgccgctataccatggagctgcggctgggggggattcaggaggcgtggcgcgcgcgtaatctgcgctttaccgccagccgggatcttatcagcgtcgccaactttagcgccagagagacggaagagcaggtgggcgcctggcttgacggcttacagggcaggccgttgcccaccgccttcctggtgggcggcgattttatggccgccggcaccgtcagcgcattgcaaaagcgtggcctgcgggtgccgcaggatgtctcggtgatgagcattgacggatttaatctggcggcgattcaggaggtgccgctgaccgcggtgcatgtgccgcgggatgagctgggcagcgaggcggtgcatctcctgcagcagcgcctgctgcgcccggaggcgccgcacggctcgctactgctgcatggcacgctggtggtacgcgattcggtacggcggatccggccgggcaaaggccataccgccgtcgagccgcaggggctggatgacgattagaccggcatacccagcgcccgtttgccgtggatattcagatcctccagggtgaagcgcccctgccagctggcttcatagtcctcgcgcgggaaatcccccggcgaggcgcctttttccagggcgattttcactttctgcgcgtaggcgaggttcttctcgcacatcggcgcggccggaatgtacatcacatttccccagccctgctgattttccaccggcgccaccgagtgaatgatgtcgcagtgccaccagacggagtccccggcattcagcgctggaatcgagcttaacgctttaattaagagcgggtgccactgctcagagatcggcagcactctgcccggcgcgacgccgcacagctcatcttccggcacatcgtcgagcagggggcgcagcagcacataagccatcgcctccgggatcggcaccacgtgcagcagcccctgacccgggatcatgtccgacagcgcggtccagccctggaaggtgcggaacaccgagcatttggtggtgttgtcgacggtatactcttccacttcggtacggtgcgcggcgtcccacgggtcgtaggcgtcgatattgccattaaaaacgttggcgaaaacctgctgataggcgggaagcagccagcgctccagcgcgccggaatcggtatgcgcccccagccccttcgaagtggttcccggcgggcggcggcggatgcggtcgggatagatcacgctgacgtccggatcgaaccagcgtttgccattctgttcaaaacgccacaggcggttgaggaaagattgcactgccgccatttcatcgctctgccgcgcctgcatttgcgagggcgaccagtagatcgggtagatctccgggcgcgaagcctccagcgaaccgaagaagctgtcgccaggccctttgtaaacatcgtcgaaatggttgcgatccagatattccagcatcgcggtatcccacgccagcgcctgttcgcgtgggaagtggcctttaatcaccgcgcagccccggcgcttaatggccgcgcgctgctcatcgctcactgttccttcggcgatatcgcggaacggaatggttggccagacctcctggcctgcggctttcagtgtctcaatctcctgcagccgctcgctgatgcgcgctgagagcttatcgaacaccgcctggacgtcgccaatttgcgcccgcagggcctgtttcatctggcgaatcgccgctttgtgatcggcgggaagtgtttcgtgggtcgggagagcagccataataacctcgctgtatctttcattcgaaagtataaaatcttacaaacgttaatttaagttaaaatggagttaatgcaagtttaaaatcttgctgcggcgcacaaaatggaaaaccggggcgcgatgccccggcgaagggtcaggcgttgaagggcggggtgttatcgaggacggcctggataacgttcagcgcgccgtcatggttattatcgtcggtagtgtagccggcgatggccttgatgctgtcggcagcgttacccatggcgaaagcgtatttcaccagcttcagcatttcggcgtcattgccgctgtcgccgatggcgacgcattgctgcggcgaaagatcccagcgcttgagcaaacggctgatgccgttggctttatgcaggccagggataatcaaatcgacaaagccaaagccgctggtgaccggcttcatgatgccgtcgagcgacacgtgcagtttattaatcagctgtgggatctcgctgtccggcaggttgagagagaatttaaacagcgtatcgtcgatggcgtgatagtcgctcacccgctgtaggcgatggtagtgcttcgacatcagctcaacaaaggcgtccggagctttatcgctgacgtaggcgctctgcaggccgcaggcgacaaagttgagctgcggatctttgagcaattcgccaatcaccacttgtgattcgtggcgggtcagttcgccgtggaacagctgcttgccatgttcataaaccagagcgccgttttctgcgacgaacgaaatctgctcgcggatctccgggaagaaggagatcaactgatagtactggttgccgctggcgacaacaaattcaatgccgcgctgctgcaactgggcgaattgcgccagaaaccgtgagcgatcgtaggttttggcgtcattgagaaaagttccgtccatatcggtgacgataactttaacggtcataaggggatgctcctggcttaacttcgaccagtaacattctaattacaatgtgatggagagcacaaatttatttcgaatgaaagttcaggcattcagaaaatgccggaagggcatgtcttttccggcctgcagaacagggttggcccgctaagcatagcgccagcgggcacgaaggattacagcgtatgttcggtacgggcgatgatatcgtcctgggtatccggcgacagggcggtgaagaacgccgagtatccagcgacgcggaccactaaatcgcggtactggtcaggatgtttcttggcttccagcagcgtgtcgcgcgacacgatgttgtactggatatgccagcctttgtgcacctcgaagaaagtgcgcagcagcaccatcagcttctgcttatcggactcgttctccagcgttgacggattcagcttctgattaagcagcacgccgccgaggatcgccccggtcggcagcttgcccaccgaactgataaccgccgtcggccccagatggtcggtaccggaggccgggctggccccctccgccagcggggtatgcgctttacggccatccggcgttgccatggtctgcgcgccgaacgggacgttagcggaaatagaggaggtgccagcgtaataattgccgccaatcgggccgcggccatagcgcgggttgtgatactgcttcagctcgtcgatataggtctggtaggcccgcgccagcagttggtcgacgctgtcatcatcgttaccatacttcggcgcgccgttgatcaaccgctggcgcagctgctcgtgggtcagaccgtcgaaatcttccgccagcgccttcgccagctcctgctggccgatggcgccctgatcgaagaccagttttttcaccgccgcgaggctgttgccgaggttggcgatacccacctgcaggccggaaacccagtcatacttcgcgccgccctgcttaatgcttttcgcccgttcgatgcagtcatcgaccagcgccgagcagagaatatcgtggacgttctcttccagcatggtatcgaccacgtactcaatctcgatggatttacgggtgtagtaacgaatctggcggtcccagtcggctagcacctgatcgaagttagcgaagttgcctttcgacagggcgtgctcctgcggcaggaacacctgaccgctggtggcatcgcggccgccttccagcgtcgccagcatcacccgcgcgaagttaataaagctcatgccggtgcagcggtagccccacttaccgccgaccgcggtttcgatacagccgatagccgcgtaatcgtaggcgtcctgcggctcaatgcccagcttaatgaattccgggatgacgatttcatcgttgttaaacgccggcatgccgaaaccgcagcggatcacctggacgcaggcgtcgaggaagtcgttgctcatcccggcgtggtagcgcacgctgaggttcggctgggtagaacgcaggcgaccgcaggattccaggatcgcatacgacagcgggttgaccgcgtcctgcggcttaccatccaccagattctggccgccgatggtgacgttctggtatagcgggctgccggcagaggctttggagtgtgagccggaacggatcttattgacctccagcagcttcagccagcagctgtgcagcagctcaatggcctgttcgcgatccagcgactgttgcaactcaacgtcgcggcggtagtacgggtagaggtactggtccatacggccgaaggataccgaatggccattggattcaatctgcaggataagctgaatgaagtagcacagctgcagcgcctgccagaaggttttcggcggctcatgggcgatgacgtcgcagttttcggcaatcgtcagcagttcgtggcggcgtgattcgcgggattctgctgtcgccatctcgcgcgccagcgcggcgaagcgtttgctgtgatcgctgaccgcttccagcacgatatcaatcgctttcaggaactgctcgccgtgcaggtcttccagtaccgtcaaattgatacgcgagcggcgttcggcgactttcgcacgcatcccgtcgaggcctttctccagcagcaaggggtagttgaccgcgaggtgagcatccccggaggtcatattgccttccgccttaataatgccggtggcgagcagcgccttttgctcatcggtgaacataccgtagcagcggtcttgtacggtctggccgcgccaccatgggcacacttcatgcaatacgcgtttattctcctcgctgaccgagaagccggcgccggggcggtcggcgagatcgtcgatctctttctcaatccagctgacggtgtattccgggaaaataggcgcggcgcgcacttcgctggcctggttaccgacgatcagctcatcgtgcttgatccagatggtgcgctccgccaggtggtgagccagcgccagcgcgcggcgcaccgggatcggtttatcgagatgctgctgatacatctccgtatagtgacgggcgcgctcggtacagaccggcggcttgacgatatgcaccagcgccattttatgggcctggatacgggcgctgagggtgttgagcttcagggttgtcatagggttatcctcgtaatatcgccgttagccccttgctccgcgcataatcttgcgcgaaggcgagcagctcaggagcgtccagcggtttgtccggtgcggtgtagggctgactgagtaactggtatttgttcattcccagcgtgtggtacggcaggtaatggatctcgctgacctgcaggcgatcggcggcaaaatcggtgatcgcggcaatgtcggcttcgctggcgttgaatccctggatcaacggcacgcgaataatcatttttttccccgcctgcgccagacgctgcaggttatccagcacccggcgggcgctgccgtcggtccactgctgaaaaacggcctcgtcaacgtgcttcagatcggcgagaaacaggtcgacaaagggtaaagacggttcaatgtatttccacggcacgtgcaggcaggtttccacggcggtgtgaatgcctgcctgatgactggcttcgaacagcgcttgcgccagcgttgggttcataaagggttcgccgccggaaagagtgatgccgccgccgctgcgatcgtagaatggtttatcacgcagcaccgtcgccatgatctcctcgacgctcttctcctcgccgcacaccgtgagtgcggtggtggggcagcagtcgcgcagcgcggcgatatggctgtcgttaacgttttgccggtgaatgatcaggccatcgagggtgcgggtgataaccgccggcgccgcctgctggcacagctcgcagccgggcaggcacagccgcgagtcatacagcagatcttcgctacgggcgcggctctccgggttctggcaccagcggcagcccagcgagcagcctttcaggaagacgacggtgcggatccctgggccgtcatgggtggaatagcgctggatgttgaagatcatggcttatcctcttgtttgcgtatgaatataaaaacactttcgaatgaaagttatgttgacgcaaatcaacaagcgggatggggataagtcagagaggagaaaataacgagagcggtcacaaaaccaccggcgactctcgtcgccggtgtgggggtcagtgcgagccgcatacctcgcactgcgggtgacgcatcagcctcatttcgcgaaactggcaggtcatggcatcgtagatgacgatttttccgctggcaggggtgccgtagccgctcagcagcttaatcgcctccatcgcctgcagcgaaccgatgatgcctaccagcggggccattaccccggcttcgacgcaggtgagggcattttcgccgaacagacggctcaggcagcggtagcagggttcgccatcctgataggtaaagacgctgatttgcccctccatacggatcgccgctccggagaccagtggggttttgtgctgaaagcagccgacgttaagctggttgcgaatggcgacgttgtcggtgcagtcgagcaccagatcgtgatcggcaatctgcgccgccagcgccgcctcatccagcaaggcattgagcgggaccagacggacgtgcgggttaatgcgcgccagcgcctcgcgggcggaatccaccttcggctggccgagggtggcgtcgctgtgcagcgtctggcgctgcaggttggagagcgagacagtgtcgaaatcgagcagggtgagctgcccgaccccggcggcggccagatactgcgcggcggcgcagccgagcccgccgaggccgaccaccagcacgcgagcggcttttaaccgctcctggccgtcaaaatcaaaaccgcgcaagacgatctgccggttatagcgcagcatctcttcatcgctcagctcaacggtcattacagccccccaaacaggtgactgaagggttcgacctcgacccattcacctgcttcaacatggccgcgctcacgctccagcacgataaagcagttgccgaggctgaaggagctgaaaatgtgcgagccctgatggccggtggtgttcaccaccagttcgccgtccgggttgcgctgcagaataccgcgctgaaaatcgaggcggccaggcgactttttcaggcgcgtggcggcgcggacccgcaggcggggcgcctgaagcgggccgtgcttgcccgagagtttcgccagcaggggttgcaccagctgacagaaggtgacggtggcggacaccgggttacccggcaggccgcagaaccagctgctgctgagcttgccgaaggcgaagggtttccccggcttaatcgccagcttccagaagccgatctcccccagctcttcgaggatagttttggtgtaatcggcttcacccactgagacgccgccggagctaatgaccacatcggcctgctggtcggcggcgataaaagcgtcacgcagcttcgccgggtcgtcaggaataatgccgaggttaatgacctcgtagcccaactgctgcagcatcaggtgcactgccaggcggttggtatcgtaaatctggccgtcgccgagcggttgacccggcagctgcagctcatcgccggttgagaagaccgcgacgcgtaccttgcgcaccacctcgacctcggcaatgccgaacgaggccagcaccggcagctcggccaccgtcaggggtgtccccgccgggaagaccaccgcgccgtgggcaatatcttctccgcggcggcgaatatgctgcccggcttttaccggcgcgataaagcgcacgccggcctcggtctgttcagtctcttcctgcatcaccaccgcatcgcagccttccggcaccggcgcgccggtcatgatgcggatacaggtccccgacggccaggcgtcgttgaacggctggccggcgaaggccttaccggcgaccggcagcgccgcgccgtcgcgaaggtcgttcagccggacggcatagccatccatcgccgcgttatcaaagccgggcacatccagcggggagacgatgtcatgggcggtcacacgcgagaaggcctgcaacagcggtacagtttccgtcgcgttcagcggcgtaatacgatcgagcatctgggcgagggctgtgtcgagcggcatcagtccggcggtaaaatccatgggtcactcctgcgggcaaaacagcgaaaacgcctattatggcagaaaagcggcgcgggctgtatgccacctgggtacgaggctttacatcgcccgccgctctttctatattcaaaaattgtataagacattcagcaatataatgatatcaatacccttattcatgacgtgaccggcgccgcgccgcggtacgacagggcaggggcgatccacttcatcgttaaggactggcgaaatgggcaaggcggttatagcaattcacggcggcgcaggggcgatttctcgcgcgcaaatgacgccggagcgggagcgagagtatgtggcggcgctgtcgactatcgtcgaaagcgggcagaaaatgttggccgcgggcgccagcgcgctggatgccgtgaccgaggccgttcggctgctggaggagtgtccgttgttcaacgccggaatgggcgcggtatttacccgcgatcaaacccacgagctggacgcctgcgtaatggacggctacagcctgcaggcgggcgcggtagccggggtcaaacatttgcgtaatccggtgctggcggcgcgtctggtgctggagaagagtccgcacgtattactgatcggcgagggggcggaaaattttgccatctcccacgggatggcgcgcgtggataacgatctcttttccactcctgaaaggctgctgcagctgcaggaggcgaaagcgggcggggagattatcctcgaccaccacgccgctccccttgacgaacgccagaaaatgggcaccgtcggcgcggtggcgctcgatctggccggcaatctggcggcggcgacctccaccggcggcatgaccaacaaactgcccggacgcgtcggcgacagcccgctgccgggcgcggggtgttatgccaataatgccagcgtggcggtctcctgtaccggcaccggcgaagtctttatgcgcaccctggcggcctacgatatcgccgccctgatggagtatgggcagctcagtctctattccgcctgcgagcgggtggtgatggagaaactgccggctctcggcggcagcggcgggctgatagccgtcgatcgcgaaggcaacgtcgttttaccgtttaacagtgaaggcatgtaccgcgcctggtgctatgccggcgatacgccgaccattggcatttatcgcgaatagaacaagggagagggcgagtgtcgcaaactcacgaaaccgatacctgcgaagtgctggtggtgcgcaacctgaacgtggcgttccgccagcaggatgcgccggaggtgcaggccgtgcgtcagctttccttcagcctgcgccgcggcgagacgctggcgatagtgggtgagtccggttcgggaaaatcggtgaccgcgctggcgctgatgcgtctgctagacgcggccagcagcgaggtgaacagcgaggggctgtggttgcggcggcgtaaccggcaggtgatcgcgctcaatgagcaaacggacgctgagatgcgccgggtgcgcggcgcggatctggccatgatttttcaggagccgatgacctcgctgaatccggtttttaccatcggcgagcagattgccgaatccctgcgcctgcaccaggggctggggcgcgaagaggcgctgcgcgcggcgaaaaagatgctcgatcaggtgcgtattccccaggcggaagagatgctctcgcgctatccgcaccagctctccggcggcatgcgccagagggtgatgatcgccatggcgctctcctgtcggccggcggtgttgatagccgatgagccaaccacggcgctggatgtcaccatccaggcgcaaattctgcaactcattgccgtcctgcaaaaggagatggcgatgggggtgatctttatcacccacgatatgggcgtcgtggccgatatcgccgatcgggtgctggtgatgtatcgcggtgaggcggtagagaccggcagcgttgaggagatctttcgttcgccgcagcacccgtatacgcagtcgctgctggcggcggtcccgcggctgggggagatgcgtggccaggatctgccgcgccgttttccgctgccgggccagccgctggcggagagcgaaacgcccgatacggtagtcgccggcgagccgatcctgcaggtgcgtgacctggtggcccgttttccggtgcgcggcgggctgctcaatcgcgtgacgcgcgaagtgcatgcggtggagaaggtcagttttgatctctggccgggagagaccctgtcgctggtgggcgagtccggctgcggcaagtcgactaccggccgggcgctgctgaggctggtagagacccagggaggcaccattaccttcgacggtcagcggatcgataccctcgccggcggcaagctgcaggctctgcggcgcaatattcagtttatttttcaggatccttacgcctcgcttgatccgcgtcagacggtcggcgattcgattatggagccgctgcgggtgcatggcctgctgcgtggggaagcagcgcgtgagcgggtcgcctggctgctgaagcgcgtggggttgcagccggagcatgcctggcgctatccccatgccttttccggcggccagcggcagcggatctgcattgcccgcgcgctggcgctgaatccgaaggtggtgatagccgacgagtcggtgtcggctctggatgtctccattcgggcgcagattatcaatctgatgctcgacctgcagcgcgagatgggcatcgcgtttctgtttatttcccatgatatggcggtggtggagcgcatcagccaccgcgtggcggtgatgtatcgcggtcgcattgtcgaaataggcccgcgccgcgcggtgtttgaaaacccgcagcacccctatacccgtaagctcatggccgccgtaccggtggccgacccgggccaccgtcatccgcagcgggtcctgctgtctgatgacgtcccgggcaatatttataagcggggcgaggagatcgccagcgtgccgttgcagcaggtcgggccgggccacttcgtcgcccgcgaatccgccgatgtgctgggcagaacataacaacacataacgcatcttttcaggagaacacgatgacacaacctgtttcacgcaaatggtggctggcgctgagtatcgcggcagccctggcgagcgctcccgcctttgccgccaaagatgtggtggtggcggtcgggtctaacttcacgaccctcgacccctatgatgccaacgataccctgtcgcaggcggtggcgaagtccttttatcaaggcctgttcggccttgataaagagatgaagctgcaaaacgttcttgctgagagctataccgtgtcaccggacggcctggtgtacaccgttaagctgcacagcggggtgaaattccaggatggcactgactttaacgccgaggcggtaaaggctaacctcgatcgcgcgagtaacccggataaccatctcaagcgctataacctgtataaaaatatcgccagcaccgaggcggtcgatccgactacggtcaaaattaccctgaagcagcccttctcggcgtttattaacattctcgcccatccggcgacagcgatgatttcgccggcggcgctgaaaaaatatggtaaggatatcggcttccacccggtgggcaccgggccgtataagctcgacacctggaaccagacggattttgtgaaggtcagcaagttcgatgggtactggcagccggggctgccaaagctggattctatcacctggcgtccggtggtggataacaatacccgggcggcgatgctgcagaccggcgaggcgcagttcgccttcccgatcccttacgaacaggcgccgctgctggcgaaaaacagcaaactggagctggtggccagcccgtcgatcatgcagcgctacatcagcatgaacgtgacgcagaagccgttcgataatccgaaggtacgggaagccatcaactatgcgattaaccgtcaggcgctggtgaaggtagcgttcgccggctacgccaccccggcgaccggagtggtgccgccgtcgatcgcctatgcccagacctacaccgcctggccatacgatccggcgaaagcgcgccagctgctgaaagaggcgggctaccctaacggtttcagcaccacgctgtggtcatcacataatcacagcaccgcgcagaaagtactgcagttcacccagcagcagctggcgcaggtggggattaaggcgcaggtgacggcgatggacgctggtcagcgggcggcggaagtggaaggtaaagggcagaaagagagcggggtacggatgttctataccggctggtccgcctccaccggtgaagccgactgggcgctgtcgccgctgttcgcctcgcaaaactggccgccgacgctgtttaataccgcgttttacagcaacccgcaggtggataacgcgctgagcgaggcgctgaaaaccaccgatccgcaagagaaaaccaaactctataaagaggcgcaggatattatctggaaagagtcgccgtgggtgccgctggtggtcgagaaactggtctccgcccacagcaagaacctcaccggtttctatatccagccggataccggctttagcttcgaacaggcggacctgacgccgtgatcatgttcatcttcatgcgtcctctctcccggaatgggagggagcgatgctgaattatgtgattaagcgcctgctgggcctgatccccactctgcttatcgtcgcggtgctggtgtttctgttcgtccatatgctgcccggtgacccggcgcggctgattgccggacctgaggccgatgcccaggtggtggcgatggtgcgccagcagctggggcttgaccagccgctgcatgtccagttctggcactatatcaccaacgtgctgcgcggcgattttggcatttccatggcctcgcggcgtcccgttgccagtgagattgccagtcgctttatgcccacgctgtggctgacgctggccagcatgagctgggcggtactgttcgggatggcggcggggattgcggccgcggtgtggcgcaatcgctggcccgaccgtctgggaatggcgctggcggtgagcggtatttcgtttccggcttttgcccttggtatgctgctgatgcaggtgttttcggttgagctgggctggctgccgacggtgggggccgacagctggcggcactatattttgccgtcgttgacccttggcgcggcggtggcggcggtcatggcgcgctttacccgcgcgtcattcgtcgatgtgctgcatgaagactatatgcgtaccgcccgggcgaagggggtgagcgaaacgcgggtggtgctcaagcatggtctgcgcaatgcgatgatcccggtggtgaccatgatggggctgcagttcggctttctgctcggcgggtcgatcgttgtggagaaggtgtttaactggccggggcttgggcgcttgctggtcgattcggtggagatgcgcgattacccagtgattcaggcggaagtgctgctcttttcgctggagtttattcttatcaatttagtggtggatgtgctgtacgcggccataaacccggctatcaggtataagtaaggtgcgattgcttaactggagaaggcaggcggcgctgaacgccatgccgggcatcagacccggcgagatccataccccctggcatgagttctggcggcgctttcgtcgccagccggtggcgatgggcgctggtattttcgtgctgttgctgattgcggtagccatcgttgccccatggatagcgccgtacgatgcggaaaattatttcgactacgaccgtctgaacgagggaccttcgctggtgcactggtttggagtcgactccctgggacgggatattttcagccgggtgctggtcggggcgcagatctcgctggccgccggggtactggcggtgctgattggcgcggccatcggcacggtgcttgggctgctggctggctactatgagggctggtgggaccggctcattatgcgactttgcgacgtgttgttcgcctttccggggatcctgctggcgatcgcggtggtcgccgtcatgggcagcgggatggccaacgtgatcatcgccgtggcgatcttctcgatcccggcgtttgctcgtctggtgcgcggcaatacgctggttctgaagcagcagacctttattgaatcggcgcgcagcatcggcgccagcgacgccaccattctgttcaaccatatcctgccggggacggtgtcatcgatcgtggtttatttcaccatgcgcattggggtatcgattatttcggcggccagtctgtcgtttctcggcctcggcgcgcagccgcccaccccggagtggggcgcgatgctcaacgaagcgcgggcggatatggtgatgtctccgcacgtggcgctctttccggcggtggcgattttcgtgaccgtgctggcgtttaatctgctgggagatggcctgcgcgatgcgctggatccgaagttaaaggggtagggtgagggaaagctccgccgggagtcctttatgttatctgcggcttcagcgcacattgcgcttccggttaattttctgcgttatgtctctcatggcgcagggagcgcacagggggcggccagtcgccgccgccccctgtacccccgggctccggccagcaacatcgccactgcgtggtgccttcgacttatccctgcaggcttcgggtcgggccgaggcagcgtccgtgcaaaacacggccctcagcccgcatccatgcggcctgccccggcctttcgggaacgtctcagcgatgttgaggccgccagcatcggctgtttcagcggccccatgtccggcggcgattcacatattgggactggaccccgtaggccgggtaagcgtagcgccacccggcaaaataaccgcgcaacagggctgcctggaaggtaatcaatgcttgcccgcggcgctgcgcttgcgcggacccgggggtgagcctacgggaggaccccgtaggccgtggaatgcgctaagccgctatccgggaagctggactagacccgggtaccccacaggtcgtattcgtcggcgtgctcgactttcacccgcaccacgtcgcccggcttaacgcgggtttcgccgttcaggtacaccgcgccgtcgatttccggagcgtcggccatgctgcggccaatggcgccttcttcatcaacttcatctaccagcaccaggatttcgcgccccactttctcctgcagacgctcggcagagatctgctgctgcagctgcataaagcggttccagcgctcttctttcacctcttccggcacctggtccgccagctcgttggcggtagcgccttcaaccgggctgtacttgaagcagccgacgcggtcgagacgcgcctctttcaggaagtcgagcagcatctggaaatcttcttccgtttcgcccgggaagcccacaataaaagtggagcgcagggtcagatccgggcaaatttcacgccactgcttaatgcgcgccagctgacggtccgcagaacctggacgcttcatcagcttcagaatacgcgggctggcgtgctgcagcggaatatcgaggtacggcagaatcttgccttccgccatcagcgggatcacatcgtcaacgtgcgggtacggatagacatagtgcaggcgcacccagatgccgagcttcgccagctcttcgcacagactgaccatgctggtcttcaccggcataccgttgtggaagccggtgcggtgcttgacgtcgacgccgtaggcagaggtgtcctgcgaaatcaccagcagctctttcacgccggcgtcagcgaggcgtttggcttcggccagcacttcgccaatcggacggctcaccagatcgccacgcatggacgggatgatgcagaaggtgcagcgatggttgcagccttcagaaatttttaagtaggcgtagtggcgcggcgtgagcttaaccccctgttccggcaccaggctcaggaacgggttgtgcttcggcttcggcgtataatgatggacatgctccagcacctgctcatagctgtgcggaccggtgatctccagcaccttcggatgcacttcgcggatctgatcctctttcgcgccgagacagccggtgacgattaccttgccgttctctttcaacgcttcgccgatcgcttccagcgattcctgcacagcgctatcaataaagccgcaggtgttaacgatcaccatatcggcgttgtcgtaggtcggtacgacgtcataaccttcggtgcgcagttcggtcaggatacgctctgagtccacgaggtttttcgggcagcccagggagacgaagccgattttcggctgatgcgtgacattgctcatagcttaaaaagtgttcaattattggaatggtcagggcaggaattctacagatctttgcgaaaaagagtatagctccgtcgcggttaatggtgaaaaagcgcccccgacctgtcttttacgccccccaccgccagagcggatcccacacgccccggagcagaggggcgggacacgcttctgacaagccgtgcgcgcaggcggctcaagcccggcgtggctgccgggcagagacttattgcgccgggttaatggctgcggagggcgtggcgccggtttttttcggctcgcgcttatcctgcagcgtgaaaatagagatcagggtaaagagcccggcgacgctgccgagaatcagataggtgttggcgaagccaatggtatcgtacagatagcctgccagcggagagtaaatagcggtggcgatcgaggcgacgaacagcaccagcaaatagaccgtcgaagagagcttgtggtcgaagttggcggcgatgaatttaaagaccgataccagaatcaacggcttctccagagcatgcatcattttcaccgcaccaatccacaccgggccgaggggcacggctgagccgacaatacgtaccgacatgatcagcccggcgatgatcagcgcccatttggcgccggtccggttaacaaaccatggcatcaggcagaggaacagggtttcaccgcagacctgaatagacgcgaggatcccgtaccagcggttgccttcctccggcgtcgggaactgtagcgagaagtactgggcaaactgctgatcgtaggtgtcgtaaatctgcgtgacgaacagggtaaagagcagcagcatccagaactgaccattcttcgccagctcaagggcatgagagaccttcagcgattcgcttcgcgccacatcggcgtcggttaattcaattttggttagcataaagcagatggcggcgatgacaatggcgaggctggcgagccagaaggccagattaggattgctgtctatatatttacccacaatccaggccgccgctgcccagcctaacgagccccacatccgcacacgaccatattcgaactgatagcgccgggaaatcttatcgatataagagtcgattactccgcagccggagttaaagatgatccccagatagatccctcccagcaaggcgccaaaccaaaagttgtgcaccagcagcggcgcgtaaacgtagataaagaaggggcccaccggcaggagcagggcgaccagcagccagataagccgttttttcaggccgaacttgtcagagataaagccgaagaaaggctgcatcagcagggcgataaaggcgttgaccgagtaaagcagcccggtcttcgtggcgctgatgccaagatgctgggtggtccagataacgaagaaagccatggtcgacgaccaggcgaacaggtagaggaaatcgaaaagactcaacagaaggtagtttcttttaccggacgtcatgtttcagttccttgcaaatgggcagagagaatttcagcgatccgcgggccgcgttcgctgttttcctgacatgttatacgtattacattaattatttgttatgacatcctaattgacgatggtgcaacaggtcatatgaggtattgtgatcatcgctgcactaattttgtcttttattgccattttctgtttattaatttcatattgaaattaattgtgatcgtataacattatttttgttatacaccctacaatgcgttaaagttgccacattgtaaatgatgttaaagaactggggattattgacctggcgcatcattttgcacaaaaaataaccgtattatggaaagggtaaaggacgacagaggaggaaccgtgatgaccgttgacagactataccgccaccttctgcagaagcttattaacgccaatatcgatattgacgcctatctgcaactgcgaaaggccaaaggctacatgtcagtcagcgaaaatgaccatctgcgtgataacttgtttgagctttgccgtgaaatgcgtgcgcaggcgccgcgcctgcagaatgccatttcaccggaggagagggatgtccttcgcctggccggcgaatcggtcgccgccgctgcactatgcctgatgagcgggcatcatgattgtccgctatacatcgctgttaacgtagagaagctagaacgctgtctgacaggattgacctcaaatattcataaattgaataaattggcgccaatcactcatgcctgatcggctgaaacccaggggaagtgaacgcttcccctgttaaaggttatgtaaaaatcgccgcgcaaatttccccgctggctaccctttagcccagagctgacgaaaggagaatgccatgcgtccgatcccactgctgttgatattgagcgccttagcgctaccagccctgagccaggccgcggtgcgggtggaggtattgcaaaaccggctggcccagccgtggggcatggcctttctgcctgacgatcagggcatactgatcaccctgcgcggcggcgagctcaagcgctggcagccgggtaaaggtctgtcggcgccgatagccggcgtgccgcaggtatgggccaacggccagggtggcctactggacgtggcgctggccccggatttcgcccagtcgcggcgggtgtggctgagctatgcggaaagcgacgccagcggtaaggcgggcaccgcggtgggctatgggcggttgagcgaggatgccacgcagctgacgaactttaccgtggtctttcgccagcagccgaagctctccgtcggcaatcattttggcggcaggctggtgttcgacggcaaaggatatttgtttatcgggctgggcgaaaataatcagcgcgccaccgcccaggatctcagcaagctgcaggggaaagtggtccgcctgacggagaccggaggtgtaccgccggataacccttttgtcggccgggctgacgccaggccggagatctgggcttacggcatccgtaatccgcagggcatggcgatgaatccctggagcgaggcgctgtggctgaacgagcatggcccgcgcggcggagatgaaattaatattccgcaggcggggaaaaattacggctggccgctggcgacgcacggtattaactacagcggcctgcccattccggaagcaaaaggcaaaacggttccggggaccgaacctcccctgtatgtctggccggtctctcccggggtgagcgggatggccttttattcggcgccgacctttccccagtggcagcataagctgtttatcggcgcgctgaaggagacatcgctgattgtcctggcggtggacggtaatcaggtccgcgaggaggggagattactggaggcgcgcggaaaacgcatccgcgatgttcgcgtgggacccgacggctatctgtacgttttaaccgacgagtctaacggcgagctattgcggttgagtcccgaggcttagcctcaggtcaccgggatctgcactacttcgcgccaggcaggacgttggctaatctgctgataccagcgctgcagatggggccgcggttgccagctgtcgtggatcgacaacagattgtagacgaagggagcgacggcaatatcgccaaggccgaactgctcgccggagagccacggcgttttggccagttcgtcatccagcatggcgaacagcgcttcgcaggcgctgatccccgcggcgatggccgccgggtcgcgctgctccggcggcgttctcaccaggcccattaataccgggcgatgggcgggagagagggtgccgttggaccaatccatccacttttccccttgcgcgcgctgcgccggcgcggcaagccacagacggtcaacgccatactgggccgccaggtagcgaataatcgtatttgattcccacactaccaccccggtggcatcgtcctttaacagcggcaccagcccgttcgggttcatcgccagatattccgggtcatgattgagaccaaactccagcccggcgaggatctgctgataaggcagatccagctcctccagcacccagcgtactttcttcacgttggtcgagttattacgtccccacagtgtaatcattttcgctcctgagtttgtttcactgccgttgcagcgcgatcggcgatcatgttgggataaagttaaaaatccggcaagcttttttatttggctgttattaaaggtttttatgcttactcccttcagccaggggcactcctgggttacagggcccggaaagtgtttttactattttacaggagtaatatctatagggtgttacgctacgaaggaaagggcgtgaatatggtgtatcttattgataattaaagctttaaatcatgcatgcatctataaaaacgctccctctccgtctcggttaaaatctcaatgtcgcctgagggtataatttgatgctgattattgcatcgcaatcatctgaggaacacaggttaatattaataaatagaaagtcagtgaaagaattatatttttacagggatgaactgttgtttttatcgatcggatatacatctttttcatcccacccagaaaaaatagaccatgagaggcgccgactggctggaagatattctgaaaaatagcaaaaaaaacccagtgactggcactggggagtaaatttactcagggttgcatgctgttctcaagataatattcgagtctcgaagtatgggttaaccaaaggtaaccatcaacttccatacagactacatgggaaatatactgtattaaataaccaggaatccacccttacttttgtgctatttatcttacctgggtaattacggcgggggtaagtggtatataatgcaataatcagtatttgaatctatagcgttaaacgagcagagcctggtagaggactttactttccccggaaggatttgaaaaaggcggttaaaatgaatgactgataaggatggccagcatactatcgcggtgctatcaaaacatccctgcaaaacgaaatagggataaaagaagcactggcgaactgcagtctggaagagcgagtcgtagagctcgatatggcatcggacgagaagggtaggagattacccgggaagagatgttaaccttttcatcaaaccggcgtgattaataacgggcaacagaatcagagcggcccggggttttgagagcaatacttctgtaaaggccacggctgtggatgcgctgttatgaatgtatttgtaaaatttatcaccatccagagtcgccttgaaaaaaaaagcccagcgacaggctggggtgtaattacacgcataaagggatatgccattttcaacacaatatgcgaatcttaatttatggaataactgcgggtgagctacccgcttccataaagattgcaggggaaactatactgtatttaatgaccaggaatccatccttatcgatgtgctatttttcttacttgtgtaatacggaaagggaaaatagcccgataaactatcttttaccgatatgccgactaaaacaggaaagccgtctgcctgcttatccagtgggcgaataattcatatcattagcgggaggctctcccttcctgacctcaattcctgatggtggcgtatagaggggatagctgattgatatcctttatcaaggagattgcgcctccatcggcggaatgctatggcaatcgaagccctgctgaacatggcgatcaggcaggcccgatggagagaaaagtgcgggcgttgttgctaatttcctgagacgggcgtaatgaccgtctcaagcatagcccgggagttctcaactgcatttcaggcgtaaatacggcctacagaaccttcaggtttatatttaagcgtctgagacttctacagcagcaagccagatgtggttattgtgagttcggaagttgaactgggcctcatggaatgcaaccgggccgacattttgagttttgtgaagggtatcagcagtaacaaccatccccggttctcaggtgaagggggtaggggcgacgcgactggatatcactggccaggctttcgcttaccccacacggccccgccataatgtgaatctatgaccaggcaaaccacaatgaaagacacgcttgcgacgtctctttagtagcattttccccgaagagaagtgagctatgtcattgaaatttcggtgactaattggttttgaaaggcgatttttttcttgccataataaagttaacattaaggcgattacgatcaaaaaaattgttctgattaaagcacagcggcatgttattgcgtaaactttaaaaactttaccaactcgctgtttctttaaggtcatttgtacgctttactcaccggttgctgcggcgcggtcagagtggcgcggcatattttgtttggaaaggatacttgggtggctcttatgatgcatgacgctttttcccttcgcggcctcgcggcaggttgcgcgctgttatttcttgtcgcacctgcggtgcaggctgcggaacaactccccgacgccccttcaattgacgctcgcgcctggatcctgatggactatgccagcgggaaggtgctcagcgaaggcaatgccgatgaaaaactcgacccggccagtctgacgaagatcatgaccagctacgtggtagggcaggcaataaaagcgggaaaaatcaaactgaccgatatggtgaccgttgggcgcgatgcctgggcgaccggcaacccggcgctgcgcggctcatcggtgatgttcctcaagcctggcatgcaggtttccgtagaagatctgaacaaaggggtcatcattcagtccggtaacgacgccagcattgcgattgctgactacgtagcgggcagccaggacgctttcgttagcctgatgaacggctacgccaaaaaaatggggctgaccaacaccacctttatgaccgtccacggccttgacgcgccggggcagttcagcaccgcccgcgatatggcgctgctgaccaaagcgatgatccacgacgtaccggaagagtatgcggtacataaagagaaagagttcactttcaataaaattcgccagccgaaccgcaaccgcctgctgtggagcagcaacctcaacgccgatggcgtgaaaaccgggaccaccgccggggccggctataacctcgtctcctcggccactcagggtgatatgcgtttgatcgccgtggtgctggggaccaaaaccgaccgcattcgctttaacgagtcagaaaaactgctgacctggggcttccgcttctttgaaaccgtgacgccgattaaaccagatgccaccttcgttacccagcgcgtgtggtttggcgatagcaatgaagcgaaactgggggctggcgaggcgggctctatcactttgccgaagggccagctgaaaaacctgaaagccagctataccttaaatcagccgcagcttaccgcgccgctggagaaggggcaggtggtcgggactatcgactttaagctaaatgataaaaccattgaacagcgtccgctgattgtcatggagtcggtaaaagagggcggcttcttcagccggatgatcgacttcgtgctgatgaaactgcacggctggttcggcagctggttctcctgatgcctgcccgcgccctgcggggcgcgggcagcgacgcttcaatacagtagggaaatctgctgcgccttcgccagcgcgaccagctcatcatccgggcagatatcgctggcaatcacgtcaaatttcgctaacgcccccatgcgcgccggacgcactttgccaaacttgctgtggtcgaccaccagcacgtgatagcgcgcgtgacgcatcgcccagtgcttaaccggcagctcttccaggttatagcaggtcgccccctgctcgcagtcgatccccgccgccgagtaaaaggcgatatcagggctcagatggctgagggtatcctcaaggctcagcggcataaaaatcgcgttgctggcatgaaactccccaccgcacaggaccgcgcggcactggggtttttcctgcagggccagaaaggtgttcagggagtagcagacgccggtgaagggcagggcatcgtcaatggcgtcaataatccacggcgtggtggtcccgcagtcgaagaaggccatctgatgggcctccagcagcgcggccgcatggcgagcggcacggcgtttttcctcaaccagccgggttttttgatcgctgagcaggtaatgggtggcgctgcgcggctccagcacaatgtatccgccgagcagcacaaccgggccgctgtggccattgaggtcgcgacgaatggtcatttccgacaccccaagcagggaagcggcttctttcagatgcagcttatcgctgcgtttaagtgcctgaatgagctgactgatacgttcgtcacggcgagtttccatattccctctgcgctaaaatcgccctgcgggggcagggcgttagcgggattttacctgtcgcttgcgggttagtcacgcggtggccgcagcgacggcggcgtttagccgcgcacccaacctttgcggattggcaaggagaagcagagacgatacagccgctgcagctgatggtatagcgccgggccgaacgtatgccagatcagcgccgcgccaaggcagccgcacatcccggccagcagcccgccgaccatatccagcggccagtgcacgccgagatagacacgggaccaggcgatggcggcggcaatggccatcagcagggcgccggaccacaggcgatgccagaacaggaaggccagggcaaaggtaaagctgacggtgccatggtcgctggggaaggagtcgtccgccgcgtggtgcaggaagttatagcctacgccggcgacaaacggccgatcgtgcggataaagatggccgatcgtccacgacacggtcaggctgatcgtcagcgccagcatcagcttaaacaccatctgccgctgggcaggcccccacagccacaatgtcaccaccagcagaggtacgatcagaatcagatctttagcgatgaagatcgccatctcaatggcccactgcggcgaggcaggcgtcgcgttgagcagggcgaacagcgcatagttaatattttccagcatagacttccaggctcgttggtccgatagcaattaagccgcctaccctaaataaaagcggtgcggagataaaggcggcattgtcttaaagatcaggttgttatgaaatccactaccataaagtctacggctaacagcctgaaaaacgtcagtatatcgtttgtcacattgctgaaacataaacggaatatatacacaggctgaataacaggggagaggcaggacgatggcgcacggctcgtaatattgtgcggtgtcacccacaattcactatctccgcgccgggagtttcattacactttgcgcgatttttgatagataagagatttcatgcaaaattattcgctttcaggccgccgcctcggaaggcaggcgctgttgttcccgttatgtctggtgctgtacgagttttccacttatatcggcaacgatatgattcagccgggcatgttagccgtggtgcaggaatttcaggtgggcaacgaatgggtacctacctcaatgactgcctatctggcaggcggcatgtttttacagtggctgctggggccgctgtcggatcgtattggccgccgtccggtgatgttgaccggcgtagtatggttcatcgtcacctgcctggcgacgctgctggcgcagaccattgagcagtttaccctgctgcgcttcctgcaggggatcagcctgtgctttattggcgcggtgggctatgcggcgatacaggagtcctttgaggaggcggtgtgtatcaaaatcaccgccctgatggctaacgtggcgctgattgccccgctgctggggccgctggtgggcgccgcctgggtgcatgtcctgccgtgggagatgatgtttgtcctgttcgccgtgctggcggccatctcgttcttcggcctgcagcgggcgatgccggagaccgcgacgcggctgggcgaaaagctgtcggtgaaagagctgggccgcgactatcggctggtgctgaagaacctgcgcttcgtcgccggcgcgctggccaccggctttgtcagcctgccgctgctggcgtggattgcccagtcgccggtgattattatcagcggcgaacaggccaccagctatgagtacggcatgctgcaggtgccgattttcggggcgctgattgccggcaacctggtgctggcgcgcctgactgcgcgccggaccgtgcgctcgctgattatcatgggcggttggccgatcatgtttggcctgatcctctctgcggcggcgaccgtggtctcttcccacgcttatctgtggatgacggccggtctgagcttctacgccttcgggattggcctcgcgaacgccggcctggtgcgtttaaccctgttcgccagcgagatgagtaaaggcacggtctcggcggcgatgggaatgctgcagatgctgatcttcaccgtcggcatcgagctcagcaaacatgcttacgagctgggcggcaacgggctgttcagcctgtttaacctgctgggtggggtactatggctggggctgatgatttactttctgaaagataaaagcgtcggcaattcgcagcaggggtagttgttttcaacccggatgcgctcgcatccgggtcttatcaggcgaacggcgcttcgcgatccaacaccttatcaataatctgcaggacaccttcttcgttgttatgcggcgcctgatagcgggcgacggctttgacgtcttcccgggcgttggccatggcaaagccaaacccggcgtgctgcagcatttcgatatcgttgccgctgtcgccgaacgccaccacctcgtgatcctcaatgccccagcgctgctgcaaaatgcgcagcccgttggctttgtgcacacccgggataattaagtcgatgctgccgtagccggtggccaccgcggtgaccatgtcccccagcgtcgcgtgcagcttcggctgaatttccgggatcaggctgtctggcacgttgagaccaaatttgaggatggtgtcatcgagatggttaaaatcatccaccagttctaggcggtgataatacttcgccgccaccgtcttcagcgcgtcgttgtagcgattgagggtgtaggcgctgcgcttcccgcaggcgatgatttcgatattcggcaacgtctgcagatggtcgaccacggcgttgaagtggtgaaccggcagttggcagttgaagacgtcttcattgccgctcaccacccagccgccgttttccgccacgaaggcgatctgatgggcgatctccgggaaaaaggagatcagctgataatattggttgccgctggcgaccacgaagcgaatattctgttcgcgcattcgctggtactgggcgaggaagcgcggccggttataagttttggcatcgcttaaaaaggtgccgtccatatccaccgcaatcagtttgatgctcattagctgttctccataacgggttcagattgtggcttagccaccgcgcgggcgaccagcgccgccgccatcaccagacccagcaccaccatcatggcgctgcgcaggccgaagtgttcgccgaggaaacccagcagcggcggcccgacgaggaaagcgagatagccggtgatcgccaccacgctgacgcgcttgggcgcgtccggcccggtatcgctggcggcggagatggtcagcgggaagccgagcgaggcgccaatgccccacagcagcaccgagatgcccgccacccaggggttatcgacgaagatgatcaggcctatgccgagggcgcccatcactgcgctgccgcggaccaccgccacccggctgtagcgatcgataaaccagccgccggtaaagcggcccagcgtcatgccgagggtgaaaccggcataaatcagggagccggaggtggggctaaagccgtggccatccaccatcagcagcggcagccagtcgttggccgagccttcggcaaaggccatcgccaggacaatgacgccgatcagcagcagctgcgcgtcgcgccacaccggcagacctttcgcctcaccgtgggcgacttcggcggcatttttaccggtgccgtcgggaatggcgcggatagcaatggcgatgggcaggatagccaccagcgcagccgccaggatgtgcggggcggccggcagaccgaatccggtcactgccatgcccaccccggcgccgaacagggtgccaaagctgtagaagccatgcatcatcggcagcaccgttttattcatctcccgctcgatggccgcgccttcgacgttaatagcgacctctgcggagccgaagctggcgccgaagatagccagaccgaaggcgaacagcggggcggaagtgacccacagcgccaggctgagcaccagcatgccaagcacggcgaaggacatggtggtgcggatgaccttgcgggtaccaaagcgcttcaccagccacgccgagcagagaataccgctcattgaccccaccgacagaccaaacagcaccacgcccatctctgcggtggatagcgccaacagatcgcggatcgccggcgtgcgggtggcccaggaggccattaacaagccggggatgaaaaagaacataaacagcgcccatagccgaagctgcagcgctctgcgcgaggattgcgtcgtcatccgtaaacgccttaaaggagaagagtgaagacaacagtagcaagtaagtgtacatttgtacataaaccggaagaggaaaatcatggcccgtagaccaaacgatccgcagcgccgcgagcgcatcctgcaggcgacgctggataccatcgcggcgcatggcatccatgcggtgacgcaccgtaaaatcgccacctgcgcgaatgtgccgctgggatcgctgacctactatttcagcggcattgaggcgttaattgaggaggcgttcagcctgtttaccgccgagatgtcggcgcagtatcagcaaggcttcgtcggggtaacgaaccgggaacaagcctgcgatgccatcgcggatctgatcttcagcgcccaggtgaccacggcgcgcaatatggagctgatgtaccagctgtacgcgttctgcagcagtcagccggcgctgaaggcggtgatgcagaactggatgcggcgcagccagcagacgttggagcagtggttcgcccccgataccgcccgcggtctcgacgcctttattgaagggatgaccttgcactttgtcaccgaccgcgcgccgctgtcgaaggcggcaatccgcatgatggtcgggcagctggcgggggagagggcgcaggaagaggggcgctgaagcggcgtttcacccggaatggctaaacgcaggcaacaaaaaacccatcaaccttgaaccgaagtggcggggttgatgggctccacaaaatggggacatcaaagaaaagcagtggcattacttatgactgatgccctgagaaaaagttctgcctgtgacggcttttttctcaaaaaattattgtagccctggccagatgatcacgatgagcgtcccggcaagggtaagcagcacgttggcgatggcgtaggtccctgcgtagccgagcgctggaatattgctgcgcgcggtatcgctgatgatctccatcgccggggcgcaggtgcgggctcccatcatggcgccgaacagcatcgcccggttcatgcgcagcacgtaggcgccgaacaggaagcagatcaccaccggcaccaggctgacgataagccctgccgccagcatctggccgccgacggcgcccagcccgttattgatcccggccccggcgctgagaccgaccccggccataaacaccatcagaccaaactctttcaccatgttcagcgccccctgcgggatatagccgaaggttgggtggttggcgcgcaggaagccaagcatgatgccggcgaacagcaggccggcggcgttgccgatgccgaagctgaaggagctgaactggaaggtgatcatgccgatcatcaggccaacgataaagaaggcgcagaaggccagcagatcggtcacctggctgtgaatggagataaagccgatgcggtcggccacggtttttacgcggcgggcgtcgccgctgacctgcagcacgtcgcctttgttcagtacgacgttatcgtcgataggcatctcgatctggctgcgaataacccggtttaagaagcagccgtggtcggtaagcttgagttgcgccaggcggcggccgacggcgttgtggtttttgaccacaatctcttcagtgacgatgcgcatgtcgagcagatcgcggtcgaacacctctttaccgttgcggaagctcgggtcgaggcgggcgtgggcgtccgggtaacccaccagcgcaatatcgtcacccatctgcagcaccgcgtcgccgtccgggttggccagaatgccgttgcgacgaatgcgttcaatatagcagccggtctggcggtaaatacccagttcgcgcagatttttgccatccgcccaggccaccagctccgggccgacgcggtaggcgcggatcaccggcaggtagactttacgtttggaatcggtatcgaggccgcgctcgcgggcgatttgctgggcgctggtctgcagatcctgatgctgcagcttgggcatatagcgggcgccgacgatcaggctcaccagaccaaccagagaggtcagggcatagccgaggctcagatggtcaagcgactgcgccagctgatcgctgggcaggccgaaatggcgcagggtgtcgcccgcccccaccagcaccggggtggaggtcatggcgcctgccagcataccggcggtgagcccgatatcccagccgaacactttacccagcaccatggcgatcagcatcgcgctgccgaccatcaccagcgccagcatcaggtagtttttcccgtcgcggaaaaaaatagaaaaaaagttgggcccggcttctacgccaacgcaaaaaataaacagcataaagccgagattaagggcatcggtgttaatcgcgaaatgctgctggcctaataatagagaaacgactaaaacgccaatggaattaccaagttgtactgagccgagacgcagttttcccaggcatagtcctaatgcaagtacaacgaataataacaggatgtaattcccgtttaacaaatctgcgacgtttatattcacgaaagccaacttctcatttactagtaagttgttgaaggaaatggttatttggtctaaggttgctcaggcgttcgcgttgtcgcgaacctattctggcaccctgttataaccagcaaaaatataccgctagtttaatccttcctggatgcggcggctagtgacaatcgtttttaggctggtaggggagttattggcatggattgccgaaatgctttatctgactgggcgacgtggacgtgagttagaggcaacatcaggaggatacggtgaaatctgagcgtagttgggccggcattatctgtggcttcgttctgttcattgtggtgtgcttatcgttgttgttacatatgaaaggggcatttcgcgccagcggcaacccggagctgggcctgctcttctttttgctgccaggggcggcggcgagctgtctctctcccggacggcgggtgctgcgtcctttgctcggcgcgatactggcggcgccggtctgcatggtgacgatgcggctgttcttcgtgacccaccggacgttctggcaggaaatggcgtgggtgttgagcgccgtgttctggtgcgcgcttggggcattgtgctttttgtttatctgcgcctggcttgatacctggcgcagtcattcatcgagcaaataaattgactcaggcaaacaggccgagattctcttttgcccaggcttcaaaatcggtgcagccgccgatgtgtttctggtcgacgaaaatctgcggcacggtttcaaccggtttgccaacggttttttccaggtcagctttgctgatgccttcggcatgaatatccacgtagcggtagttgaaatcatcacgctcgttggtcagtttttctgccagttctttagcgcgaacgcagtaagggcagcctggacgaccaaaaataacggtaaacattgcttctctccttaaacctcagccggatggcgaatggcgcttatgatgcctgcaacgggcggggagggaaagaaggttctgccttttacttcgatggtttacggctatgtttgataaatgtcggactgtcaaaacacgtatactggcccgacggcgcggtggaattggctggcgcgccgcgtttatcaaccggagaggcgtgatgcgaaaatttgccccattgccgaaaagcatactgctggttgagctcctcgggatggggctgttaaccctcgcctggctctcccttaaccagtatgtccagctgcctgcgcccattgccagcccgaccgcggcgctggtgatgctctttgccgggatcgtgctgatgatccccgccgccatcgtcgtgatgtggcggatggcgcagatcgtggccccgcagttaacgcactctccaaagcctgaatccttgtctgacagagaaaaacgaaatgacgccgaccattgagctgctgcgcagccaccgttctatccgccacttcaccgatgcccccgtgagcgacgaacagcgcgcagagattatcgccagcgcgcaagcggcatctacctcgagttttttacagtgcacctccatcatccgtattactgacccggcgctgcgtgaacgtctggtcccgctgaccggcggccagcagcacgtcgcccaggcagcggagttttgggtcttctgcgctgactttaaccgccatctgcagatctgcccacaggcgcagctggggctggcggaacagctgctgatcggcgttgtcgatacggcgctgctggcgcaaaacgcgctgaccgccgccgagtccctcgggctagggggcgtctatatcggcgggttgcgcaacagcattgaggccgtcacagagctgctggagctgccgcagcacgtcctgccgctgttcggtctttgccttggctggccggcggataacccggatatcaagccgcggatgccggcggccatgctggtgcatgagaaccgctatcagccgctggataacgcgctgctggcggagtatgacgaacagctggcgcactattatctgtcgcgcggcagcaacgcccgccgcgatacctggagcgaccatatccggcgcactatcgtgaaagagagtcgtccgtttattcttgactatctgcataagcaggggtgggcaacgcgctgattacgtgtacactgctgctccggccaggtgatatccgccgccggccgcaggaaaggtgaaagtgtgttcgatagctgaggcccgccagagcgggtcttttcgcagaggtgcaggatgaaaattgccatattatcccgggatggaacgctttattcatgtcggcgcctgcgcgaagcagcgcaacagcgcggtcatcagatcgagatcctcgatccgctttcctgttatatgaacgtcagcccggtggcctcgtcgatccactacaaagggcgtcagctgccgcactttgatgcggtgatcccgcgcattggctcggcgatcacctactatggcaccgcggccctgcgccagtttgagctcctgggaagctatccgctgaacgaatcggtcgctattacccgcgctcgcgataagctgcgctcgctgcagctgctggcgcgccagggcatcgatctgccattgaccggcatcgctcactctccggatgacaccagcgatctgatcgccatggtgggcggcgcgccgctggtggtgaagctggtggagggcacccaggggatcggcgtggtgctggcggagacccgccaggcggcggagagcgtgatcgacgcctttcgcggactgaacgctcatattctggtgcaggaatacattgccgaagcgaaagggtgcgatatccgctgcctggtggtcggcaatgaggtggtggcggcgatcgagcggcgggcgaaagagggggatttccgctctaacctgcaccgcggcggcatggccacggtggcgcagattagcgacgaggagcgggccattgccatcaaggcaacgcaaactctcgggctggacgccgccggtgtcgatattttacgcgccgcccgcgggccgctggtgatggaggtgaatgcctcgccggggctggaaggggtggaaaccaccaccggcgtggatgtcgccggcaagatgatcgcctggatcgagcgccaggcgacgccggaattctgtttgaaaataggcggctaaccgccggatgcaagacggccatggtatgcggcgctttttttgcgtaagctatggcgtcgtttttccactgtaagaggtcacaggcactatggattcactggtcgttccaggtctggatacgctacgtcgctggctggacgaaatcggcatcagcttttttgagtgcgattcctgtcaggcattgcacctgccgcatatgcagaatttcgacggtatttttgatgccaaaattgacctggtggacaacgtggtgctcttttccgccctggcggaggtgaagccgtctgccctgctggcgctgtcggcggatctctcggccatcaacgccagctcgttaaccgtgaaggcgtttatcgacattcaggacgataatttgcccaagctggtggtttgccagtcgctgtctatcggcccaggggtgaccatggagcagttcgcctggttcttccgccaaagcgaagagcagatctcgatggtaatcctcgaagccggcgcaaatcagctgctgtacaaaggcgaagaagaagagcctgcggcggaaaacgtgcaataccattttcttcactaaacctgcctaaaattagcgcagccactaccgcagcggctgcgtattacccgcttttattctgcatttaacctttctttaaagcattattcaccgccattcaggccgttttggcttatcacgtagaccgttattgcataaaaatttgataaaaggcgtttttttacctgggctatagcctcttattctggctacagttattctggcgatgcttccagttgcgagcaaccactccgggagagatccgctctccttttctcaggcaatgaaaaaatatgcatgatttttgcatgcgtagaaatgcgtatatttgagcccgtaagttaacgggcgttgagaaggaaaagagatatgaccgcctttggtaaaaaatggttaacaggtctggttacgggtgcgctgatggccgtctctgccggttcgctcgccgccgaacaaaaaaccctgcatgtttataactggtctgattatatcgcgccggacacggtagcgaatttcgaaaaagagaccgggattaaagtggtgtatgacgtttttgattccaacgaagtgctggaaggcaaattaatggcgggtagcaccggtttcgacctggtggtgccgtcggcaagcttcctcgaacgccagctggcggcgggcgtgttccagccgctggataaaagtaagctgcccaactggaagaaccttgaccccgaagtgctgaagctggtcgccaagcatgacccggagaataaatacgccatgccttacctgtgggcgacgacgggcattggctacaacgtggataaggtgaaagccgttctcggcaaagatgcgccggtggacagctgggatctggtgctgaagccggagaacctcgaaaaactgaaaagctgcggcgtctccttcctcgacgcgccggaagagattttcgccaccgtgctgaactacctcggcaaagatccgaacagcagcaaagcggatgattacaccggcccggcgaccgatctgctgctgaagctgcggccgaacattcgctacttccacccttcgcaatatattaacgaccttgccaatggcgacatctgcgtggcgatcggctgggcaggggacgtctggcaggcggccaaccgcgcgaaagaggcgaagaacggcgtcaatgtctcctactttattccgaaggaaggcgcgctggcgttctttgacgtctttgccatgccggccgacgcgaagaataaagatgaagcctatcagttccttaactatctgatgcgtccggacgtcatcgccaaaatcagcgaccaggtgttctacgccaacggcaacaaggcttccacgccgctggtcagcgagactatccgtaacaacccggcgatttatccgccagcggatgtgttcgccaaactgttcacgctgaaggtgcaggatccgaagatagaccgcgtgcgcacccgcgcgtggaccaaagtgaagagcggcaaataattcctgacggcccgtcgaatacgggccaaatcagatctgcactcgccgggaaatagcagcgcgcccggcgagcagaagcaccaggatggtgcaaatgcactgttaagcacgaagtatggcaccggaccatatggtgatcgtttttttgccggagagcacccgattgaacgacgtaatgccccgcccacaggcgaaagcccccaaagcgctgaccccgctactggaaatccgtaacttaaccaagtcgtttgatggccagcatgcggtcgacgacgtcagtctcactatctacaaaggcgaaatttttgctctgctgggcgcgtcaggctgcgggaaatcgacgctgctacgcatgctggcgggctttgaacaaccgaccgccgggcagattatgctcgacggcgtggatctggcgcgcgtgccgccctatcagcggcctattaatatgatgttccagtcctatgccctgtttccccatatgaccgttgagcagaatattgccttcggcctgaagcaggaccgcctgcctaaggcggaaatcaccgcccgggtgcaggagatgctggccctggtacatatgcaggagtttgccaaacgtaagccgcaccaactctcaggcggccagcggcagcgcgtcgcgttggcgcgcagcctggcgaaacggcccaagctgctgctgcttgatgaaccgatgggggcgctggataaaaagctgcgcgatcgcatgcagctcgaggtggtggatattcttgagcgcgttggcgtgacctgcgtgatggtgacccacgatcaggaagaggcgatgaccatggcgggccgtatcgccatcatgaatcgcggcaagtttgtgcagattggcgaaccggaagagatttacgagcaccctaccacccgctacagcgccgagtttatcggctcggtgaacgtctttgaagggctggtgaaggagcgtctggaagacggtctggtgctaagctcgccgggactgatgcatccgctgaaggtcgaccccgacgcctcggtggtggacaacgtgccggtctgggtggcgctgcgtccggagaagatcatgctgtgcgatgaaccgccggcggacggctacaattttgccgtcggcgaggtgattcatatcgcctatctgggggatctctctatctatcatgtgcgcctgcaaagcgggcagatgatcagcgcccagctgcagaatgaacaccgccatcggaaagggacgcccacctggggcgatgaggtgcgtttatgctgggatgctgacagctgcgttgtgctgacggtgtgaggagagggcgatgaataccgttgaatccccgtcaggggcgaaaaaaccgggcggcttcgcgctgtgggcggcgcgcctgcagatggcgcatggccgcaagctggtgattgcgctgccctatctgtggctgatcctgttgtttatgctaccgttcctgatcgtgttcaagataagtcttgccgagatggcgcgggcgatccctccctacaccgagctgatggagtgggcggacggccagctgacgctgacgcttaactttgccaacttcctacagttgactgacgatccgctctattttgaagcttatctccagtcgctgcaggtggcgggtatctcgacgatctgctgcctgctgctgggctatccgctggcctgggcggtggcgcacagcaagccgtcgacgcgtaatattctgctgctgttggtgatcctcccgtcgtggacctcgtttttgatccgcgtctatgcctggatggggctgctgaagagcaacggggtgttgaataacttcctgctgtggttaggggttatcgatcagccgctggagatcctgcacaccaacctggcggtgtacatcggtatcgtgtatgcctatctgccgtttatggtgctgcctatctacaccgcgctgacccgcatcgactattcgctggtggaggcctcgctggatctcggcgcccggccgctgaagaccttcttccaggtgatcgtcccgctcaccaaaggcggcattatcgccggctccatgctggtgtttatcccggcggtcggcgagttcgtgatcccggaactgctgggcgggccggacagcatcatgattggccgcgtgctgtggcaggagttctttaacaaccgcgactggccggtcgcctcggcggtggcgattgtcatgctgctgttgctgatcgtgccgatcatgtggttccacaagcaccagcaaaaacagatgggagagcagggatgaacgacttgccggtagtacgctcgccgtggcgcattctgatcctcgtgctcgggttcaccttcctctacgccccgatgctgatgctggtgatctactcgttcaacagctcgaagctggtaacggtctgggccggatggtcgacgcgctggtatagcgaactgttccacgatgatgcgatgatgagcgcggtaggattgagcctgaccatcgccgcctgcgcggcgacggcggcggcgatcctcggtaccatcgccgcggtggtgatggtgcgctttgggcgttttcgcggctccaacggcttcgcgtttatgatcaccgcgccgctggtcatgccggacgtgatcaccggtctctcgctgctgctgctgttcgtggcgctgggacatgccatcggctggccgtcggaccgcggcatgttgaccatctggctggcgcatgtcaccttctgtaccgcctacgtggcggtggtgatctcctcgcgcctgcgcgagctggaccactccattgaagaggcggcgatggatcttggcgccgcgccgctgaaggtcttcttcgtcatcacgctgccgatgattatgccggcggtgatctccggctggctgctggccttcacgctgtcgctggatgacctggtgatcgccagctttgtctccggtcccggggccacgaccttgccgatgctggtcttctccagcgtgcgcatgggggtcaacccggagatcaacgccctggcgacgctcatcctcggcgtggtcggtattgttggttttatcgcctggtatttgatggcccgcgcagaaaagcagcgagtgcgcgatatccagcgtgcaagacaaggctgaaccacctaaaatcggtacagcagcctccggtcggcgccaccctgtggcgccgttttcatggaagacattacgttgggattgtttacgaaaactcgctcatcgcatgcccgccttaacgtccctgcgctggtgcaggtggcggcctttgctattattttgattcgtggcctggatctgctgatgatccttaatctgttgggcctgcaggggctgaacgaattcatacaccgcagcgttcagacctggaacctgacgctggtcttcctcggcagcctggcgctggtgtttatcgaaatctggtgcgccttctcgctggtgaaagggcgcaactgggcgcgctggatctatctgctgacgcagattatcgctgccggctacctgtgggcggcgtcgctgggctacgggtatccggagctgttcagcattcccggggaatcaaaacgagaaattttccactcgctggtgatgcaaaaactgccggatctgctggttctgacgctgctgttcgtgccggcgaactgccgtcgctttttccgcctgcaataacggtgatacaatccccgcccctggatttttgaaggtcaattatgcattgcgcactctacgacgccggccgctgccgctcctgtcaatggctggagcggccggtcccgcaacagctcgccgataaaatggccgatctgcgcacgctgctggcggcgatcccggtcgcagcctggggcgagccggtcagcgggccggaggcggctttccgtaacaaggctaaaatggtggtcagcggcagcgttgagcgtccgctgctggggatgctgcaccgcgatggcactccggtggacctcaccgactgcccgctctatcccgccgagtttgccccggtttttgctaccctgaagccctttatcgcccgcgccgggttaacaccttacaacgtcgcgcgcaaacgcggggagctgaaatacctgctgctgaccgccagccagcagggggagatgatgctgcgcttcgtgctgcgctcagaggccaaggtggctcagctgcgcgccgcgctgccgtggctacaggcacagctgccgcagctcagcgtgatcacggcgaatatccagccggtgcatatggcaatcatggaaggtgagcaggagatcttcttcaccgaacagcaggcgctgggggaggtctttaatggggtgccgctgtggatccgcccgcaaagcttctttcagaccaatccggcggtagccagccggctgtacgccacggcccgcgactgggtgcgcgcgctgccggtccagcatatgtgggatctgttttgcggcgttgggggatttggcctgcactgcgcgacgccgacgatgcgcctgaccggtatcgagatcgccccggaagccatcgcctgcgccagacagtcagccgcgcagctggggctcagcaatctgcattttcaggcgctggactccacgcagttcgccactcacgaagcggatgccccgcagctggtgctggttaacccgccgcgccgcggtattggcgctgaactatgcgactatttaagccgcatggcgccgccctatattatctattccagctgtaacgcccgcaccatggcgaccgatatcgctcgtcttagcggctatcgcgttgagcgggtccagctgtttgatatgttccctcacaccgcccactacgaagtgctgaccctgctggtccgcgaagtttaaacaaaatgtgaaggctttgcgccgctgaaatcgggtaagcttgaggcagcatgttttgttattggtggggggaatctaatggccaaaaccattctgctggtggaagatgacgaggatatagccacgctgctgcggctcaatcttcaggatgagggctatcagatcgtccatgaagccgacggcggccaggccctcgcccggctggagacgcaggtctgggatgcggtgatcctcgatttgatgctgcccggcgtcgatggtctggagatctgccggcgtatccgccagatgacccgctacctgccggtgattatcatcagcgctcgcaccagtgaaatgcaccgcgtgctgggcctggagatgggcgccgacgactatctggcgaagcccttttcactgctggagcttatcgcccgcgtcaaagcgctgtttcgtcgccaggaggcgatggggcagaatctgctgatggacgccgggcgcctgtcctgccatggcctgagcatcgacccgctgtcgcgcgaagtgaagctgcgcggcgagacggtggacctcacgccgcgtgaattcgacctgctgtattacttcgcccgccaccccggggaagtgttttcccgcctggcgctgctggagcaggtctggggatatcagcacgagggctatgagcataccgtcaatacccatatcaaccgcctgcgcagtaaaatcgaacgtgacccggccgagccggacatcattcttaccgtctggggaaaaggctataagttcgccccggtgacgcaagaggccgtcccgtgatccgccgcctgagcctcagccagcggctggcgctggtggtggtttccctgctgatgctatgcgcggtggcggtatgcgccgtccagttacacagcagcgcgcagtatggcaacgccatggtgcagcgtctgtcgtccgggctggctcaacagattgtcgcccgcgagccgttgctggacgcccacggcgaggtcaaccggcaaaccctgaagtcgctgtttgaccgactgatgacctttaatcccagcgtggagctctatctgctgtcgccggatggcgatctgctggccgatgcggcgccgccgggccatatccagcgccagcgtatcgacatggcgccggtgcaggcttttctcaccggcagtgcgtcgccggtgtatggcgacgatccgcgcagtcccgacggacgaaaagtcttcagcgccgccccgctgcgcgtcgacggccaactgcgcggctacctgtatatcattttgcagggggagacgtttaatcagctggcggccgacgcctggcaaaaaacgctgtggagcattgttctgtggacgctgctgctggtggccctgtttggcctgctggcaggggggctggcatggttctgggtcacccggccggtccgcctgctcaccgcccaggtggcggcgagcggccaggacagcatcagcgccatcaaaaccctggcggcccgcaggccggagccccggcctggtaacgaggtggcggtgctcgagaaccgctttattgaccttgcccggcagattgccgatcagtgggatcggctggccgacagcgatcgccagcgccgtgaatttgtggccaatatctctcacgatttgcgcacgccgctgacttcgctgctggggtatctggaaacgctgaccctgaaggatgaatggctgaccgccgaggagcgcaggcagtatctcaccatcgccctgcgccaggggaacaaagtgcgccatctctcgcagcagctgtttgagctggcgcgactggagcatggaggcattaagccgcagcgcgagcgtttcgcgatgggggagctgatttccgacgtggcgcagaagtttgaattaactgcccgcacgcgcgaggtgaacctgcatattgatgtaccgggaccgctgccgctgattaacgccgatgtgtcgatgattgagagggtggtgaccaacctgcttgataacgcgatgcggcatactcccgtcggcggggagatccgtctggcggtctggcaggagaatcaacagcttcaggtcgaagtggcagacaacggagcgggcgtcgatgccgcgctgcgcgacgatctgttccagcggccgtcggcgttgtctacccaggcatcgcgggaggagcgcggcgggttagggttgctgattgtgaaacgaatgctggagctgcacgggggcgatatcagactggtggagtcggtaagcggggcgcggttcaggttcttcgtgccactttgagaaatcgccgggtgacggctacgccttacccggccatcgtggaagagcggtggccgggtaagcgcagcgccacccggcgaaaaaagttactccgggaaccactggttgctaattttctggtaggtaccgtcggccttaatcgctttcagcgcggcgttcagtttctccagcagcgccttgttatccgggcgcacggcaatgccgagtccggtgccgaagtattgcgggtcggtcactttcggcgtggctgcccccagctgcgggttagttttcagccattcgttgaccaccgcggtgtcgccgaacacgccgtcgatacggccatttttcaaatcgataatcgcattctggtagctgtcataggcgacggtcttcacctcaggatgcttatcctgcagatatttctggtgggtggtgccgttttccatgccgatccgtttgcctttcaggtcatcgaaagaatggaacgcatcttttttggcgatcaccagcgccgagttggcgtagtacgggtcggtgaaggccacctgcttgctccgctccggcgtaatatccattccggaaatcaccgcatcatatttcttgaacttcagcgccgggatcaggctgtcaaacgcgtggttggtaaaggtacattctgcctgcatttgtttgcacagcgcgtgggccagatcgatatcaaagccgacaatctggttatttgcgtccatcgattcaaacggcggataggttgcggagacgccaaagctgattttttccgcggcagcggcgccgaacgcgaaagaggtgagcagtgcagccagaactaactttttcatcgtggaactcccgtctgtctatcttatgattattcaccgtgtctgcggcatagagtgacaatgccatgaaatgaatttatatgcaattaaaatgattaagtatttctatcgtcataaaaaaagacggacaggtgtttgacttgtccgccttgctgtttgctttttatgcaatatgctcaggtgctagctacgtcgctcgaaggccagcgctttgcgttccaccaggcgcatcagcagcgtcagcagtccattaacgatgagatagataatcccggcggcgccgaacaccatcacgtcgtaggtgcgtccatacagcagctggccgtggcccatcacttccatcagcgtgatggtgtaggccagagaggtactcttgaaaaccagcaccacttcgttggaataggacgatagcgcacgcttaaaggcgtacggcagcaggatcgccagtgtatcctttttattcatccccagcgcgctgcaggactgccattgcccgtcggggatcgcccggatggcgccataaaacagctgagtggtgtaggcggcgctgttgagcgacagagcgatcagggcgcacagccacggctcggagataagatgccacagccacggatactcctgcagcgaagggaactgtcccgggccgtagtagatcaggaagatctgcaccagcagcggcgtaccggtaaacaaggtgatatagccgcgcactatccataccagccccggcgtcttcagggtcaggataatggtgaagatcagcgacaggatcagcgccacgataatcgacgccacggtcagcgtcaggctggtatgcagtcctttcagcagttcgggtaaatagtcgagcatcagcctggtctccgttcgaagcgcgtcgcacgctggtcaatccgcttaaggatgtattgactcaacagggtgatgacgagatagattgccgccgcaatgatataccagttaaagggttcctgagtgcgggtggcgatgcttttggtctgcagcattagatcgttgacgctgatcaggctcaccagcgcggtgtccttcagcagcaccagccactggttaccgaggccgggcagggcatggcgccacatctgcggcatcaccagacggaagaatatggccgctttcgacagccccagcgcctggccggactcccactggccctgcggaaccgctttcagcgcgccgcgcagcgtttgcgaggcgtaagcggcatacagcagcgacagggcgatcgccccgcagaggaatgggctgacgtcaaagttctcaatttgcatctgcaccgggatctgcgtgaacccgagcgggatggtgaaaccgtcagagagcgtcagcagcagctgggaagagccgaaatagataaacagcaccaccagaatttccggtagcccgcgcaggatggtcactatgccggttgcaagccaggctaccgggcgccatttcactgactccagtaccgcaaagagcatcgccaggaccaggccgatgacgagcgcgcaaacggcaaggccgacggtcatcccggcggcgcttgctaatggaaaaatttcgttcattcagtcttacttctggaaccatttgttatagatggtctggtaagtgccgtctttcttcactttttccagcgcagcgttaaatttctgctgcaggtcggtgttgccctgacgtacggcaatgcccagcccggtgccgaaataggctttgtcggtcactttatcgcccacggccgccagcttcggattgctcttcagccattcggtcaccacggcggtgtcaccaaagaccgcgtcgatacgaccgttctgcaggtccagcttcgcattctggtagctgtcgtaaggcacggtagtgatttccggatgtttatcggtgatgaatttctggtgggtggtgccgttctgcacgcccacttttttgcccttcagctgctcaatgctggtgaacttaccctgctggccgacgaacagcgccgagttgtcataatacggggtagagaacagcacctgcttttcacgctccggcgtgatgtccatcccggccatgaccgcgtcgaaacggcggaatttcagtcccgggatcaggctgtcaaaggcctggttggtgaaggtacaggtggcgtcgatctctttacacaacgcgttcgccagatcgacatcgaaaccgacgatctggttgttggcgtccaccagctcaaacggaggataagaggcctcggtggcgaaacgaatggtctgcgcggcggaagcggagaggctcatgcctgcgagcagggcggcaatcaatacttttttcatcgtcatttccccgaaaaacatcaatgtgaaagatagtttttaaacgcgtcagtttgcggatgcgtgaagcaggaggcatccccttgctcgacgatatggccattttccatatacaccacccggctggccgtcttgcgcgccacttcaacttcgtgggtgacgataacctgggtaatgccggtttcagccagctcgcggatgatgctgacgatctgagccgtgatttccgggtcgagcgccgcggtaggctcatcgaacagcagaacctgcggctccatcatcagcgcgcgggcgatagccacccgctgctgctggccgccggataaatgcagcgggtaacgatcgctgtacggcttcagacgcaggcgctccagcagcttctctgcgcgagccagcgcctgatccttgcttaaccccagtacgcggcagggggcctcgatcaggttctgctgtaccgtcaggtgcggccacaggttgtattgctgaaagaccatgccgacgttctgacgcagctcgcgaatcgctttatcggacggcgctctggtgaagtcgaattggttaccggcgatggataacgaaccggaccgcggcatctccagcaggttgagtacgcgcagcagcgagctcttcccggcaccgctggggccgagcagcaccagcgtttccccctgcgggcaatccagcgtgatgtcgaacagcgcctggtgtgcgccgtagaagcaattaatgccgtttagtttaatactcatctgggcagtctgatacgaatagctattgaggccgcaaatactacctttggcagaatagttatgcaatatttatgcgttaaaagttaaatctaaaccacgtttagctttaaagttagcacaaaatatggcctggtgggtgaggggggcgcaaatgtcggcattcctggggcgaataccgacattttaccggggttatcgtttcagcggcgtcgcttcaactccggaatcagcgtttctccagactctgtcgcagcgtcccggctggcgcatggctgttgttgccgagatagcgaacgtcatcgacggcccagcactggccttcctggatcatcagcacttcatctttccagctctgggtgccctgtttcagatcgacgcgcagcggaatattgcgcgcatcgcggttcgggatggtggaggcgctggcgaccacggcgctgtctgccggggtgctgctgctggagaacggattagcctgcagtaatttgctgttggcgggatcctggcgggcgtcattgagtaactgcgccaggccgtcgctcagataggggcgcagcgccgccggatcctgagtacgattctggatctgggtgtcgtagaatttttgcgctacgtcgtcagggccgccttcgacgcaggggccgctgcgggtgccattatctttataggccggggtgacggtcgtacaggcgctgagcgccagcgcgcaagggagaagtacagcaaaaagtttgtagcgcatgatgatttccttataagcgaactacgttttcagtttccgttaaagcatagcgtatagcgtgcggattgtacttgacgcaaagagctaagaccttgatgtggctacagccttagggcgggaaatcggcacggggatgacagaattccgtcaggcgctaaaaggcagggtagtataaaaataaacttaattttcccgtgaacaagaaatattatcccgtaaaatagggaaatggctcttgaaagataagggtaattatttcttcttatagatgcgagtggcgacgtgcatttttttatccgtattaccggaggaggggacaatgacgccccccttgttcatttgtttttttaatcagctcttcacgggcatcgttggatgcggtttgaccagtagaggaaatggcgccgattttggtatattgcgtatggactttatcaaaagctgttttgttaaaatctctgcggagacggcattggccgcttaaaacaatgctgtacctgccactaaagctgcatatttaatattcttagcccctattgtttatctcgctatcatcatgctcttctttgcattcaccaatgaatgatttcagattgaactcacactgctttttgtaagcaaaatgctgcaatttaatgacggttagttaacgctttttagcgaaaagatgacgtaattcgcagtgctgatgcttgttttttgagccggttacccatcgggagcggaccaggctattttcttcggtcgttagctgaaaatcaccctgagaggccggagctgaggggatagggcgctgacagacattcccggtaacatggtttatcatatagaaaagcaggggctgcgcccatggtcatgcaggtcaccagagagttaagatgttaacaaataagcgagagcgcgcccggcagcagcgagccgcgttgtgggccaccagagataatgtccagcgccatgcgctgtccatgagtatgccctggctggcctttgtcaatatcgcttttgcgttaatgattttcttccgcaatttgatctttacttattttgataagaggctactgacgcaccgggcggttattccttatatcgaagcggcgttgattgcggttattatcatttcggccattttagtgattattgccctcacgccgcgactggcgcagggacgatatacgttgaatatcatcaccgggctgctgctggcgctcagtctgtgctggtccctgagtaattattgttttatttttttctggaccttgccctttgcctggccgctgctggtgatattaatgactaccggcctcaccgcgctgtatcaccattggcccggcataaccgcttttatgctgccgctgtgggtgaccgccttgctggcgggaatacagctccactatcacaccgagatccgctttttgatcctctgggccatttttaccgcgattttgctgtatggccgacgtattttgcagcgctggtatgacgaagcctgggatacccaccaggagaatatgcagcttattcagcggctggaaagtatcgccaaccaggatgccttaaccggaaccgctaaccgtcgggcgctcaatgcttacctggcggcgatctggcagcaaaaaacgccgctggcgctgatgatgatcgatgtcgattattttaagcgctataacgatcgctatggccatcaggctggtgatgagtgcttatcttctgtcgcgcaggtgcttaaaatggcggtccgggcggagggcgatctggtggctcgctacggcggcgaagagtttgtcgtcgtgttgcccggggtgtccttagcgcatgccaccgctattgccgagcgcattcagcagaagatccgcgaggcaggcctaccgcacgccgcttcggcggtggcgtcggaggtcaccgtgagtatcgggatcgtcgcctccgatggcacggtcccgatagagacgctgatcgcccgggcggacagtgcgctgtatcaggcgaaaaataaaggacgtaatcaatggtcttattaacccggagacgctgccgggcaagggagaagggatgaaacggatgatgcggatcgtgctgctggcgctgctgctgaccggctgcgctggggaaaagggcattatcgatcgcgacggataccagctggacacccgtcatccggcgcaggctgcctatccgcgaataaaggtgttagtgatccactatacggctgacaattttgatgtctcgctggccacgttgaccgataaagaggtcagctcccactatttaattcctgaacagcccccgcgttatcagcataaaccgcggatctggcagctggtgccggaagaggatttagcctggcacgccggggtaagctactggcgcggcagtacgcgcattaacgatacctccattggcattgagctggagaaccgcggctggcagaagacggcgggcgtcaaaagttttaccccctttcatccggaacagattgcggctctgatcccgctggcgcgcgatatcatcgcccgctaccacatcgcgccgcagaatgtggtcgcccatgcggatatcgccccgcagcgcaaagacgatccggggccgttattcccctggcaacagctggcgcagcaggggatcggcgcctggcctgacgagcagcgggtggccttttatctgaacgggcggccggccagcgagccagtggaccccgaaatcgtactggatttgctctcgcgctatggctatcaggtgacgccggagatgacccccgcgcagaagaagcgggtgattatcgccttccagatgcacttccgtccgcagcgctgggatggggtagcggatgcgcaaaccgaagcgatagccgaggcgctgttagaaaaatatggccagggttagcggtgtagtttaccgtggtcgcgaagccaggcggcggtgcgcacgatgccctcgtcaagcgtcaccaccggctgatagcccagctcgtcctgcgcgcgggtgatatcgagcgtaaaatcaaagttaagcttggagacgccgtagtgggtaaacgcgggttctttggcggttttatcgccaaagcgctccatgctgcgggcgataatatccagcatcggatagggaactgagcggatccggcatttgataccgagctcgtcgatcaatttctgcacgatgctccgcaaggtgcgcggttcgccgttgctgatattccacgcgcgggcggagggaagatgatcgcaggccggctggctcgccagccacatcgcatgtacggcgttttcataataggtcatgtcgaccagcgcgctgccgccgcgcgggagcaggacgctgccataatgctgcatcatttgcgccagccgggggataaagactttgtcgtgcggcccaaacaggctctgcggccgcagaatggtaaaacgggtatgcgggttagcctgcgccagcaggttgatcacctcctcgctggccgccttgctgcgggcaaactcgttggcgaagcggtgtggacggaaatcttcctggatatcacgatgatggtgataatcaaaatagagcgatggcgaagagatatggacgaaattgcgcactccccatgccactgaccattcgcccagacgacgggtggcgcggacgttagcgagatcgaaagcctgctgagtgccccatggcgaggtaaagctggagcagtgccatagggtatcgataccggcgagcatcactttagcctgcgaagagaccagctcggttaaatctgccgggatgaattccgcccccattttgctcagaagcttgcccatcgcttcgttgcgcccggtcgctcgcacgctgatgcccttgttgcgcagatattccactgcgttgcggcctaatccgctggtcgcaccggtaaccagtaccttcatatcactctactgtcccagaaaagaatttcgtgcgcatttttccgtgattctcccgactatgcaatgagaatcatgaaagaataacgcttatccttcgactctgcctgagatttgttcggccagccgggcgatgcgttgcgccataccgcggaaaataaacaggtgcgccgggatcatcagcagccagtagatcaggcctggcataccgtgcgggtgccaccaggcgcgcacgtccagttcacgacgatcgcctttatcgttaatggtaaagcttaatcggcccagcccgggcgctttcataccgaatagcagggtgagctgtttttcttcctccacgataattaccttccagctgtcgaccgtatcgccggtttgcagataagcgcgctgcggccgccctttggccagccggtggccgaccagcagatccatcgcgccgcgggttttccacagcagattgccgaaaaaatacccctcttcaccgccgatttggttaacgacctgccacagggcctggcggcttgcctgagtggcgacggtgcaacctgcctgcttcggatagtagccgtactctggtcgccagcgggcgaaagcctgagcgtcgtagccccagtcgctggagtttactaactgctcttcttctttcagcgtgcggcgaaccgcctgatcgaaggggatcagcgtttgcgggatcagcgcccgcagcgcccgatcgtcagcgattagatcgtgcttcagcccctgaatcagcgccttggcgatggtcggcggcaccgaggtgatgacattgaggaaccacaccgagatccagcgcgtcggcaggggaatgggaatgagcgggcgatgtttaccgctgacggccataaagcgaatgaactgctgctgatagcttaacacctccggaccggcggcttcgaagacgcggtgcgcatcggagggatgattcagcagctcaaccaggtcaacgagcaggttttccagcgcgacaggggtagtacgcgaacgtacccagcgcggaggggttagcaccggcaggttataaaccatgtcgcgcatcacctcgaaggcggcggagccggcgccgacgataatcccggcccgcagctcggtcaccggcacgcccgactcacgcaggagatcgccggtaatctgacgagcgcgcagatggtcggactgctcctgcgccggggcctgcagcgaactgagaaatatcacctggcgcactgatgactgacgcagggcatcgcgcacatacgtcgccccccgccgctcatgggcgataaaatcaccgccttcgcccatgccgtggaccagataataaagggtatcgataccggtgagtagcgcaggcaggtcctgcggctgattgagatcgactgaccggcaggtaacgccgggcaaagcgagtttttgcaatcggtcgatatggcgtgccgccgccagcaccggatagccccgcgcgcttaatgtgcgcactaaatgctggccaatatagccgctggcgccgagcaccagaactgattgcgacacgcctgactccttagcgttgtaaaaaagcctgccagtgggcgaccacctcgctcagctgctgacggttgacatccaggtgagtgaccagacggacaacaggcgaggcgttaatcaataccccctgcgcctgcataaacttgccgagcgccggggcctgctcttcgccgacgcgaacgaacagcatgttggtatcgtgacgggtgacgtcggcgccgatagcgcgcagctgctccgccatccacgcggcgttgtcatgatcctcctgcaggcgctgcacgttatttttcagcgcgtacagcccggcggcggccaggatgcccgcctggcgcatcccgccgccgaccattttccgccagcggacggcgcggcgaatgtacgcctcgctgccgagcagcagcgagcctaccggagcgccaagcccctttgacaggcagatggtcaaggagtcgcagtattgggcgatatcgcgtaactcgcagccgtaggccaccacggcgttaaagatgcgcgcgccgtcgacgtgcagcgccagattgcgctggcgggtaaacgcccaggcttcctgcagatagtcgcgcggcagcaccttaccgttatgggtgttttccaggctcagcaggcgggtgggggcaaaatggatatcgtcgggtttgattttcgccgccactttatccagaggcagcgaaccatccgccgcggcgtcgatcggctgcggctgaatactgccgaggaccgccgcgccgccggcttcgtacagatagttatgcgccccctggccgacgatatactcttcgccgcgctggcaatggctgagcaggccaacgaggttggcctgggtgccggtgggtagaaatagcgccgcttctttgccggccaggtcggcggcatagcgctgcagttcattgacggtagggtcgtcgccatacacatcgtccccgaccggggcggccatcatggcctccagcatggcgcgcccgggacgggtaacggtatcactgcgtaaatcgatcacggcttttccttggtctggttcaacgtattgcttctgttttacctgagccagttggttttcgccagttcgatgacctcatcgccgcgcccgctgatgatcgcccgcagcatatacaggctaaagcctttggcctgctccagcttgatctgcggcgggatcgccagttcctctttggcgacgacgacgtcgaccagcaccggaccgtcggtgcggaaggcggtctgcagcgcttcatccccctcggaggctttttcaacgcgtatacctttgatgccgcaggcctcggcgatgcgggcgaagttggtatcgtggagctccgtaccgtcggtgagatagcccccggccttcatttccatcgccacgaagcccagcacgctgttgttaaagatgacaatcttcaccggcagcttcatctgcgccagcgacagaaaatcgcccatcagcatgctgaacccgccgtcgccgcacatggccactacctgccgctccggcgcagtggccttggcgccgatggcctgcggcatggcgttggccattgagccgtggttgaacgagcccagcaggcggcgtttaccattcattttgagatagcgtgccgcccagacggtcggggtgccgacatcgcaggtgaaaatggcatcttcatcggcaaaatgactgatctgctgcgccagatattgcgggtgaatggctttatcgctgggtttagccagatcgtcgagcccttttcgcgcgtcgcgatagtgctccagcgccttatcgaggaagtggcgatcggttttctcttccagcagcggcagcagcgccttcagcgtcgatttaatatcgcccaccagcgccatgtcgaccttactgtgtgcgccgatgctgccggggttgatgtcgatctggataattttcgcgtcggttgggtagaaggcgcgataggggaactgggtgcccagcaggatcagggtatcggcgttcatcatggtgtggaagccagaagagaagccaatcagcccggtcatgcccacatcgtacgggttgtcgtactccacgtgctctttgccgcgcagggcgtggacgatgggggctttaattttggctgcgaactccaccagttcctggtgggcgccggcgcaaccgctgccgcacatgagcgcgatattgctggagtagcgaataagctgcgccagcttgcgcagctcttcttccgccggggtgaccgtcggcagcggcgcatgataccagtggctgctggcgctttccggggcggccttcagcgccacatcgccgggtagcaccaccaccgagacgccgcggttaatcactgccttacgcatcgccactgccagcacctgcgggatctgctccggcgtggagaccagttcgcagtaatggctgcactcgcggaacagctcctgaggatgggtttcctgaaaatagccgctgccgatttcgctggatgggatgtgggcggcgatggccagcaccgggacatggttgcgatgacaatcaaacaaaccgttaatcaggtgcaggttgcccggtccgcaggagccggcgcagaccgccagctcgccggtcagctgcgcttccgcgccagcggcgaaagcggcgacctcttcgtgccgggtgggcatccagtcgatggtgcccatgcggttaaggctatcgctcaatccattgagggaatctccggtgacgccccagatacgtttcacgccggcctgttccagcgttttggcaatgtatgccgccacggtctgcttcatgatctccatctcctttttttgataacgccttcaagcttagatgaaactgaccgcaatgtaaccgattacccctgattttttgctggttttattcctctccggctgcgcatactcaggaagtacacaggatgcaaaacaggatgcacatcaaatggttaaaggattgttaaacacagtaaatcgcaggctgtcgcatgatgacgccggtaaactcttgttacgacttgccgtcggcggcttaatgcttttccatggaatccataagctgatagatggtgtggatggcattagcgggatgctggcggcgcagggattgcccgggtttatcgcctacggtgtgctggtgggggaagtggtcgctccctgcttgttaattatcggcgtcctgacccgcccggcggcgttggtgctggcgttcaccatggtggtggcgtggctgatggtcggcttagataagacgtttgcgcttgatgcggtgggagcgtgggccattgagaatctggtctatttctttgttggcgcactggcgattgcgctactcggcgcggggcgttattcgctggccggtcagtcggcctggcggtaaaaatgcctcattcgtcctggggcgtaaagtcgatactgttggcgatttgcaattttttcagtccgggaaagcgtttatctcatgtcgcctgagcgtttattgtcgccagggattttcccggaggcggcgcattgcgccttctccgggctaccaaatcgcacagcgctgtagccccggtaagcggtagcgccaccggggattttgacctcaggcgagaaccagatcgctctgcggatgacaggagcaggccagcacatagccgtcggcgatttcggcgtcggtcagcgtcatggtgctggtgacgctgtacttcccggaaaccactttggttttgcagcagccgcagacgccggcgcggcaggcgacggtcaccggcactttattgctctccagcgcgtcgagcagcgtggtgcccaccggcgcgtaaaactcgcgcgccggctgcagtttagtaaatttcagcccgctggtggcggcctcagccaccggggtgaagaatttttccttaaagaagcgggtgacgcccagggcggcaacatcctgctcgaccttctccatataaggcgccgggccgcaggtcatcacggtgcggctggctaaatccggcacgctctgcagcagctcccgggtcagacggccggcgacaaaatcgtgcgtcgcattgtgctccgctaccagggtgaccgggtagttgcgccactcttcggcaaagattacatcttccggcgaacgcacgttataaatcacctgtacgtcggcctgcggtcgatacttagccagccagcggcgcatcgccatgatcggtgtcacgccgcaaccggcggccagcagcaggaatttatcttccgctttatcgtcgcaggtaaactcgcccatcgcatcggacagccaaaggtaatcgccgcgtttgacctcgcgggtcaaccactgcgaacccgtaccctcgtcaatacggcgaacggtcagcgtaatgtattcgctgacccccggcgtcgaggagagggtataggcgcgcagcgtttccgccgagttacgcacgctaaccagagcgtactggccagcgcggtacggatagtaatcgtggcacagcagcgaaagggtccacacgtccggggtttcctggtgaatgtggtgaacctgcatccgccacgggcactgggaggttggcatagtcatcagggactccttaagcgctcagcagctgctgcatatcttgttccacggtggtcacggaacgcagaccaaacttctcattgaggaccgccagcagatccggggtgaagaaaccaggcgccgtcggaccggtgacgatgtttttcacacccagcgacagcagcgtcagcaggatgacgatcgctttctgttcgaaccaggagagcaccagcgacagcggcagatcgttgatgccacagcctagtttctccgccagcgtgaccgccagaataatcgccgagtaagcgtcattacactgcccggcgtcgaccaggcgcggcagcccttcgatatcgccaaagtccagtttgttgaagcggtatttaccacaggccagggtcaggatcaggcagtcatccggcacgctggtggcgaaatcggtgaagtagttacgctccccgcgggcgccgtcgcagccgccgacgaggaagatatggcgcagtttttcacgactgaccagatcgatcagcgtatccgccgcgccaagcagggtctgacggccaaagccgacggtgatcagatgcgggatttcgctgtacgggaagcccgccatctgctgcgcctgggcaatgaccggggagaagtcttcgccttccagatggttcacacccggccagccgacgatgctgcgagtccagatgcggtcgtcgtaggcgccgacggtcgggtcgatgatgcagttagaggtcatcacgatggggcccgggaagcgggcgaactccacctgctggttttgccagccgctgccgtagttgccaatcagatgtttgaatttacgcagctccggatagccgtgagccggcagcatttcgccatgagtatagacgttgacgccggtgccttccgtctgctccagcaggttatacagatccttcagatcgtggccggagatcaggatgcacttcccttcggtggctttaacgttgacctgagtcggcgtcggatggccgtatttggtcgtttcaccggcgtcgaggatgctcatcactttgaagttcatctggccgatttccatcgaacattcgagcagcgcattcatatccgcaggccaggtgcccagccatgccatgattttatggtactgggcatagatagcgttgtcgtactggccgagcacgtgggcgtgctccatataggccgccgcacccttcagaccgtacaggcacagcaggcgcagacctagaatattctcgccgatggcggctttatctttattcggggtatagtccgccgcctgacgctgcaggtcgcccagatcgtcgctgaccagctgcaggtcggcgaccgggctgtcgaccgcggcgctggcatcgatcgccaggcattgcgctttcagcgcctcacgcagggcaattgcctggcgggcgtagccgacgatgcgcggggaatcgaagttaacgttagtcagggtggagaagaaggcgcggggggcaaagctgtcgacctgatgatcgataatgccatattcgcgcgctttaagcgcccaggcggacaggccttgcagtgacgcaatcagcagatcctgcaggtccgaggtttccgctgttttaccgcacatcccctgcgcgtaagagcagccgttgccggctggggtacgaatggtttgttcacattgcacacaaaacatggtcacacctttaaagttatatttgatatacatgtttaaggttatgccgcgcggcaacgggtgaaaaggtatttctaagacaacttaaagggagattgatttagcgcaaatttggcggcaggagggctgccgccaacgggtgctcaggcggtaaaaaaggcgatcaggatcgggaccagcaaactaagcagaaaaccgtgcacgatggcggcagggacgatttcgacgccgccggaacgctgcagtaccggtaaggtgaagtccatcgaggtggcgccgcacagccccagcgccgtggagcggctgcggcgaataaggcccggaattaacatgatggccagcagctcgcgacagagatcgttaaagaacgccgcgctaccgatgaccgggccaaaggattcggtgagtaaaataccggagagcgaataccagccgaaaccgctggccattgccagaccggtctttaacggcagaccgagaataaaggcgttaagtatcccgccgagtaatgaactggccgtaaccaccacggcgacgatcattccccggcggttaaggactatttgtcgcagactcattccattattgcgtaattggataccaacgaggaacaggagaaagatcaacgtatattcgctggcttctgtcgcgtgctgtaaaaaaggcagtctggtcagaccgagcagaaaaccgagcacgaccacaccgcacagctgcagcgattccagggccatggccaggcgcgagggtaatttctcctgacgatgctgactgcgccatggcattttactttccagccacagcagtgcggcgatattacacagtaaaatgataaccacgctcaccgcggcgtaatgcaatattgccagcaggttgctggccagattgtcgaggaacgccaggctgatacccataaaaaaaaggattacatagacaatccagctgagcatgcggtttatcagctttagcgcggaggagtgacgaagaggcagtaaatagccgacgaccagcggcaacagaataataaagagtcccgaaaacatgaacgatgcagcccttgcatgatgagaatagcgcccatgacactacccaaatcaccgggccgagtaaagctgtcgccagaaagaaaaagcccggagacccgggctttgaaaagcgttaatcgcgtttttccagcagggtgcgatacagcacgccgccgaggatcccgccgacgattggcatgacccagaacagccacagctgctgcagcgcccagccgccctggaaaattgccaccgcggtgctgcgcgccgggttgaccgaggtgttggtgactggaatgctgatcaaatggatgagggtcagcgccaggccgatggcgatgggggcaaagcccgccggcgcatgtttatcggtcgcgccatgaataaccagcaggaagccgcaggtcaggacaatttcaatgacgatagccgacagcatagagaagccgcccggggagtgttcgccatagccgttggaggcgaagccgctggcggcggcatcaaagccggctttaccgctggcaaccacgtacagcaccgccgcggcaataattccgccgaccacctgagcgataatatagccaatgacctcttttgccggaaaacggccgccggcccacaggcctaaggtgaccgccgggttgaaatgccccccggaaatatggccgaccgcaaacgccatggttaataccgttaagccaaatgccagcgcgacgccggcaaaaccaatacccagctcggggaaagccgcggcgagcacggcgctaccgcagccgccaaatacaagccagaaggtgccgaagcattcggctgctaattttctgaacataaccacctcaattaaattgtttacgcgcacgagcggaccgtgccggtctttatttatcgtgataagggatgacgataaaaataaagcggcgttattctagagataatcgccatcccggagccagttaaatatattgatattatttgatttagggcaaggtgagtggattccttttgccagtttagcctttcctttatccatggaagattatcaatagtgtagatcataacgcctgaaataaaactattttgtttgatgaataatcaacagccggtaataggcgataagtgagtaattttatgaatatatttaatccgctgaatatgagccacggatgcgattaagcagagtgtcatcttgcctccgccctcgctatactgttgattactgaaggagagtggtggtgtagcggaggggatatgcttcttgagcgcgtagaaatcgtcggttttcgcggtatcaatcgtttgtcgttgatgctggagcaaaataacgtcctgatcggggagaacgcgtgggggaagtccagtctgcttgatgcgctgaccctgcttttgtcgccggagttcgatctttatcactttgttcgcgatgatttctggtttcccccgggcgacatccaggggcgcgaacaccatttgcatattatcctgaccttccgcgaaacggagccaggccgccatcgggtccggcgtttccgtccgcttcagcgctgctgggtgccttgcgatgacgggtatcaccgggtgttctatcgcctggagggcgagctcgccgaagatgacagcgtgatgaccctgcggagctttatcgatggtgaaggcgaagcgttggtgctggaggagattgatgagctggcccgacacctggtgcgtttgatgccggtgctgcgcctgcgcgatgcgcgctttatgcgccgcatccataacgggacggtaccgcactcgccgcagatagagatcaccgcccgtcagctggattttctctcccgcgaactggtcagccatccgcaaaatttatcggacggtcagatccgtcaggggctatcggccatggtgcaactgcttgagcattactttgccgagcaaagcagcgctcagacgcggcatcgcctgatgcggcggcgctcccatgatgaacagcgcagttggcgttatctggatattatcaaccggatgatcgacaagcccggcgggcgcagccatcgggtgatcctgctggggctgtttgccacccttctgcaggcgaaagggacggtgcgcctcgatcgcgacgcgcgaccgctgctgttgattgaagatcccgagacccgtctgcatccgatcatgctttccgtcgcctggcacctgctgaatttgttgccgctgcagcgtgtgaccaccaccaactccggagagctgctgtccctgacgccggtagagcaggtctgccggctggtgcgtgagtcgacgcgggtatcggcgtggcggttggggccgggcggaatgaatgccgaagagagccggcgcattgcttttcacatccgcttcaatcgcgcctcatcgctcttcgcccgctgctggttgctggtggagggagagacggaaacctgggttatcaacgaactggcccggcagtgcggtcatcattttgatgctgaaggggttaaggtgatcgaattcgcccagtccggcctgaagccattgatcaagtttgcccgccggatggggatccagtggcacgtgctggtggacggcgatgaggcggggaaaaaatatgccgcgacggtacgaggtctgcttaataacgatcgcgagctggagcgcgaccatctgaccagtctgccggcgctggatatggaacactttatgtatcgtcagggatttgatgacgtttatcatcgggtggcgcagatcccggataatgtcccgatgaatatgcggcgggtgatcaccaaagccatccatcgctcatccaagccggacctggcgattgaggtggcgatggaggccggccgccgtggcgtggacgctgtgccgacgctgctgaagaaaatgttctcacgggtgctgtggctagcccgcggtcgtgccgattaatctcaccgccgtcgtcatttacggcggcacaaagctctccggcagctaaacaaaacctcattgacgcgaaaaatgggtgtcctgttgccaacgggtttcgatagaatcaccgcctggagcggcagggaaacagcaggaatcggaatatgaaagtgaagggaaaacgcaggaccgtctggtggctgttggcgatcgttgtgctggggctggctatctggggatggcggatcctcaatgcgccgctgccgaactaccagacgctggtagttcgcaaaggggatctccagcagagcgtgctggccaccggcaaactggatgccctgcgaaaagttgacgtcggcgcccaggtcagcggacagctgaaaacgctgcacgtcaatattggcgataaggttaaaaaggatcagttgctgggggttatcgatccggagcaggcgcaaaaccagattaaagaggtggaagcgacgctcatggagctgcgcgcccagctcaatcaggcgcgcgcggagagcaaactggcgcaagtgactctggcccgtcagcagcagctggcgcagcgtcagctggtctcgcggcaggaccttgataccgcggccaccgatttggcggtgaaacaggcgcagatcggcactattgaagcgcaaataaagcgtaaccaggcgacgctcgatacggcgaagaccaacctcgattacacgcggatcctggcgccgatggccggcgaagtgacgcaaattaccaccctgcagggacagacagtgatcgccgcccagcaggcgcctaacattctgacgctggcggatctcagcaccatgctggttaaagcgcaggtctctgaggcggatgtcatccacctcagaccggggcaaaaggcgtggtttaccgtgctgggcgacccgcttacccgttatgaaggtaaactgaaagacattctgccgacgccggaaaaagtgaatgacgccatcttctattatgcccgcttcgaggtaccgaacccgcaggggatcctgcgcctcgacatgaccgcgcaggtgcacattcagctggctgaggtgaagaacgtgattactatcccgctgagcgccctgggcgacgcggtaggcgataaccgctaccacgttcgactgttgcgcaccggtgaggtcaaagagcgtgaggttatcattggcgcccgcaatgataccgacgtcgcagtggtgcaaggtctggaagagggcgacgaagtgatcgtcggcgagagcgcgagcggggcggcaaaatgacggcgctgcttgagctgcgagatatacgtcgcagctatccttccggcgacggcagcggtgaggtcctgaaggggatcaccctcagcatccatgcgggtgagatggtggcgatcgtcggggcctccggctcgggaaaatcgacgctgatgaatatccttggctgcctcgacaaacccaccagcggcacctatcgggtagcgggaaccgatatcgcgcagctggatggcgatgcgctggcccgtctgcggcgggaacactttggctttatctttcaacgctaccatttgctgtcccatctgaccgccgcgcagaatgtcgaagtgccggcggtgtatgccggcagtgaacggcgcgcgcgcctggcgcgcgctcatgagctgctggtgcggctggggctgggcgagcgcgccgactatcaaccgtcacagttgtccggcggtcagcagcagcgggtcagtatcgcccgcgccctgatgaatggcggggaggtgatcctcgctgatgaaccgaccggcgcgctggacagccattccggcgaagaggtaatggcgatcctgcaccagctaaaagcgcaggggcatacggtcatcattgtgacccacgatccgcaggtcgccgctcaggcggagcggatcgtcgagatccgcgatggcgagatcgtccgcaacccgcccgccagccgccagggcggcggactgcgcgcccgtccgcaggcggagccttcggcgtggcgtcagtttaccagcggctttcgcgaagcgctggtgatggcctggcgagcgatggcggcgaataaaatgcgtaccctgctgaccatgcttgggattattatcggtattgcctcggtggtgtcgatcgtggtggtgggggatgccgccaagcagatggtgctggcagatattcgcgccatcggcaccaataccattgatgtatatcctggtaaggattttggcgacgacgacccgcgctatcagcaggcgctgaagtatgacgatttgctggcgatccagaagcagccgtgggtgcgctccgccacgccggcggtttcaaaaagcctgcgcctgcgcgccaacaatattgacgttgccgccagcgcggagggtgtcggtccacagtattttaatgtctacggcatgacctttagcgaaggcaataccttcaatgaactgcagctcaacagtcgggcacaggtggtagtgctcgacagcaatacccgtcggcagctgtttcccaataaagcgaaagtggtgggagaggtgattctggtgggcaatatgccggccacggtgattggcgttgcggatgaaaagcagtcgatgttcggcagcagcaaaattctccgcgtctggttgccctacaccaccatggcgggaagagtaatgggccagtcgtggctgaactccatcactgtgcgcgttcatgaaggctacgacagtgaaaccgcagagaaacagctgctgcgtctgctggagctgcggcatggtaaaaaagatgtattcacctggaatatggacagcgtcttgaaaaccgccgaaaggaccacacataccttacagctgttcctgacattggtggcggtgattgccctggtggtcggcgggattggcgtaatgaatattatgctggtgtcggtgaccgaacgaacccgggagatcggcatccgcatggcggttggcgcccgggccagcgatgtgctgcagcagtttcttattgaagcggtgctggtttgcctggtcggtggcgcgctgggcgtagcattgtcgctgatgatcgcctttattttacagctgtttctccccggctgggagattggtttttctccgctggcgctgctgacggcgtttctctgttcgacgctgaccggggtgctgtttggttggctgcctgcgcgcaacgcggcgcggctcgatccggtggatgccctggcgcgagaataggcggggcgagaaataaaaatgccagtcagaaggactggcattttattagcaggatgtacacaatgaagcaaaagagttatgcagccgtttccgcttccacagggacgatcacgctggcgtgattgccttttggcccctggtgaacatcaaaccgaacggcttgtccggcttttagcgttctgtaaccatccatctggatggtggagtaatgggcgaaaatgtcttcgccgccgccctcagggcagataaaaccgaaccctttggcattgttgaaccacttaacagtacccatttccatacttcgacatccttcgtaaatctttattagtaagatggaatgaaccggtggtggagtgacgagttgttcaattgctcgccaactctcgccactacaatttagagaaatacgaaaacgcgtcaagcgattgaggagggggaacggcgaaaaatgcgtcaaaatttgaagcagttaacgctattgccggggaatgtgacagccgtcgcggatagaagcgatagatgatagttatctatgatctattgtagatttgtgatgagcataacctctggtcatcgacaggcctccgcctgttggcaacagcaaccgatgatgaacactgacgatgagtaagagagattggctggacttcgagcacctggttgacgacgaagttcgtgatgcgattaaaccgccatctatgtataaagtgatattggtcaatgatgactacactccgatggagtttgttattgacgtgttacaaaaattcttttcttatgatgttgaacgtgcaacgcaactgatgctcacggttcactatgaaggtaaggcgatttgtggcgtgtttaccgcggaagtggcggagaccaaagtcgctatggtgaatcagtacgcgagggagaacgagcatccattgctgtgtacgctggaaaaagcctgaatacaggcatgaaaattgggggaggtgcctatgctcaatcaagaactggaactcagtttaaatatggctttcgccagagcgcgcgagcaccgtcatgagtttatgaccgtcgagcacttgctgctggctctgctaagcaacccctcggcccgtgaggccctggaagcgtgttcagtggacctggtggcattgcgtcaggaacttgaagccttcatcgaacaaaccacacccgttctgccagccacggaagaagagcgcgacacccagccgacgctaagcttccagcgtgtgctgcagcgcgccgtcttccacgtacaatcttctggccgcagcgaagtgaccggcgccaacgtgctggtggcgattttcagcgagcaggagtcgcaggccgcctacctgctgcgtaaacatgaagtgagccgtcttgatgtggtgaacttcatttctcatggtacacgcaaagacgagccgagccagtcttccgataacagcggaagccagcctggcaatgaagagcaagccggcggggaggaacgtatggaaaacttcaccaccaacctcaatcagcttgctcgcgtcggcggcattgatcctctgatcggccgtgaaaaagagctggagcgcgcgattcaggtcctgtgccgtcggcggaaaaataacccgctgctggtgggggaatccggcgtcggtaaaaccgcgatcgccgaaggccttgcctggcgtattgtgcagggcgatgtgccggaagtgatggccgactgcactatctactcgctcgacattggctctttgctggcagggaccaaatatcgtggcgattttgaaaaacgcttcaaagcgttgctcaaacagctggagcaggataccaacagcatcctgtttattgatgaaatccacaccattatcggtgcgggggcggcgtctggcggccaggtcgatgcggctaacctgatcaaaccgctgctttccagcggcaagatccgggtgatcggctccaccacttaccaggagttcagcaacatctttgaaaaagatcgtgcgctggcccgccgtttccagaagatcgatattaccgaaccgtcggtggaagagacggtccagattatcaacggcctgaagccgaagtacgaagcgcaccatgatgtgcgttataccgccaaagcggtgcgtgcggcggtagaactggcggtgaaatacattaacgatcgtcatctgccggataaggcgattgacgtcattgacgaagcgggcgcgcgggcgcgcttaatgccggtcagcaagcgtaagaaaacggttaacgtggcggatatcgaatcagtggtggcgcgcattgcgcggatccctgagaagagcgtctcccgcagcgatcgcgacacgctgaaaaacctgggcgaccgtctgaaaatgctggtctttggacaggataaagccatcgaggcgctgaccgaggctattaaaatggcgcgcgccgggctgggccatgagcacaagccggtgggatcgttcctgttcgccgggccgaccggggtcgggaaaaccgaagtgaccgtccagctggcgaaggcgttagggattgagctgctgcgctttgacatgtccgaatatatggaacgtcataccgtcagccgtttgatcggggcgcctccgggctacgtcggcttcgatcagggcgggctgctgaccgatgcggtgattaaacatccgcacgcggtattgctgcttgatgagatcgaaaaagcgcatccggacgtgttcaacctgctgctgcaggtgatggataacgggacgctgaccgataataacggccgtaaagcggacttccgcaacgtggtgctggtgatgaccaccaacgccggggtgcgggaaaccgagcgtaaatcgattggccttattcagcaggacaacagtccggatgcgatggatgagatcaaaaagatctttacgccggagttccgtaaccgcctcgacaacatcatctggttcgatcatttgtctaccacggtgatccatcaggttgtcgacaagtttatcgtcgagctgcaggtccagctggaccagaaaggcgtctccctggaagtgagtcaggaagcgcgcgactggctggcgacgaaaggctacgatcgggcgatgggggcacgtccaatgggacgcgtcattcaggacaacctgaaaaaaccgctggcgaacgaactgctgtttggctcgctggtcgacggtggtcaggtcactgtctctctggacagcgacaaaaatacgctgacttacgacttccagagcgcgccgaagcacaaaccggaagcggcccactaaggcgatatcttcaatgtaaaaaaaccggccaggggccggtttttttttgctgacggcagatgacggcagaaatgaaaagaccgggaattatcccggccttcagcatctgacgccttaggggcgaaaacaatcagcgactacggaagacaatgcggcctttgctcaggtcgtacggggtcagctcaacagtcactttgtcgcccgtcagaatgcggatgtagtttttacgcattttaccggagatatgcgcggttaccacgtgaccgttttccagttctacgcggaacatagtgttaggcaacgtttcaagtacggtgccctgcatttcaatattgtcttctttggccatctagtcctctggggtatcactaccgtagttttgaaccggcaagataatgccgaagttcatcatgtaagtaaagttttacgtatctaccctgaatcattcaccttgccgcaaggcgcatagtcagcgcagcggctacggaaatatgacgggtatgaatcgccgaagtagttttggcgcattgcccgggacacacacggccatgccgcgtgacaggcgcaaacgtaaaggggagtgacagaacgatgggcgttatctgactcttattattcccaaacggcggcggggcaacaggcagaagctactctaccgcgcaattataccatcctgacgcaaaatgtgctgaaaacattttattatccgccaggaaatagcacccgcggcacccaaaatcgctcgggcagtcggtagccgcgtaataccgacagatagtccagataatcgcggcggggaatatccactgcgcctaatgacgcggtatggttgttcagtacctggcagtcaattaatttaccgccgctgtgcgcaaagtcctggcaaaataccagcagcgcggttttggaggcattttctgcccggctaaacatcgattcgccgcaaaacagcgctccctgcgctacgccgtacattcctcccaccagggtattctcctgccagacttcaatggagtgggcatgacccagctcatgcagctggtgataggcgcgaacgatactgctggttatccaggtgccttcgtcacgatcgctggcgcagccctcaatcacttcgccaaaggcgtggttgagcgtgacccggtagggcgaacgctgatgaaagcgcttcatgctgcggctgagatggaattgctctggccaaagtaccgcccgggggtcgggcgaccaccagaggatcgggtcgccaggggaaaaccagggaaaaataccacgctgataggccatcagcagccgcgcggggctcagatcgccgccgagcgccagcaggccattaggttctcgcaaggcgccttccggagaggggaaggcgatagagtgccgggagagctgaaccagacgcattttaacctcaatacgcatcagcaaaaattagataatagaatagcctacagacgctgtttaaactggaagtaccggccctgtttagcgagcagctccgcgtgactaccttgctcaattatctggccgttgtccatgactattatctgattaaaacccgccaggccccgcaggcgatgggttaccatcagcacggttttgtcgcgcatgacatccgccagcagatgcaggatctggctttcggtggccgcatccagaccttctgtcggttcatcgagcagcatcagcggcgcatcgtggagcagcgcgcgggcaatggccagtcggcgcagttcgccgccggagagctgacgcccgccttcgcctagccagccgttaagaccgccatcttgcagcagtttttcgaggcccaccttctcaagggtagcgctgagatgagcgtcatccgcttcaggcgccgccagcagcaggttgtcgcgcagggtggcgctgaacaggtgcacgcgctgcggcactacgctcattgcctgccgcagagtggcttcgctgaggccggagagcggctgattgttgagcagaatctctccctgtgacgggtcccaggcgcgggtaagcaactgcaacagcgtcgattttccgcagccggtccggccaagaatggcgatgtgctctccggcggcaatctgcagggaaatattctccagggcaggggagggctgctgaggatagcggaaggtgacctcctgaagcgttagggccacctgcgctggcggactggcttcatcttcgacaaaggtgacctccggctgctggtcggtaatctgcgagatccgccgcgcggaggcgatcacctggcctaaatgctggaaagcgccagtaaccggcgccagggcttcaaaagccgccagcgcgcagaatacgaatagcgcgatcagcgccccgggctgactattgccgccgacgccgtctgaggccagccagagcatggccaccacggcgatgccaccgattaacagcattaccgcctgcgaaagcgcggtcagctcggcctggcgccgctgtgcatcctgccagctcagctcggtcttttccatttgtgcgcggtagcggtcgctggcgttaaataccatcagctccgcctgaccctgcagccaggcggtgagctgttggcgatactggccgcgcagctgcgtcatactttcgccggctggcttacctgcgcgatagaacagcggcggcataaccagcagggtcgccagcatgataccgccgagcgtcagcgcgagggtgacgtcgagcagacttaatccgcaggtgacgaccacaatcaccaccagcgcgccgaccagcggcgaaatgacccgcaggtagagatgatccagggtgtcaacgtcggctaccacccggttgagcagctcaccctggcgaaagcgcgccagccccgccggagagagggggagcagtttgctgaaggtgaaaacgcgcaggtgctgcagcacgcgaaaggtagcgtcgtggctgaccaggcgctcaaagtagcgcccggcggtacggataattgccgcgccgcgaacgcccgcggcaggcagcatatagttaaaactgtagatcccggcgacgcccaccaccgctgaggcggagaggaaccagccggagagcgtcagcaggccgatgctggccagcagggtcacaatggccagcacgacgccaagcagcagcatccatttatggcgtttatagagcgccagatagggtaaaagtgcacgcatttaaatctcctcctgacgatgggccagcagcgccgagaagaccccaccagcacgggccagcgtggcgtagtcgccttgttcgataatctgtccgtcctgcatcacccagacgtcgtcccagtcggccagcccctcgagctggtgggtgaccagcagcgtggtttgctcactggaggcgtgggtcagggcctgcatgactcgctgttcgctatgggcgtcaaggctggcggcaggttcatccagcagcagcaggcggcacggcaccaacagcgcgcgggcgaccgcgatacgctgcgcctggcctaccgacagacgccccgcctgatcgcctacggcggtatggatcccctgcggcagcagggcgataaactcgctgacccaggccttgtccagcgccagccgaagctgtgcttcgctagcttcgggccacgccagcagcacgttttcccgcagcgtggcggcaggcaactgcggattctgtcctacccagctcagcaggcggcgccagcgctcagcgtccagctcgcgcagctctacgccgttgaccatcagcgacccctcatagggcagaaagccgagcagtgtattcagcaaagagcttttcccggatccgctctggccgaccagcaccacgcgagcgccggcgggcagcgcaaaattaagcggccccgccagaactttaccttccggagatttgatcaccaggtcgcgcgcttccacgctaatcagatcgttgtcatttaacgttttctcgccacgctctacctgggtcagcggcgtttccataaacgttttcaggctgtctgcggcgcccacggcctgagctttggcatggtagaaggtacccaggtcacgtaacggctggaaaaattccggggcgaggatcagcgtcagaaatcccgccatcagcgtgacgcccgcgccatagtggccgaagttcagctcgccaaggtaagaaaagccaaaatacaccgctaccagcgcaatggagagggaggtgaaaaactccagaaccccggaggagaggaaggccagacgcaggacttccatggtgcgttggcgaaaatcctgcgaggcgtcgcgaatattatcggtttcagcctgaccgcgatgaaaaatacgcagggtttccatgccgcgtaggcggtcgaggaagtggccgctgaggcgggccagcgcctggaagttacgccggttggcgtcggcggcgcccatcccgaccagcgccatgaaaagcgggatcagcggggcggtgccgagaaggattagcgcggcggcccagttaatcggaaaaatagtaataacgatcagcagcggtacgcaggccgccagcgtcatctggggcaggtagcgggcataatagtcgtgcatgtcgtcgatttgctcaagaataagcgttgcccagctgccggccggtttgccctggatccacgccgggcctgcctgctggaggcggtcaagaacctggcggcgaatttcatagcgaatatgctgcccggcctgaaagccgacccgctcacgcagccagaccacccaggcgcgtagtacaaagatcagcaccagcagcgtgagcggcagcagcagggcggtcgctggaatattctccatcaccatccggtgcaggatccgcgccaggaaccaggcctgcgccacgatcagcagaccgctcgccacgccaagcaggcgggaaaacatcaaccagcgacgggagataatgctttgctgttttaaccagcgggttaactcttgttgacgggttttattcattgcgcgctttgcaggtgtcgttatcggagtattgggcacggcaatgttacatcgcagcaaaaataaaggcgacttttcgtcgccttctttacctttgttactgacttgtaaagattatttgcaagcgtcagccaaaccgtcgaggtaacgctccgcatccagcgccgccatgcagccggtgcccgcagaagtgatggcctgacgatagatatggtccatgacatcgccggcggcgaacacgcccgggatgctggtctgggtcgcgttgccgtggataccggactgcactttgatgtagccgttctccagctccagctggccttcaaagatggcggtgttcgggctgtggccgatggcgacaaataaaccagccacttccagggactcgacattgtcgctgtttttggtatcgcgcaggcgcaggccgctgacgcccatctggtcgccggtcacctcttcgagggtacgatcggtatgcagcacgatgttgccgcttgccactttatccatcaggcgtttgatgaggattttttccgcacggaaggaatcgcgacggtggatcaggtgtacctcagaggcgatattcgacagatacagagcctcttccactgcggtgttgccgccgccgatcaccgccactttctggttgcgatagaagaatccgtcgcaggtagcgcacgcggaaacgccgcggcctttgaaggcttcttcggaaggcaggcccaggtaacgggcggaagcgccggtggcgatgatcagcgcgtcacaggtgtactcgccgctgtcgcctgtcagacggaacgggcggttttgcaaatcgacgcggctgatatggtcgaaaatgatctcggtttcaaattttgcggcatgctcgtgcatgcgctccatcagcagcggaccggtgagatcgttcggatcgcctggccagttttccacttccgtcgtggtggtcagctgaccgcctttttccatcccggtgatcagcaccggctgcaggttggcgcgtgcggcatagaccgccgcggtgtatcccgcaggtccagaaccaaggataagcagtttactgtgtttggctgtgcccatgagatccccataataattggcatacattgggctgggattgtagggaatttgttgtcgtaaaaaaagagcacagcgattttgttaacgatgtgtgcaatagaagctgccaatgaattggtgattttcccggcaaggaatataactatttctactgtcggtgggacaattataagacgaaaaaatgagaatcaaccagggcggatgatgaatatctggcatcttgtactaaaaatcgatgttttgctttgacaatcacctgtgcttttgcgaaaacattcaaggaagaagaaaagcagtatttagcgtgcggcgaattttcatgcacgcaaatgccatttttatccgggttaacgaaatctacgcatggtgtggacagacgccatgcgtgatgtcggtgactgccgtcaggcaacgggcttctcacgtacccctgggttacccaatgtcgtacgggtgataacaggatgggctctggcagtgaaggctcagagccggaacaggagtagggaaggaatacagagagacaataataatggtagatagcaagaagcgccctggcaaagatctcgaccgcattgatcgtaacatcctgaatgaattgcaaaaagatgggcgaatttctaacgtcgagctttctaaacgggtgggactttctccgacgccttgccttgagcgtgttcgtcgtcttgaaagacagggttttattcagggctatacggcgctgctcaacccgcattatctggatgcatcacttctggtatttgttgagattactctgaatcgtggcgcaccggatgtgtttgagcaatttaacgccgcagtgcaaaaacttgaagaaattcaagagtgtcatctggtttccggtgatttcgactatctgttgaaaacccgtgtaccggatatgtcagcgtatcgtaaattactgggcgagaccttgctgcgcctgccgggcgttaacgacacccgtacctacgtggtaatggaagaagtcaagcaaagtaatcgtctggttattaagacgcgctaacacggaacaggtgcaaactcgacgtagtttgattacactcctgttaatccatacagcaacagtgccggggagacccggcgctgttgtccgttttagcagcaggcaggaaacagcctgatacctggagagcctttcttgagccaggaatacaccgaagacaaagaagtcaaactaaccaaactcagcagcgggcgccgactccttgaggcgatgctcatcctttgctccctcttcgccatctggctgatggcggcactactgagctttaacccctcggaccccagctggtcgcaaacggcatggcatgagcctattcataatttaggcggcgcccccggcgcgtggcttgccgataccctctttttcatttttggcgtcatggcctacaccatcccggtgatcatcatcggcggatgctggtttgcctggcggcatcaggaaaacgacgaatacattgattattttgccgtttcccttcgcctcatcggtgcgttagccctgatcctgacctcctgtggtctggcggcgattaacgccgatgatatctggtacttcgcctccggcggggtgatcggcagcctgctgagcaccacgctgcaacccctgctgcacagcagcggcggcaccatcgccctgttgtgtatctgggcggccgggctgacgctgttcaccggctggtcgtgggtcagcattgcggaaaagctgggcggcggcatcctgtccgttctcacctttgccagcaaccgtacccgtcgggatgatacctgggtcgatgaaggcgaatacgaagacgacgaggaagagtacgacgacgaagaggcggccaggccgcaggaatcgcgtcgcgcccgtatcttacgcagcgcgctggcgcggcgtaagcgtctggccgagaagtttaccaaccctatggggcgtaaaaccgacgctgcgcttttctccggcaaacggatggatgacggcgaagaggtggtgcaatacagcgccagcggggcgcctgttgccgccgacgatgtactgttttccggcgccagcgccgcgcgtcccgcagaggatgatgtgctgttctccggcgccagcgccgtgcgcccgggcgatttcgacccttacgatccgttgttgaatggccacagtatcgctgagccggtaagcgcagcggcggcggctactgccgcgccgcaggcgtgggcagaatcaccggtgggccatcacggcgctgcgccagcttatcagccggaagccagctatccgccgcagcaggcctatcagcctgaacccgctccgttccagcaggctgcttatcagccgccagcggggcaaaccgcaccgcaggcgtatcagcctgagccagcgccgtatcaacagccggtttacgatccgcgtgccggtcaacctgcgccgcaggcctatcagcctgagccagcgccgtatcagcagccggcttacgatccgtatgccggtcaacctgcgccgcaggcctatcagcctgagccagcgccgtatcagcagccggcttacgatccgcatgccggtcaacctgcgccgcaggcctatcagcctgagccagcgccgtatcagcagccggcttacgatccgtatgccggtcaacctgcgccgcaggcctatcagcctgagccagcgccgtatcagcagccaacttacgatccctatgccggtcagcctgcgcctcagacctatcagcagccggcttacgatccgaatgccggtcagcccgcgccgcagacctaccagcagccggcttacgacccgcatgccggccagcccgcgccgcagccgtatcagccggagccagcggcgtatcagccgcaaagcgcgccagttcccccaccggagccagagcccgaggtcgtgcaggaggaagtgaaacgtccgccgctctattatttcgaggaagtggaagagaagcgggcgcgcgaacgcgagctgttggcctcctggtatcagccaattcctgagccggaaagtccgattgccactaaaccgctgacgccgccgaccactgcgtccaaaccgccagtggagacaaccgtagtctctgcggtagcggctggggtgcatcaggctaccgccgccagcggcggcgcggcggcagcaacctcgtccactgccgcatccgctgcggctacgccattgttcagcccggcgtccagcggcccacgggttcaggtgaaagagggcatcggtccaaaactaccgcggcccaatcgcgtgcgtgttcctacgcgtcgggaactggcctcctacggcatcaagctaccgtcgcagcgggaggcggaacagcgcgcgcggcaggcggagcgcgatccgcattatgatgatgagctgctctcggatgaggaagcggatgctatggagcaggatgaactggctcgccagttcgccgccacccagcatcagcgctacggtcatcgctgggaagacgataacgcgactgatgacgatgaggccgacgccgcggcagaagcggagctggcgcgtcagtttgccgctactcagcagcagcggtacgctaccgagcagccgccgggcgccaacccgttctcgccggcagattatgaattctcgccgatgaaaacgttggtcaatgacggcccgagcgaaccgctgtttacgcccacgccggaagtccagccgcagcagccggcccagcgctatcaacaaccggcggccgctccgcagcagggttatcaacctgcgcagcatcagccgatacaccatcagcctgtgccgccgcagccgcaatcctatccgactgcgtcgcagcccgtacagccgcaacaaccggttgccccgcaggggcatcagcctgccgcccctgcgccgcaggagagcctgatccacccgctgctgatgcgcaatggcgataggcgaccactgcaaaagccgaccacgccactgccgtcgctggatctgcttaccccgccgccgagtgaagtcgagccggtggatacctttgctctcgagcagatggcacgcctggtggaagcgcgactcgccgatttccgcattaaagcggatgtggtgaactactcaccggggccggtgatcacccgcttcgaactgaatctggcgcctggcgttaaggccgcacggatctctaacctgtcacgggacctggcgcgatcgctgtcaacggtcgccgtgcgcgtggtggaggtgatcccgggcaaaccgtatgtcgggcttgagctgccgaataaaaaacgccagaccgtctacctgcgtgaagtgctcgacaacgccaagttccgtgataacccatctccgctcaccgtggtgctgggtaaagacatcgctggcgatccggtagtagccgatctggcgaaaatgccgcatctgctggtggccggtaccaccggttccggtaagtctgttggcgtcaacgccatgatcctcagcatgctctacaaggcgcagccggaagatgtgcgtttcattatgatcgacccgaaaatgctcgagctgtcggtctacgaaggaattccgcacctgctgacggaagtagtcaccgacatgaaagacgccgccaatgcgctgcgctggagcgtcaatgagatggagcgccgctacaagctgatgtcggcgctgggcgtgcgtaacctcgcgggctacaacgagaagatcgccgaagccgcgcgcatgggacgtccgatcccggatccgtactggaagcctggcgacagcatggacgccgtacatccggtgctggaaaaactgccgtacatcgtggtgctggtggatgaattcgccgatctgatgatgaccgtcggcaaaaaggtggaagagctgatcgctcgcctggcgcagaaagcgcgcgcggcggggatccacctggtgctggcgacacagcgtccgtcggtagatgttattaccggcctgattaaggccaacatcccgacgcgcatcgcctttaccgtgtcgagtaaaattgactcacgtaccattctcgatcagggcggcgcggaatcgctgctgggtatgggggatatgctttactccgggccgaactctaccacgccggtgcgtgtccacggggcgtttgtgcgcgaccaggaagtccacgccgtggttcaggactggaaagcccgcggtcgcccgcaatatgtggatggcattacctccgacagcgaaagcgaaggcggcggtggcggcttcgacggcggggaagagctggatccgttgttcgatcaggcagtcaactttgtgaccgagaagcgcaaagcgtcgatttccggggttcagcgtcagttccgcatcggctataaccgtgccgcgcgtattatcgaacagatggaagcgcagggtatcgtcagcgagcagggccataacggtaaccgcgaagtgctggcgccgccgccctttgaatgagtgcaaagttgggtaaataagcgcaaaatcagccaattcttctgtcccgccgccgccggcggtcctacagtaggggcagaagaggctcccgcgtcgggagtgacgcacattaaggaagaacaatgaaaaaactcgcaatcacctgtgcattactgtctggtatggtcgtcagccaggtctgggcagatgcggccagcgacttaaaaagccgtcttgataaagtgagcagcttccatgccagcttcacgcaaaaagtcaccgacggtagcggtaacgccgtgcaggacgggcagggagacctgtgggtgaaacgcccgaacctgtttaactggcatatgacccagccggatgagagcgtcctcgtttcggatggtaaaacgctgtggttctataacccgttcgtcgagcaggccacggcgacctggctgaaagacgccaccagcaacacgccgtttatgctgattgcccgcaaccagtccagcgactggcagcaatataatatcaagcaaaatggcgatgattttgtgctgacgccaaaaagcggcagcggcaacctcaagcagttcacgatcaacgtcggtcgggacggcactatccatcagttcagcgccgtcgagcaggatgatcagcgcagcagctatcagctgaaatcgcagcagaacggcgccgtcgacgcagctaagttcacctttacgccgccgaaaggggtgacggtggacgatcaacgtaagtagaggcgaaagtgagcaatctgtcgctcgatttttccgacaacgcgtttcaacctctggccgctcgcatgcggccagaaaatttagcgcagtatattggccagcagcacctgctggcgccgggtaaacccctgccgcgggccattgaggccgggcacctgcattcgatgatcctctgggggccgccgggtaccggcaagaccactctggcggaagtgattgcccgctacgccagcgccgatgtcgaacggatctcagcggtaacctccggggtgaaagagattcgcgaggctattgagcgcgcgcggcagaatcgcaacgccggccggcggaccatcctgtttgttgacgaagtgcatcgctttaataaaagccagcaggatgcctttctgccgcatattgaagacggtaccattacttttattggcgcgaccaccgaaaacccctcctttgagcttaactcggcgctgctctcccgcgctcgcgtctacttactgaaatcgctcaccaccgacgatatcgagcgggtgcttgaccaggcgatgaacgataaaacccgcggctacggcggccaggatatcgttttgccggatgagacccgcagggccattgccgagctagtgaatggcgacgcgcggcgagcgctgaataccctggaaatgatggccgatatggccgaaagcgatgactcgggcaagcgggtgctgatggcggaactgctgaccgagatcgccggcgagcgaagcgcgcgctttgataataaaggcgaccggttctacgatttgatttccgccctgcataagtcggtgcgcggtagcgcgccggatgcggcactttactggtacgcgcggatcatcaccgccggcggcgatccgctgtacgttgcccgccgctgtctggcgattgcctcggaagatgtcggcaacgccgacccgcgggcgatgcaggtcgccatttcggcgtgggactgctttacccgcgtcgggccggcggaaggcgaacgggcgattgcccaggccattgtctatctggcctgcgcgccgaagagcaacgcggtgtacaccgccttcaaagcggcgctggccgacgcgcgggatcgtcctgactacgacgttccggtgcatctgcgcaatgcgccgacgaagctgatgaaagagatgggctacggccaggagtatcgttacgctcatgacgaacccaacgcctacgccgccggcgagcagtacttcccgcaggaaatggcgcaaacgcgctattatcacccgacaaaccgggggcttgagggtaaaattggcgaaaagctcgcctggctcgctgaacaggatcaaaatagcccgataaaacgctaccgctaattgaggcgttgcggtaaggttattacactatttccgtggtcgtagtctgcggccacttttcttttttaattcgataagcacaggataagcatgctcgatcccaatctgctgcgtaccgagccagacgcagtcgcagaaaaactggcacgccggggctttaagctggatgtagataaacttcgcgcgcttgaagagcgtcgtaaagttctgcaggtgcaaacggaaaacctgcaggcggagcgtaactcccgatcgaaatccattggccaggcgaaagcgcgcggggaagacatcgagccattacgcctggaagttaacaagcttggcgaacaactggatgctgcaaaatccgagctggaaacgctgctggcggaaattcgcgatatcgcgctggcgatcccgaatattcctcatgatgatgtgccggttggtcgcgacgaaaacgacaacgttgaagttagccgctggggtacgccgcgtcagttcgattttgaggtgcgcgatcatgtgacgctgggtgaaatgcacggggggctggattttgccgccgccgttaagctcaccggctcgcgcttcgtggtgatgaaagggcagctggcccgtctgcaccgcgccctggcgcagttcatgctggatctgcacaccgaacagcatggctacagcgaaaactatgtcccgtacctggtaaaccaggataccctgtatggcactggccagctgccgaaattcgctggcgacctgttccatacccgtccgctggaagaagaggctgacagcagcaactacgcgctgatcccgacggcggaagtgccgctgaccaacctggtgcgcgatgaaatcatcgacgaagacgatctgccgatcaaaatgaccgcccatacgccgtgcttccgctctgaagccggttcctatggccgcgacacccgcggtctgatccgtatgcaccagttcgataaagttgaaatggtgcagatcgtccgcccggaagactctatggccgcgctggaagagatgaccggtcacgccgagaaagtgctgcagctgctgggcctgccgtaccgtaaggtcgcgctgtgcaccggcgatatgggcttcagcgcctgcaaaacctatgacctcgaagtatgggttccggcgcaaaacacttatcgtgagatctcctcctgctccaacgtctgggatttccaggcgcgtcgtatgcaggctcgctgccgcagcaagtccgataagaagacccgtctcgttcataccctgaatggttctggcctggcagtaggtcgtacgctggtggcgctgatggaaaactatcagcaggctgatggccgtatcgagatcccggaagtgctgcgcccgtatatgcgcggcctcgaatatatcggctaaacttctcactccttcttttaaaagcgcctgcgggcgctttttttacgcccttattgataccgggcaataatccttgccgcgaatgcagtgatactccctttggattaaaccagcataaaaaactaataatatcgcaaagcattatatatatatctatataacgcttgtcagtttattgtgagcaaccaaagcgagtatccatgaaaattaaagcccctgatgctttactggctgctgaggtaagccgccgtggtctgatgaaaaccacggcaataggcggcctggcgctggccagcaacgcactaacgttaccctttacccgactgtcgcatgctgccgatacgccggcgcccgccagtgagaaggtggtctggagcgcctgcaccgtcaactgcggtagccgttgcccgctgcgcatgcacgtggtggatggcgcgattaaatacgtcgaaaccgataataccggtgacgataactatgacggtttgcaccaggtccgcgcctgcctgcgtgggcgttcaatgcgccgccggatctataatccggaccgtctgaagtacccgatgaagcgcgttggtaaacgcggtgagggcaagttcgagcaaatcagctgggaagaggcgttggataccatcgccagcaatatgcagcggctgattaaagagtacggcaacgaatccatctatctgaactacggcaccggcacgctcggcgggacgctgacccgctcctggccgccggggaaaacgctgattgcccgtctgatgaactgctgcggtggctatctcaaccattatggcgactattcatcagcgcagattgctgccggtctgaattacacctacggcggctgggcggacggcaacagcccatcggagattgaaaacagtcagctggtggtgctgttcggcaataaccccggcgaaacgcggatgagcggcggcggggtgacgtactaccttgaacaggcgcggcagaaatccaatgcccggatgataatcatcgatccgcgctataccgacaccggcaccgggcgtgaagatgaatggatcccgattcgtcctgggaccgatgcggcactggtttcgggcctcgcgtgggtgatgatcaccgagaatctggtcgatcagccgttcctcgataaatactgcgtaggatacgacgagaaaacgctgcccgccggtgcgccagccaatggtcattacaaagcttacattcttggccagggcactgacggtatcgccaaaacgccggagtgggcctcgacaattaccggtattccgcgcgaacgcattgttaaactggcgcgcgaaattgccaccgctaaaccggcctatattagccagggctggggtccgcagcgtcacgccaacggtgagatcgccacccgcgccatctcaatgctcgccattctgacgggtaacgtcgggatcaacggcggcaatagcggggcgcgcgagggctcgtatagtctgccttttgagcgtatgccgacgctggagaatccggttgagaccagtatctcgatgtttatgtggaccgatgcgattgagcgcggcccggaaatgaccgctctgcgcgacggcgtacgcggtaaagataagctcgacgtgccgatcaagatgatctggaactatgcgggcaactgtctgattaaccagcattctgagatcaaccggacccacgaaatcctgcaggacgacaagaaatgcgagatgattgtggtcattgactgccatatgacctcctcggcgaaatacgccgatattctgctgccggactgtaccgcctccgagcagatggatttcgcgctggatgcctcctgcggcaacatgtcctacgttatctttgccgatcaggccatcaagccgcgtttcgaatgcaaaaccatctatgagatgaccagcgaactggcaaagcgtctgggcgtcgaagagcagtttaccgaaggccgtacccaggaaggctggatgcgctatctgtatgagcagtcgcgcaaagcgattcccgacctgccggatttcgacaccttccgtcagcagggcatctataagcagcgcgatccgcaaggtcatcatgtggcctacaaagccttccgtgaggatccgcaggctaatccgctgaccacgccttcgggcaagatcgaaatttactcgcaggatctggcgaaaatcgcggccacctgggagctgccggaaggggatgttatcgatccgctgccgatctacaccccgggtttcgaaaactacaacgatccgctgacagcgaaatacccgctacagctcaccggcttccactataaatctcgcgtccactcgacctacggcaacgtcgatgtgctgaaggccgcctgtcggcaggagatgtggattaacccgatcgatgcccgcaagcgcggcattgccaacggcgatcgtattcgcatcttcaacgatcggggtgaagtgcatatcgaagcaaaggtgacgccgcgcatgatgccgggcgtcgtcgcgctgggggaaggggcctggtacaacccggacgcctcgcgtgtggatcaggcgggcagcatcaacgtgctgaccacccagcgtccgtcgccgctggcgaagggaaacccgtcgcataccaacctcgttcaggttgagaagctgtaaggagtaaccgatgacaactcagtatggattttttattgattccgcccgttgcaccggttgcaaaacctgcgaactggcctgtaaggactacaagaacctgaccccggaggtcagcttccgccgcatctatgaatatgccggcggcgactggcaggaggacaacggcgtctggcagcagaacgtgtttgcctattacctctccatcgcctgtaaccactgtgaagatccggcctgcaccaaggtctgtccgagcggcgcaatgcataagcgcgaagacggttttgtggtggtcaacgaagaggtatgcattggctgccgctactgccatatggcctgcccgtacggcgccccgcagtacaatgccgacaaaggccatatgaccaagtgcgatggctgtcacgagcgcgtcgccgaggggaaaaagccgatctgcgtcgagtcctgcccgctgcgggcgttggatttcgggccgattgccgaactgcgcgctaagcacggccagctggccgcggtagcgccgctgccgtcggcgcactttacccggccgagtatcgttatcaaacctaacgccaatgcccggccgtgtggcgataccaccggttacctggcgaacccgaaggaggtgcgagatgggaaacggatggcatgaatggccgctg

SEQ ID NO: 58 - DNA, 320394 bp, Unknown
  source: /note="Description of Unknown: MKP2_coc_1 Mutant Bacteria sequence"
tgcggcctccacatcgctgagacgttcccggaaggccggggcagcccgcatggatgcgggctgagggccgtgttttgcacggacgctgcctcggcccgacccgaagcctgcagggataagtcgaaggcaccacgcagcggcgatgttgctggccggagcccgggggtacagggggcggcggcgactggccgccccctgtgcgctccctgcgccgtaagagacataacgcagaagactaaccgggagcgcaatgtgcgctgaagccacagataacataaaagacttcccggcagggctttgccttcccccctactcccggagggagagggaaccgtccagcagcgccgaccgggcaatacccgaagatggcacattgccagccatctgattccctgtgattaatgttggtccagccacgccagcgcctgctcgcccgcctcgtccatcggcaggtagaccagcaggcgcgagccgttgcgcggcgccgaataccagtacatctgctgcaggctgaatcgcccgagctgcgggtggttaaaatgtttaatctggttttccacgccgcgcacctcgtagcgctgatgccacagcgcttcaaactccgacgaggcggcgaaaaagcgcgccagtttgttttcccacgccggatcgccgcggtgctcggccatcgcggcgcggaaataggagacgaaggtcggcagcacatcgcgattttcgatccggctgcgccaggtctcatgggtcagatagagataaatgcagttgcgatcttcttccgggagggtggcgaaatcgatgcccatcaggcggcagaagctgtcgttccacgccacaatatcaaagttcggtttctgaatgctggccggctgcggcatcaggctgtccagcatccggcgggtccctgggctgatgccttcgcacaccgtcacctgggtggcttccggcggggtcagcccggcgagcacgaacagatgccgggtctccagcggactgcactgcagggcattcgccacccccaccagcaccgcctccgacggattcacctcccgcccctgctccagccaggtgtaccaggtaacgccgacgtcggcgagcatcgccacctcttcccggcgcagacccggcgtgcgccggcggcccacccggggcaaccccaggcgctgcggatcgaggctttcacggcgggcgcgcagaaaggcccccagctgtttgcgtcgatcgtccggcacggcgatcgtcgactcccgttgcggcatcgtggtcatcacccctccagcatagtagtgccaataccagtatagacaggaactggtacccgtttaatttatcggtaatgctacgtcggtctgctgaatgacgcaatggagaatcccatgaatacgtctgctgtttcacccggccgcgccggtctgttgctgctgctgagcggccagatgctgccgcttattgatacctcgatcaccaatgtggcgctggacgccatcacccacaccctggcggccagcgccacgcagctggagcttatcgtcgcgctgtacggcgtcgcctttgccgtctgcctggcgatgggcagtaagcttggcgataactatggccgccggcgcctgtttatgtggggcgtcgccctctttggcatcgcttccctgctgtgcgggatggcgaacagcatcggcgccctgctggcggcccgcaccctgcagggcgccggggcggcgctgattgtgccgcagatcctcgcgaccctgcacgtcaccctcaaaggccccgcccacgcccgggccatcagcctgtatggcgggatcggcgggatcgcctttatcgtcggtcagatgggcggcggctggctggtgtcggcggacatcgccgggctgggctggcgcaacgccttttttatcaatgtgccgatctgcctgctggtgctggctctgagccgccgctatgtgccggaaacccgtcgcgagacgccgtcgcggattgactggcagggcacgctgtacctcgcgctgatcctctgctgcctgctgttcccgatggccctcggtccggagctgcactggccgctgtggctgcagctgatgctggtggcggtcctgccgctgctgttcgccatgcgtcagagcgccctgcgccagcagcagcgtggcgaccatcctctgctgccgccgcgtctgctgcagttgaccagcatccgcttcgggatggccatcgccctgctgtttttcagcgcctggtccggctttatgttctgcatggcgctgaccatgcaggaggggctggggatggcgccgtggcagtccggcaatagctttatcgccctcggcgtggcctattttatttcggcgctgtatgccccgcggcttatcgcccgctacagaatggggcggatcctgctgaccggtctgacggtgcagatcgccggtctcctgctgctgtgcgccaccttctcccgcttcggcgtcgccaccaacgccctgacgctggtccccgccacggcgctgatcggctatggccaggcgctgatcgtcaacagcttttatcggattggcatgcgcgatatcagcgccagcgacgccggggccgggagcgcaatcctcagcaccctgcagcaggcgaccctcggtctcggaccggctatccttggttcgctgttcctggcgctggcccgtcgcggcggcggaaactatccgcaggcgctgattgattttctgctggtcgaggtggccatgatgctgttgctgggggcgatagcgctgtggctgcgccatcatctcaaccgacagccggcgacggtggcctcgtaataccggcggcggtaatttgcataatagctatccagcggtcatcatacccgctggatattcaggagacgttatgcaggaattaatatcgcaaattgccgccttaggaatcgaaataacccccacccgctcgctgatgattatcttcggcattatcttgttcaccgccgtggtcgtgcatctgatattgcacaaagtggtcctgcgcgcatttgaaaaacgggcgctggccagcagccatctgtggctgcaaatcatcacgcagaataaactctttcaccgactggcctttaccctgcaggggatcatcgtcaacgtccaggcggtgctgtggctgcaaaaaggcagcgaggccgcggaaatattaaccaccgtggcccagctgtgggtgatgatatatgccatgctgtccttcttctcgctgctggatgtcattttaaaactggcgcagaaatttcccgccgcctcacagttgccgctgaagggcatattccagggaattaagctggtgacggcgattattatcggcattctgattatttcgctactgataggccagtcgccagcgatcctgattagcgggctcggcgcgatggccgcggtgctgatgctggtgtttaaagatccgatcctcggtctggtggccggtattcagctctcggccaacgatatgctcaagcttggcgactggctggagatgccaaagtacggcgccgacggcgcggtgatcgatatcggcctcaccacggtcaaggtgcgcaactgggataataccatcaccaccattccgacctggtcgctggtctctgactcgtttaaaaactggagcggcatgtcggcctccggcggccgccgcatcaaacgcagccttaacatcgacaccaccagcattcatttcctcgatgaacaggagcagcagcgcctgatccgggcgaagttacttaaaccctatatggattcacgccacgaagagataagcgcctggaaccagcagtacgccggggagcaatcgatcctcaatgagcggcggatgaccaacgtcggcaccttccgcgcctatctgcaggagtatttacgccatcatccgcgcatccgccaggatatgaccctgatggtgcgccagctggcgccggatgccaacggcttgccgatcgagatctactgcttcaccaacaccgtggtatgggcggaatatgaggggatccaggcggatattttcgaccatgtcttcgccgtggtggatgagtttggcttacgcattcatcaaacgcccaccggcaacgatattcgcgcgctgaccggcgccttctcccgctgatcctcagacgctggcgcggtctatcacgcgccagtccatcatcacccgctcgacggcagcgtcgggatcgtcgatgcgtttcatcagtagagacaccgccgtacggccgatcgcccgggagggctgttcgacggtggtcagctgcggggagaccacttccgccagctcggtgccatcgaagccgatcaccgcgatatcctccggcacccgcagtccggcctgggcgatagcccgcagcgccccggcggcgagggagtccgaaacggcaaacaccgcatcgggcttctcgtcttgcgacagcagttgctccatcgcccgtttaccggccgccgcgctaagatcctgcgcgtaggtcacctgctgatacgccagaccgtgcacgtgcagcacgcttttatagccgcgctcgcgcagacgggcatagcgatagctgaggtcgtgattaatgagcgcgatgcgtcggcggccgctatcggccaaccgggataccgccccctgagccgcctcaacgtcgttaatcccgacgcaggagatgctgccggtgtcggcatactccgcgcactgcacccagggcgcgtcgccaagcatggtggtcagttccggcaggctggagagcgcgttcatggtaataatgccgtcgaccattttgccggagagcagctgcaggcccgaggtcgagcgggccagatccgacccggagttacacagcagaatgcgatagccattcttctccgcctcttcttctatccccttcaccacctcggcgcaaaaggggttagcgatattggagaccatcaccaggatcatattgctgcgggcggttcgcagctgacgcgccagcaggttcggctgatagttgctctctttgatcgcctgcagtacgcgctcacggtttttggcttttaccgtatcgctgttgttcagcacccgcgacaccgtggccaccgagacgccggccagacgagcaattttctgaatagacataaaccctgcacttcctgcgatagaggtggatcctgcaggctatcataaatgacctctgattggcctgccagcctggcgcgaaagcgtagctcagcgagacggtgtcccgggaaactattaataatcagggcttctctcccgccccgttaacgcgcatccttttgccgtttcatattctcattagcgcaggaggcgcaacagaccgcctgcgccccattttttcttttatgattaaggatgatatccccatgaggctctccaccgcggttctcgccctcagctgtgccctggcaacgatcaccggctgcacctcgtcaacatcgtcaccggaacgccatgcctacgccttcgtcgcccaccgctccgattttgtcggcggcaacttcaccgtcaaccgccaggaaaattaccgtttaaacctgccgacctttacggcgatgtatgcccgcggacagcaggataaagccgctggcatgagcgaaagtgatgcccgccgcaccgcggaagccatcaaacagcaggcggcgcagggcacccgcaccgagcacgccttcaccggcaatgccagcgacaaatgggataatgcgatggaaaataaagatgccgtcctgttcggcaacgagctctccggtgcctatctcgacggctatcttggggtgaaataatcctgcgccccgcctgcgctcagcgttcgacgctgacccagcgctgttcctgatggcttttgacgatcgcctcgatgatgtacatcacatcggcgccgtcgtcgaaagcggcgaagcgccggaccccggccgccggcatcttcccggcgcgcaccgcctgataaaaatgccccatcatatttttaaaggcgtccggccagccctcaatatggccgccggggtaatgggcgctgtcagcgatttccggccgcagcaggctcgggtcatcgctgagcaggcgatccggctgctcgcggtggccgatccacagccgctggggcacttcctgatcccaggccagagaacagaggctgccgttaatctccaccgccagacggtttttccgcccggcgctcacctgagagaccataaagctgcctttgctgccatcgtcaaaacgcaacagcaccgagccaaagtcctcggtatcgacaggccgcgtttcatatgcctgcgcctcgtgaacggcgctgaaggtcgctttgccattgaccggcgctttacgcgttggccagacgatagacagatccgccatcacctcgacaatccgccgaccggtcataaactgcacggtatcgcaccagtgggagccgatgtcggccaccgtccgcgacgcgccgccctgcgccgaatcgacccgccagttgtagtcggtctccagcagcatccagtcctgcagatagctgccgtgggccgcgaagattctgccgacctcgccatggcggatcatcgccgccgcctgctggaccatagcgaactggcgatagacgaagctgacgccatgcaccacgccggcccgggcggcaagcgccaccagctcccgcgcctcccccgccgtcatacacagcggtttttcggagaagacgtgcagcccggcggcgaggatctgccgattaatctgggcatgtagatggttgggcgtacagttatgcaccacctgcagccccggatgggccagcagcgcctccacgctgtcgtaggcatgggcaatgttcagcgctcgcgccttgcgctgcgccgcctcaaggcggctgtcgcacagcgccaccacctcgacatctcccagccgccgcagcgcctccagatgcgccgggccaataaaccctgccccgataatcgcgacctgaatcatgttattccctcccgccggcggcaaagtcatcgaaggcccgtccggcaacgggaatgatatggcggcggataaactcgctgccctcgcgcgcgccggtctcactatccttcaggcagcactcccactccagcaccgcccagccggcaaaatcatattcggtcagcttactgaacacccctttgaagtcgatctgcccgtcgccgggagagcggaaacgcccggcccgctgctgccagggctggtatccaccgtagacgccattgcgcccgttgcggcgaaattcggcgtccttgacgtgaaacgctttaatacgcgcatgatagatatcgatataggtcaggtagtccatctgctgcagatgcaggtggctcgggtcatagagcatattgcagcgcggatggttatccaccagcgcaagaaaacgctcaaaggtcacgccatcgtgcaggtcttcgccggggtggatctcatagcagacatcgaccccctgctcgtcgaagaggtccagcagcggccgccagcgccgggccagctcggcaaaggcctcatccagaagcggctgattgtgcggcggccacggataaaaaaagggccatgccagcgccccggaaaaggtcgcgtgcgcctgcagccccaggcggccagaggctaccgccgcctggcgcactttctccaccgcccagcgctggcgcgcctgcggatcgccatgcagcgccgccggggcaaaggcatcaaacgccgcgtcatacgctggatgcaccgccaccagctgcccttcaaggtgagtggacagctcgctgatcaccagcccatgctccgccaggatgccgctgacctcgtcgcagtaggtctggctcgccgccgcccgctcgacatcaaaaatcgccgggtggttgcaggggatctgcaatgccttgtaccccaggccggcggcccactgcgctatccccgccagggtgttgaacggcgcctgcggcccgataaactgcgccagaaaaatgcccggtcccttaatcgttttcataccccctcctgaaaaattagtgcggctctttctcgttgtactggaaagagaaaaggaaaatcagcgcgataaccgcggcggccaccgccgggatccaccagaaggtcacccaggcctgaggcacgctctggccggccaccagatggttatacagcgcgccggagatctgcgagcccagcagcatgccgatcccgtaggtgaacatcacaatcatgctctgcgcctggccttttaccttctcgcccgccacgcggtcggtgtagataaagccaacgacaaagaaaaagtcatagcacacgccgtgcagcaaaatgcccagatagagcaggaagcgcccctcctcgctgactccgagagcgaaaaaggcgtagcggacgaaccacgccgccatgccgatgagcagcatgtatttcaccccgaggcgacggaacagcaacgggatcaccagcataaagacgatctctgacatctgaccgaacgacatcgcggtgctgacatctttgacgccggcatccgccagatacgacgcggtataggcgtaataggtgcctaacggcacggaaattaaggtggcgcagagggagaaaatcaggaaatggcgggttttcagcagcgcgaaggcgtccgcgcacagcaggtcgcgaaactgaaccggcatgcctttggccggcgccggggtgtgcggcagcgtcaggctgtagagcgccagcgcgaccgaacagagcgccgccagcgtgaagatgccggtggtatcagagataccggtcaccccgatgcagatcccggcgataatccagccgatggtgccgaacacgcggaccaccgggaaggttttatcgacattggccaggctgtggaaggcgatattgttggtcagcgccagggtcggcatatagcacagcgtatagccgaacagcaggccaatcagcagggcgccgttctgcgccaccagcgcctgcgggacaaaccacaggatcgccgccccggccaggtgcatcaccgccatcaccttctgcgaggcgaaaaagcgatccaccagcatccccagcacaaagggagacaagattgaggcgatcggcccggcggagaacgcatcgccgatcagcaatgacatctcatagcgggtcatcaccagccccagggtcaccgaccagctgccccagataaaaaactgcataaacatcattaacgacagccgcggcaccagaaaacggtggctcacgcgaacactttcccgaccttctgttgttgtgaccatgttgctcgccctcagaaaagtaatcgattacaaaaccactcaaaacaaaagtaatcgattacaaaaagaagatcgccaggcaaatgcgccgcctgcgaagaggatcacaataaaaaggcaggcagccccgccggacggcggggcatctcgcttacgccgggcggcgcagcagtttgaaggcgataaacaggaacaggatccacaccggcagcaggatcgccgacagacgcatgccgtcgatagtgcacatcagcgccaggatcagcccaaggaaagcaatgcagaagtagttgctggcgggcgccagcagcgctttgaacttcgattcgcgccctttgcggcgctgggcggcgcggaacttcaggtgcgccatacagatcatgatccagttcagcagcaacgtcgccaccaccagggccatcagcagccccagcgcttcatgcggcagcaggtagttcagcaccaccaccagcgaagtgataattccggagagcagcagggagttcaccggcacgccgcgcttgctgacgcgggcgagaaatttcggcgcattaccctgcaccgacaggccgaacagcatccggctgttggagtacacgccgctgttatacaccgacagcgaggccaccagaatgacgaagttcagcgcggaggccaccaggttgctgtccagattatggaaaatcatcacaaacgggctgctgtcggatttgatctccacccacgggtagagcgccagcagcaccaccagcgaaccgatatagaacagcaggatacgatagaccacctgattgaccgctttgggaatgctcttttccgggttttgcgcttcggcggcggtgatgccgataagctccagcccgccgaaggagaacatgatcaccgccagcgacagaataagtccgtgccagccggtggcgaggaagccgccgtgtttccacagattgtcgaacccggctttgctgccgccgtggccgccgaacagcatccacaggccgaaggcaatcatgccgataatcgccagcaccttgatcagcgcgaaccagaactccgcttcgccatacaagcgtacgttgaccaggttgacggcgttaataatgatgaagaaagccgccgcccaaacccaagtgggcacgtcgggaagccagtactgcatatagatcccggcggcggtcagctccgccatccctaccagcacgaacatcacccagtagttccagccggagagaaagccggcgaacggcccccagtacttataggcaaagtgggcaaaggaaccggatactggctcttccaccaccatttcgcccagctggcgcatgatcagaaaagcgacaatcccggccacggcgtagcccagtaagaccgccgggccggccatttgaatcgcgggaccaatgccgagaaacaggccggtgccaatcgcgccgccaagggcgataagttgaatatgtcggttctgtaaaccgcgatgaagcgtcgggccgctctcttctacggcatccgacgacgttgacgcgtctttcacgtcgttcccctgtgtgtttttgcgaaggggcaccttttatcacttaggggggattgtcgcaagttgcgtggggcgagcgtcagccgcccgccccgctttttttagcgtcagaagtcgtagctcattgagacgcggacggtacgcggatcgccttcgaacaggtaagtaccggtatcgtcaatgccagaccagtacttctcgttggtcacgttggtcaccccgacgcgccagatcatttcgttctggtcggcgttcagacgcatacgatagcgcaggcctaaatccagggtggtgtagctatccagcttcttggtattggccgcatcggcatactgcgagccgctatgattgacgcgcgcggtggcggtcaggccttccaccggcttgatgtcatattcggcgccgagtaccgcgtagaagttagccaccccgatggcatctttaccgtcggttgcgccttcagcggttttagtctgtttggcatccagccagacggtactggcgttaagacgcagtcccagcatcggctcgccaaagacgttcatctctacgccgcggttacgctgctcgccatcgaggccgtaattgccagcggtatcggaaatggcgttcggttttttgatttcaaacagcgccagcgatcctccgatcgtaccgtagtcgatcttgacgcccacttcgtcctgcttcgagtgcgcgatcccggtactctgcccggcattggccgccgtcgtcggcgccacagagcccggctgcagcgcttcggtatggttagcatacagcgacagctgctcccacggcttgtacaccaggccaaacgtcggcatccagcggctttgggtataacgcgaagaggtatcttccagcccggtggcgttgctgtagttgcgcacaaccactttctgatgacgagcggcggcggtaaacagcactttatcgttaaagaagccgagggtatcactcagcagccagccctgcgtacggctgcgcgaggtgaccagcggatcgtggtagttgccgccaaaataggcgttatccggcatcgccacatcatggttgtcaaagatattagtggtcgggtttctggccgacatccgccaggcggtcgcatcggtatgcacctgcgccgcatagccgaggttcaccttatgcgaaatcgcgccggtattgaaatcgccgcgtaccccgcccatgccgctgatcgcgtcgataatgcggttagtatccaggcggcccaccgtcgcatcgccgtttttattcagaagcttcggcgcgctgtaggtaccaatttcatgcgaatgctggccgccgagggcgctgtataccgtccagctatcggtcaggtcatattctgccttcgccatgccgaactcgctttcaatatcgctatagccccacttctggctgtagtttttgctgttgtccggcagcgccggaacgaaatccacgccgctgatattgacgcccatcgtaccgccgtggaacgttttcttctgatagccgaaatcgagcgaggagcgtaaacggtcgccgcggtaatcaagccccagcgaagccagcgtggtacggcgtttatcattatcgatagcgccttcaccctcgcggtgcaccaggttgacccgggcgccgaactggttgttgtcgccgaaacggcgccccaggtcgagggtgccgcccacctgagaatcagaggtatagtcgacgccaacgcgtgcggtcggcagatcttccgcccgcttcggctcgaggttaatcatcccgccgacgccgctgctggccgcgccgttaagcaggctgttagcccctttgaaaatttcaacgcgctccagcatctgggtgtccatcacctgacgcggcaccacgcccgccaggccgcccatcgtcatgtcatcgccatcgagcttaaacccgcggattcgataggtctcggcgaaattgccgtagccctgtacggcctgcacgccagcgtcgttactgacgacatcggcgatagttttcgcctgctgatcctgaatcagcttcgaggtatagccgatgacgttaaacgggacgtccatcgctttttgttcgccaagcatccccagacggccgccgtgggcgatctggccatcgaggaatgccggaaccaccaggtcgccgccggatttaaaatcgctggtttcgttagcctcgacgatgagggtctcttcgccaggctgcttcgcggcggcagcgtccgcggccatcgccgtttgactggcggcgccgatggctaaggccagcagcgttttacgcagcgggaaggatgaatagtgcgtggtgtgcataatttgccccatggatgaggataaatgaatcaaagggcccgtcgccggacccgttatttttattgcgcgttcaggtcgatacgtacgacgctgtccgggcctttagtggagtggtctttattgaagggctgtttgacggtgacaaacagcgtctgaccatcggcggaaagcagcaggctgttgggattggccggcagcgcccagcttttcttcagcgtgtagcggctggcgtcaaggctgatgaccttgccggattcacgctgtgaaatataaatttcgtggcgtttcttattgaactgcaccgccagcgaatcgccgacgtcgagctgtttaagcagcttgccgctgtggatatccagcaccagagtggttttcgctttcgagttgtcggtcacgaacagacggccggtgtcgctatcttcggccatattaagcagcagcgccggcttgtcgcccagcggcttccagcgctgttcaatgcgttggttacgcgggttgatcaccagaatttcaccgctgccgttagcggcgtacacgcgaccggtttgcgcggagtagtgcaggccggtcatccacttaccggtatttttaatccgcgttttcagcttcagggtagtggcgtcaaccacccagatttgcgccgggtcggcgaccgcgccaacgtagagagtattattcagcaacagcagctgacgggccccataagggcgacctttttcattgcgctcgctgaacagcaggcggttttttaccttgccggtggcggtgtcgatagcgctgatgccgccgtccagcgaattgctgacatacagcgttttaccctccgcagagagctgtaaagcgaagtttttcagatcggtatgcgtcaggccgatggtattgagggtgtgcggatccagtgtgtagaccgccccaccctgcacatttttaaagccttcggcgctggcgacgtacagcgcatcaccctgcgggcttaacgccatctcgtacagcccttccgctagctggcgctgcagcggttgcgccacgttagggactggcgagtcgacaaccggttgggaaacggcagaggaatgaggcgtcgcgcagccgcttaacgccgcgctgatggccagcgtcaacgccggaagtgtgtatttcattggatcaaccctataaaaaatcaatgacccgatggacgcgcagcggccgatattgtgtgtttccagcctgctgtctttacgtcaccctacgccttcgcgactcttagtgaacgactcactggcgcagctcgaaccttgccaaaattacgaatgaaaaagagaatgagaaccatactcattatctaatgtcaaacaagtcctggcgggcaaaaaagataatctgctgattttttttacggcaatggcggattaggaggggaagaaaggatccgtgacgggaaaagcgtcccggaagcgatgccgtgcaccgcccgggttgcgggccagaaggcacacaatgtgttgcctatctggcgcaaagcgacacatgacagcgctatgtcgctgaacggcgattaatatcgcaccatcaccgacttcagctccgtataatcatcgataaacgcgctgccgaattcgcgcccgatgcccgagcccttcatgccgccgaacggtaccgccgggtctaggaaggtatgcatattgacccatacgatgccggcctcaatcgcctccgagtagcgtagcgcctgacgaatattatccgaccagacgctggccgccaggccatacggtgaggcattcatccgcgccagcgcctcttcttcactgcgatagccgataaaactgcacaccggaccgaaggtctcctcccgcatcagggtgctctcttcgctgcgcactttgaccgcggtcggctgcaggaaatagccctcccccggcagcgcttcgccgccgcagacgatggtatcgccctcgtcgcgggcggtctgaatgagccgcaaaactttgtcatactgctggcggttggccagcggccccatcagcgtccgttcatccagcggcgaccccggcgcaaaagcgctgagcttgtctttcagcagcgccagtaccgcatccagttttccctgcggcagataaaaacgttccgcagcggcgcaaatctgcccctggttcaggtagccagcttcaataatgccgttgaccatcgcctccggcgtcaggtcatcgaggaacagcgcggcgtttttcccccccagctcaagggtcacccgtttacctgacgcactggccgactgctgaactttttcaccggtggccaccgagccggtgaagctcaccttggcgcaggccggatgcgtaatcagccgctgggcaatctcgccgccggcgccgttgaccacgttaatcaccccatccgggatacccaccgcttttgccagctccgccacgcgcagcagcgtcagcggcgtatattcgctcggcttgaggacgatggtgcagccgcagaccagggccgccgccagcttccagatggcaatcatgatggagaagttccacggcacgatgccaaccaccaccccaagcggctggcggcgggtaaaggcggtatatttctccccggccatcgatggcagcgagacatccagcgtttcaccggtgactttccccgcccagccggcgaagaagcgcaggaacgccaccgactggtccagctcgagcatccgcgccagcgtgatagttttgccggaacagagactttccagctgcgccagcgcttcgcgatgctctgccagcgtgtccgccagcttcagcagcagcgcgccgcgcgccagcgtcggcatctcgcgccactgactaaacgcctggcgggcgctctccatagcgcgatccgcctggtcactatccgccgcggtgaccgcggcaatcgcccgcccggtcgccgggttgatcaccgcgaacggcgcgccgcggcccgcctcacgttgaccggcaataaactgcccgtgcggctggcgtaagaaagcggtcacttccgccagtaaggttatctcgctcatcgtcagcacccgtttttcagcaaagttaacccatcacagcacggcttcccgccgcagcctatcgttctaaagaacgtcattcttccggacgatattcaacgcccgcgcggcgtgctgtgatgagggtcttgagccaggcaagaccacagggtaacgcgatgaacatcaagatcgatgcgctgaactactacggcgcgacgaagaaatatcacctccatttcccggcgctacgggaagatattgaagccgatgtggtaattatcggcggcggcttctctggcattaacaccgcccttgagctggcggaacaggggatcaccaacgtggtggtgctggaggcgcgccatctcggctacggcggcaccgggcgcaacggcggccaggtgatggccggtatcggccacgatatcgaagcggtaaaaaagcacgtcggcaaagaggggctggagacgctgtttaaaatcgccaacctcggcgcgggcatcattcgcgaacgcatccgcaaatacaacatcgacgccgatttcgtgcccggctacggctatctcgcctataaccagcgacagcttaaaacgctgcgccagtgggagaaggagtttaaagccgctaccccggatgaagagatcgaactgtataccggaaaagaggtgcagcaggtggtgggctccgaggtctactgcggcgcgctgaaacatatgggcggcggccagatccattcactcaatatgctgctcggttcggcgcaggccgcccactcgctgggggtgaagattttcgaatcctcaccggtagtggaagtgaattacggcaaacaggtacaagtgcgcaccgcgatgggcagcgtcaaagccgccaaactgctgtgggcctgcgacagtttcctcaacaatatggagccggagatctacaacaagacgctggtcacttactcctaccaggtgtcgaccgagccgctctccgatgaactgatcgagcgcatcagcccgctacgcggcgccttcagcgatattcgcccggtaattaactactaccgcgtcacccgggaaaaccgcctgctgttcggcagcgccacccgctttgtggagtatacgccgaacgatttcgccgcctggaatcgcaccttgctggcggaggtcttcccctatctcagggatgtgaagatcgattttgcgtggggcgggccgatggcctgtagcgccaatctgttcccgcagatcggcaccctacgcgatcacaacaacgtcttttacgtccaggggtactccggcttcggcgtcaccccgtcgcacatcgtgtgcaaaatcctcgccgaagggatcaacggcggttccgaccgctatcgcctgctgagcagcatcccccacgcgaccatccacggtcgtgacagcctgcgtctgttattagtcacggccggaaaactgatgcatcaaaccgccggtttctggaaaggccggagttaaccaggagaacgctatgcacgcttttaaacttaaacacccggtacctgatctgcagccgatcggcagcgtcagcctgctcggcgcgacgccgaccgccggcgacccgcaggtagcgggcgcgatgatctacggcgagccgcaggacgcctttacctgcggactgttttcgtccactgaggggagctttaccatgacctatccgtttaccgagcacgccaccgtgctggagggcgaagtggagctgaccgtcgccggcggcgagccgcagcgctttgcgccgggcgacagctggtttgttaaacagggcaccgaagtggagtggaaaattctgacgccgcgctttgtgaagcactacctggcgaacgtcgagacccgctaacaaactgataatgcccggcggcgcattacgccttctccgggctaccaaatcgcgcagcgctgtagccccggtaagcggcagcgccaccggggggtttgaggccgccaacaccggcagtttcagtcagcatggtgaataaattaaaggcaggccgcacggaccgtaggccggataaggcgcagccgccatccggcagaaacaggcgcaacgtggcaagacggatggccccggttttcggggtcatattgtttatccgccgcgacattcatcgactgcgtcacagaatcatgcgccgccctccaccttccggacgatattcgttgagcaggatgcccgcctaaattatgactatccgggagtggcgctggctattccctgccctaccccattattgtgcagaggttgactatgtttagtaacagactcgccagccatcttgagcgcggcgtcgtcggcttcccgaccaccctcgccagctccgtcgggctgatcatggccagcccggtgatcctgacggtcaccagcggcttcggcatgggcggtgataccttcgcgctggcggtgctgctggcctttattatgatgcaggcgcaggtcaccacctttgccgaggcggcgacgctcattcccaccaccggttcggtgtacgactatatctcctgcggcatgggccgcttcttcgctatcaccggcgcgctgtgcgcctacttgatcgtccatatcttcgccgggacggcggagacgatcctggcgggcattatggcgctggtgaacttcgagtcgattaacgcccagatggccgctcaccagaatacctggatggtgggcgtcggcatggtggtgattttcggcttgctcaacgccatcggcgtggaaatcttcggcaaggtcgaagtgatgctgaccttcggcatgtggaccacgctgaccattttcggcctgtgcggcatttttatggcgccggtgactcatctttccggctggttcggcacgccgctgaacgttagcgatatcaacggcctgttcggctatatcggcatggcgatgtttatgttcgtcggttgcgaactggtgacgccgatggcgccggagatcaaacaggcccaccgcaccataccgcgggcgatggcgctgggcctgctgggggtcgccagctgcatgtttatctacggcgcggcgatcaaccgccaggtggagaataccgtgctcgacgcggccaacaacgtccatctgctggatacaccgatggcgatcccggccttcgccgaacgggtgatgggccacgccggccagtactggctgggggtcgggctactgttggccggctgcgccaccatcaatacgctgatggccgccgtgccgcgtattatctacggcatggcgctggacggcgcgctgccccgtttcctgacctggctgcatccgcgctttaagacgccggtgatcgccattgccatcggggtggcgatcccctgcctgcacgcctggtatctgaacggcgatctggaccgcatcgtgccgctgatcctcgccgcggtctgcgcctggggcgtcgcctatctgctggttactctgtcggtggtgatgctgcgcattcgccgcccggacctgccgcgcgcctaccgctcgccgtggttcccgctgccgcagattatctccagcgtcgggatcatcatcgctatcgtcaatatcacgccgcccgggatggacagccgccaggtgctggtgccgttcggcataatgctcggcctgaccgccgcttacgccctgttctggacggtgtgcgtgcagcgcgtcaatccgttcaagccgctggtagtggaagaggtggtggagcgcgccatcaacaattatgaaaaacagacccgcggggagatgacgccagatgtcctccgtcccctggtttgaaacgccgttaatgaacgcggtgcagcgcgatctggcgggctggcccagtgaaaagctgagcgaacgcagcgcgctgctgcgcttgaacgacgccaccgccgtcaccttcagcgtgcgtcagaagcggctgtttatggccagcattcacagctgcgagtttgtcgtcgaggggccggtgacccggcccgctcgcggcaagatccgcgcccaccaatccggctggctaaaacgcctgccaatccgctttatcggcagtaaagagagcgcggaactcgctggctatctcaacggttttcctaatctccagcagaccttaagcgagctggactaccgccgcttttcgttgacctttgacgatagcggctggcgctgcggcattgaaccctgggccgccagcgaagtggtctgtaaaatgccgccgctgcgccgttatctgcggctggaagcccagcagcggatgctgctgctcagcgtgctggcgatgattaatcaggcggtaagtcagtggatgcgcggtgaaatcgcagaagagaaagcattgacttccccgccatcaccgcggggaagctgaggtggtttatagcaaaccaaactgctgcgccagccgatcgatggcctggcgctggaactgcgcgaacgtggcgcgcggctgctgctgttgaataaattccagcagcggatcctggacctcagtgcggatgccgctcagggcttccatcaccgccaggccgcagaacggcacgtaggattcggcgtagccgccctcgtgcaccatcaccagtttcccgccgcacaggcgatccgccgcctgctggacctgttcggtcatcgcccggaagctatcgctgtgcagctgcatccgcgctaatggatccatggcgttggcgtcatagccgcaggcgataataatcagctccggctcaaaacgcgccagcgccggaataacgatagtttccagcgcatagcgccagctgtcatcccccgccccggccaacagcggaatattgatgttgtaaccttcgcccgcgcccacgccgcgatcgtcctcgccggcgtagcccggcgggaagcagccgtcctgatgcaaggagatagtcagtacatcgtcgcgctgcaggtagatatgctgggtgccgttgccgtggtgaacatcccagtcaatgatcgccaccttgcccagccccagctgcgctttcgctcgctcgacggcaatgggaatattggcgaggaaacaaaatcccatcgactggtccggcaggcagtggtgtccgggcgggcgcgacagcgaataggcgttatccagctcccccttcagcaccgcttccaccgccgcacaggccagcccggcggaaagacaggcgatttcataactgcccggccccagcggcgcctctttgccgagcatgccgccgccgttatcgcttatcgccttgaagcgctccagatagctgtcggggtggatccgccgcaggtcctcaaggctcgccggcgccgcgctgcgcagcgccagctgcggcgtcagcccggagacatccatcaggtttttcatccgccgtttggtctctggcgattcagcatgaccgccgccggcgggcggctgtacccacccgcccaccggcagcgtcaccgcgtgcagaccggtactgtgccagaaacaacgttcatcaaagaagaaaccggtttttcttttcactctatcctcccgtgggctaagccttcccggcggcggacgccgccacaattaaaatcagtgacagcagcgcgcagacgcctgccgccgccagcagcgggtcggcgctggcgaagtgttgcagtaaggcccccgcaagcgccgggccagccgccatgccgccgccgatcaccagattgatgctgttcatcagccgaccgctgttatcgagcccggccacgcgggcgagaataaagggcagcacgaaggtccaggtgaacttaaacagcagcgccgcgatggcgtaacgcaccagcagcggctggccgatcagcagcccaacgctgacgatcaacaggccgtagcccagccacaccggtaaacgatcggcccgccgggtgccgcgcagggccgcgccgccggcgccgataatgccgcaaaccgtcgccgccgccagcaccagaccgacctgcgtcgggctcagccccgccgcgctgccgatggtgccgataaaggtccacacggcgctgaggctgatatagaaagtgagcaccgccagcacagccagcgcctgacgccacagcgccgtcgacggctgctggcgggagactgaaagcggttgaaagcgcggagggaaagcggataccagcggcaaacagcagagcatgatggcggcgaggatcagatacaccaccttcaggccaaaggtcgcgaacaggccgggcagcgccagcaggccaagcatccctaacagcagttgcccgagcacccagaaggcgtagacccgcgacgggttcggcgttccggccgcgcagctgatgcacaaaatcatcaacgtgccgcccgccagcgaggcgataaagcgcgccgccagcagcgtctcgtactgggtgaccaccgccgaggcgaggttggcggccagaaacaccaccccggccgtcagggcaacccgccgccagtcgaggcggctcatccaccaccacgccgggagcgtcgccaggctcatcgcccccagctccgctgagaacagccagccgatctgcccgggttttagctgccattcgctggccagctgcgccgccaccgccggcgcggtcatcagaatacccggcgcaatagcggcaaaaatcacgatcgccgccagcaaacgcagggacaccatcagcccggcgggccgggaaagcgcattatcagtgagaggtgtactcgacatcgtagggcgtgctccggtcaaaaaagcctccccccggaggatcctccagggagtgatacccacaggcatcaggaaaacgccgtgctgccacggcgcgcgcgggatgcgaaagtcagattacagatgcagcgtacgctgagcggccggcatccaggttcgggaaaccagttcggtacgattgaccacttcggtcttggcgaaaatattgcgcaggtgcgtttttaccgtcgagagcgagatatccagctggcgggcaatcagcttattgctggcgccttcgcgcaccatgccgacgatttcccgctctttcgccgtcaggatggcgggcagatcatcttcttcctgcaggcagtcgcgaatggccagctctaccagcggcagcaccgcctgggcccgctggcgctcttcgctggagaaaggcacgtcgcgcatcagcgagataccggcgacgatccgccgctcgcggcggataaagatctcggtcatgtcgcgcacgttattcggcaacataaattcatgatagtaatgccggttgcggtcgcagagccgcggcgtcatcgccgccacggtggtgttctggtggctaaagtgcgacggcagaagcggatccagcggctggaagttttccagatattgttggtgcgtattatcggaaatattatgcaatatatagttttcgggttttaaacgattatttactcgataaaacaccgctgaagttagtggaattaactgggaaatagtctgtaaacaacgggctattatcgcatcattacggctggcttttaacaaagcagacatgatagggcctccccgtcgagatgatggtacatgacacatggatgactactgataattgaagcatacatttcacatttaagtaacacaatcattaacatattaacaatgtgatagccgttacaaaattttcagcaatacattgttatataaagcatttaaaaaacaccccggccatgctttacgatagcggcgttaaaacataaacaaataagattaacacccggcgtacctgcccctggtgataaaaaaaccctattcccgacgcgtgattctcatcctaaagaacgatggatttttgttttttttcacttatacccttaacaggatgcaattaattttcgccgcggcttaatcatgtgattacgccagacccgctgttgccaaaataatatcaacagcaccggtcattaaccgaggataagccgatgctgaatatcgccgccctgcgccagcagcaaattccgctggccgctgagccgcgctcgccggtgccgtttcatattctgatgaagccgattggccccgcctgcaatctcgcctgccgctattgctattacccgcaggacgaaacgccggtcaacaagatggatgacgcgcggctggagcagtttatccgccgctatattgccgcccagcccgccggcgcgcgggaaatcaactttgtctggcaggggggcgagccgctgctggccggcctgagcttctacaaaaaagcgctcgccctgcaggagcgctatgcccccgacggcgtgactatcagcaacagcctgcagaccaacgggacgctgatcaacgacgcatggtgccgactgttccgcgaacatggctttattatcgggttgagcctcgaaggcaacgaagcgctgcaggactaccatcgtccggataaacgcggccggtcgacctggtcggcggcgctgcgcggcattgacctgctccatcagcatcaggtggactttaatctgctggtggtggtgcataacgagatggcggcccacgcggcggcgatttatgaccggctggtcagcctcggcgcgcgctatctgcagtttcagccgctgatgagcgaaggcgcggccctgcgcgaaggataccagctcagcgccgataactggggacgttttatggtcggcatctggcgacagtggcggaagcgctgcgatagagggcgggtgttcgttatcaatatcgaacaggcgtgggcgcagtatttcactcataccagcggcagttgcgtgcacagcgcccgctgcggcagcaacctggtgatggagcccgacggacagctctacgcctgcgaccacctgatcaacgccgaacatcggctgggccgcctcgatgagcagacgctcgccgccgcggtcgacgcctcggtgcaactgccgttcggtcagcagaaaagtctgcgccgcgaatgccagacttgctcggtaaaaatggtctgccagggcggctgcccggcgcatctcaacgccgcaggcaacaaccgcctctgcggaggctactaccgcttctttagcgacatcctcgcgccagtacgccccttttcccgcgaccttaatggcctgaaggcctggcgggccgcgtttgttgggactgcgcatactgcgtagcgccttaccctgatgatatccccctctgaacaggagagtcagtcgtgaacaaaaaagccatggccgcggcggtcagcatgatcctcgccggtggcgcgcacgccgcgcagcaggagcgtccaaacgtcatcgtgattatcgccgatgatatgggctactcggacatcagcccctttggcggcgagatccccacccccaacctgcaggcgatggccgagcagggaatgcgcatgagccagtattacacctcgccgatgtcggccccggcgcgctcaatgctgctcaccggcaacagtaaccagcaggctgggatgggcggcatgtggtggtacgacagcaccattggcaaggaaggctacgagctgcggttgaccgaccgcgtcaccaccatggccgagcgctttaaagacgcggggtataacaccctgatggccggtaaatggcacctcggttttgttcccggcgccacgccgaaagatcgcggctttaatcacgccttcgcctttatgggcggcggcaccagccactttaacgacgcgataccgctggggaccgttgaagccttccacacctactacacccgcgacggcgagcgcgtctccctaccggatgatttttactccagcgaagcctacgcccgccagatgaacagctggattaaagcgacgccgaaggaacagccggtcttcgcctggctggccttcaccgcccctcatgatcccctgcaggcgccggacgagtggattaagcgcttcaaaggccagtatgagcagggttacgcagaggtctatcgccagcgcatcgcccgcctgaaagcgctgggaattatgcatgacgataccccgctgccgcatctggagctggataaagagtgggaggcgctaacgccagagcagcagaaatatacggcgaaagtgatgcaggtgtatgcggcgatgatcgccaatatggacgcgcaaatcggcaccctgatggagacgctgaaacaaaccgggcgcgataaaaataccctgctggtctttttaaccgataacggcgccaacccggcgcagggtttctactacgaatctaccccggaattctggaagcagttcgataacagctatgacaacgtcggccgcaaaggatcatttgtctcctacggcccgcactgggccaacgtcagcaacgccccctacgccaattatcacaaaaccaccagcgcccagggcggcatcaataccgactttatgatctccggtcccgggatcacccgccacggtaaaatcgacgcctcgacgatggcggtgtatgacgtggcgccgacgctatatgaattcgccggcatcgatccgaacaagtcgctggcgaaaaagccggtgttgccgatgatcggcgtcagctttaagcgctatctcaccggcgaagtacaggagccgccgcgcggcaactacggggttgaactgcatcatcaggcggcctgggtcgatggcgaatggaagctgcgacggctggtgccgcgcggcctcaccgccggcgacgcgccgtggcagctgtttaatctgcacgacgacccgctggagacgcatgatgtcgcggccgaacatcccgatcgggtcaaagccatgagcgaggcctacgaggcatttgctaagcgcaccatggtcacccgggcacagggcaagatgatcgactacgtcggcatcgacagcaaaaccgggcgctatctggcagtcgaccccgccaccatgaagccggtgcctgcgccgcaggcgatccctgtgagcgagatccattaaccaccacggctatcgttcttccgggcgatagccgggacctgacgcgctttttaaggtaatcggaaaccccattacaggagagtgcggatggcgagagtcgtggtaattaccggcggtggaaccggaattggcgccgcctgcgcgcggctgatgcgcgccgcgggcgaccgggtgtttattaccggacggcgcgaagcgccgctgcaggctgtcgccaatgagaccggcgccacggcgctggtgggcgatgccgccgacggcgaggtgtggcgccagcggctgctgccggccatcctcgaccagaccggcgggattgatgtcctcatctgcagcgccggcgggatgggcaacagccccgccgccgagaccagcgaccgccaatggcgcgaggcgctggacggcaatctcaccagcgccttcgccagcgttcgcgcctgtctgccttcgctgattgcccgccgcggcaatgtgctgtttgtcgcctccatcgcctctctggccgccgggccgcaggcctgcggctacgtcaccgccaaacacgctttaatcggcctgatgcgctccgtcgcccgcgattatggcccccagggggtacgcgctaacgccgtctgtcccggctgggtcacgacgccgatggcggatgaagagatgcacccgctgatgcaggcggaagggctgtcgctgactgaggcttatcagcgggtgtgccgcgacgttccgctgcgccgccccgccagccccgaggagatagccgaggcctgtcagtttctctgttcaccgcaggccgccatcatcagcggcgctacgctggtcgccgacggcggggccagtatcgtcgatgttcccactctggcgtttgcctaacgccctactctgttcaggagccctatgacttcagaagccgtatttatccaggtcggcgcgctggccgatggttttgcgccgcacggtaacctgctggctaccgccagcctgcccgcaggcgaaaactttaccttttatgtcgccgggagcgagccgcaacagctggttatcgaagatgagcagacgctaagctggaacggcaagcgcgccccctggcgggcgaccgccctgcgcccggacattctgtttatcgacttccttgacccggagcgggatagcgccagcattagcgcggtatgcaacctgacgcagcgcaatgccacgctggtatacggccagctaccggacgaagccgccgcgcggctggacgccttcagccgggtagaacaagggttgccgctgaccgcggttgaggtccgtttcgtcttcgcccgcctggatgcccagccggggccgttgccgggctttaccaccgcgctggtcggcatgcgcaatcagtacacctatagcccgaccgagcgctatgagcacatctatctcaacgataatttttacgcctggcagtgtctggacggcgtggaaaaggggctggcggatgtcgatcgctgccactatgtgcaggtggcggaggatctctatttgttcgtctggcgggagaaaatcattcccacgctgggggtgatcctcatcgatctgcagcagatgcgcactgacggcaagatcatgggctatcagggcagcgatttcggcgccctcagcaatttcccggtcggcgccagcgcgaagatcctcaacgtcacccgccatcaggaatagtagggcgccgccgggcacgctttcaggcaccgcacccgtcatttcgccgggtggcggctgcgccttacccggcctacggtccgtagcagccagccgttaacttacccactagtgcgactgaaactgccggtgttgcggcctcaacatcgctgagacgttcccggaaggccggggcagcccgcatggatgcgggctgagggccgtgttttgcacggacgctgcctcggcccgacccgaagcctgcagggataagtcgaaggtaccgcgcagcggcgatgttgctggccggagcccgggggtacagggggcggcggcgactggccgccccctgtgcgctccctgcaccatgactgccataacgcagacaattaaccgggagcgcaatcggcccggaagtaacatagaagctgtagccctgctaagcgcagcgcgaacagggacatttccggttgcgccgttattttgccgggtggcggctggcgccttacccggcctacggtccgcgtcatgtttagccttcccccctctccccgccgggaagagggattgcctcaggcgctggcgccgtccagccgcgccacttgctccgcgctcaggctcagcgccgccgcgcgggcaaaactctccacctgagccacgctggtggcgctggcgatcggcgcggtccccccttcgcggccgatcagccacgccagggccacctcagccggcttcgcgccctgctcgtccgcgaccgccgccagggtatcgataatccgcatcccccgcggattcaggtacttaccaatcccgcttccgcgctggctctgtgtcagatccgacggctggcggtacttaccggttaagaaccccgaggccaggctgtagtaggtcaccaccccgatatcgcggctgacgcagagatcgcacagcgcgccttcaaacgcagagcggtggtagaggttatattccggctgcagcacctgccacgcaggcaagccgcccttacgcgccacctccagcgcccccgccagctgcatcgcatcgaggttagaggcccccatcgcgcggatttttccggcctgctgcaggctgtggaaggcctccagcgtttccgccaccggggtttgcggatccggccagtgggagaagtagaggtcgatataatcggtattcaggcgacgcagagagtcgtcaaccgcctgttggatccaggctttgctgagccctttatggccggggaggccgagatcggagccgactttggtgaaaattttgactttatcacgcatgccggggcgcgcctgtagccagcggccgattatggtttcagattcgccgccctggttgccctccgcccagcgggaataaacatccgccgtatcgatagcgtcaaaaccgtggtcaacgaaagcatcaagaagagcaaaactggttttttcatcgatggtccagccaaagacgttgccgccaaagactaatggggcgatggaaaatccggttttgcccaaaggacgtgtcatcatgccgagtactccttagcttatattctgcttccctcaggtaaccacaggggtcaggagaggaggtcgattggataatcagaaaaggaatcttacggcgggcgctccacgcccgcaggtacactctgacattatgtcccggaataaacatcaaagctaaaatatttgccagctaattttttataggtgccgtcggcaagaatcttcgcaatcgcgccgttaatttcctgacgcagcgcctcatcgtctttacgcaaacctatcgccgccccggcgccaaacagcgtatcgtcctgcagatggccgccgacaaaggcgaattctttaccctgcggctgctgcaggaagctgtagtcggccatcatcccggagagcaccgcgccgtcgatgcgccccgactccaggtcacgcaccacgctatcggccccctggtaggccacaatgtttatcccctgcggccgccagtgctggttaacatacgtctcctgcgccgagccctgctccacgccgatggttttgcccttcagctgttccggcgtattgccttgcagggtatttttacgcgccacgaggaacaccggcccgttatacaacttgtcgctaaaggcaatctgcgctttgcgcttctcggtcatatacatcccggaaaggatcgcgtcgaatttacgcgccttcagcgccgggataatgccgtcgaaattgctttccacccacacgcatttcgcctgcagctgctgacaaatggcgttgcctaaatcgatatcaaaccccgccagcttgccctgcggatctttccattcaaacggcgcgaaagtcgggtcaacgccgaagcggatctcctttcccccttcggccagcgccgacgtcgacgccattaatgccagccatagcaacagtgattttttcattcgcgttcttctccagagattagcgacagtgtttttccaccagacgggcgaacagcgtcgcgccgatggtgataatgtcatcgttaaagtcgtagccggggttgtgcaccatgcaaccgcccttctctcctttctcgccattgccgagcaggaagtagctgcccgggcgttcgcgcagcataaaagcgaaatcctcgctggcgttcatcggcgagaccgactccaggaccccttcgcggccaaacacctccagcgccagcgcccgggcgaaatcggtctcttcaggactgttggttaataccggataggagtcgtaaacctccactacgctgctggcgccatagcttttggcggtaaagtcagcgagctcgtgaatacgcttgatcagcaggtcgcggatttccggcttcatcgcccgcacgctcagctccatcaccgcgctctccggaatgacgttggaggcgataccggcctggaaggtgccgacgctgaccactgccgtttcccccggcggcacgttgcgcgccacaatgctctgcagggccatcaccagcgccgcaccggcgacgatcgggtcgacggtgcgctcggggtgggcgccgtggccgccgtagccggtaatcgtgattttgacggtgtccgccgaggccatgaagttgccggcgtagaagcccagcttgcctacaggcaggcctggcatgttgtgcaagccaaagatgcgttcgcaggggaactgctcgaacaggccgtctttaatcattaaatccgcgccgccgatagcctcttccgccggctgaaaaatcagatgcaccgtgccgttgaactgacaggccggcgaggcgatatatttcgccgccgccagcagaatggtggtgtgaccgtcatggccgcaggcgtgcatttttcctggcgccgtgctggcccagggtaaaccggtggtttcctcgatcggcagggcatccatatcggcgcgtaaaccgatggtgcgcggagaatcgcctttgctcaggctgccgaccacgccggtcttgccgagaccgcgcgtcacctgatagccccattccgtcagcttgctggcgaccagttcgctggtattaaactcttcaagacttaattccggattggcatgtaaataatgacggatagaaatcatttccgcttccgtcgctttaatttctggaattacataatcactcatgccgctctccgggaaataaattaaggacttatcacggtatcgcgatgaaaagtttatgcaagcagcatttctaatacctggaatggacgcatcttatttaataattcactcatcacagcgcaatgaataataaaaatagtgcaattaaaaaataaaagtttatttttttgaggatttcccgttatttaccctaccctgcacggccacatccagcgttatataaaataaacgggcaggcaattacagaggcttttccttctcgcaatcgttgcgctggcgggctgcagcgcgccgatcgccgccgcttccagcggcgtggcgtcagataccgcctcgttgtcctcgaaggtcaacgtttatcatctgaccgaaaaagaactgtccacccaggcaacgatcaatggttataaatactggccggatgctgcgctggatccgtagctttccgcgagtgcgccatcgccggatcaggcttttcctgacccggcgtcgcggagcagcgcatttagtggccgagggcgccgctcaccagaatcgaggtgatgatcccggtcgccgcggcgatcagcacatagttaccgtcgatataggaccagtgatggccttccggcgggggcggcaggccgcggtcgctccagtcgcggacgcgatattcatcgccacggaacggcgccggagccgggtggcctttgcggaaatcgttcccgcgccaggcgaaatggtcctgctcatgacgtgccagatcgcgtttgtcatggccgtcgcgatccgggccacgctggtcatggtcgccctgatgatgcgcgtcaggtccgccctgcggtgcatgcccgtcatggtccggaccgttctgccacaccgtgggttgccccggacgatggccgtcgttcgggccatcggcaaaggccgggacgctcagcacacaggataaaattactgccagagaaatcatctttttcatggtacacctcctgattcagctcctttgtaccgggcaaatgtgaagaaagagtgagtaactggttaaccaggacgattcctggcatcggcagttgctgtgctgcgcaacagccaggctgcgggaggaaggacaataaaaaaggccgctttcgcgacctttattcagacaggttaaaggacttattcagtcactttattttttaattcttcggcgccggttttggttttatcccagcccttttccgcaccggatttggtggcattccagcctttttcactgacctctttggtcttatcccaccccttctcggtgccttctttggtcttgttccaggttttctgcgcgccttcgctcacctggctgccgacgctgtcctgcttgccttcggcggcgtgtttcgccttcagctgctgctcttcgccctcgtgctgggcctgatgcagcttctctttagcggtgttggcgttggcattcgccgccgcgacggtatcatctgttgcatgtgttgtcgcagcaaaaaccggagccgcaaccagaatagccgataacgcaatcattgcttttttcataatatcctctctcacgtgtcgtgttatgagtcgcattcaggatggcacaacgaaccggggatgacattaggaattagcctgaaaaacgtcttcgacctccagccttggcagaaaatgctgccgccgcgcgcgccctgtcggcgttggcataatttccaacatgtttgttacattttatgaaatttgcccttgatatacttgccgttgacgtttactcgagaataattctcagaatcattatatttataaattggcaaacggaactcattttatggcaagaaaatcagtaagatcgctgttacttactgcgctgctcgcgacgcccctcctcagctatgcaacccaatatcccctgacggtcacggaccttgacggccggcaggtcaccctcgccaaagagccgcagcgtattattttgcaggatggtcgcgacattatgaccctcgccctgctggaccgggacaatccgtttaaacggctggtggcatggaataatctggcgaaaaagcaggatgttgccacctggcagatgctgaaaacgacgtggccgcagtcggccacgatccttgacatgggcttcagcgataaagggaacgtcgatcttgaaagcgtcatcgcccgtcagccggatctgatgatcgcccagctgcgcgccaggccagcgctgatggagagcggcgtcatcgacaagctcagcgccctgcacgttccggtgctgtttgtcgactatgagatcgacccggcgaaagataccgcccccagcatcgacctgctgggcaaagtccttaaccgcgagagccaggccaaagcctttaccgattactatcgtcagcagctgcagacgattcgccagaaaaccgcggccatcacgccgaaggccaacgtcttcgtggaagcgctggccggcaacagcgacgcctgctgctttactcatggccacagcggctggggcgggctggtagaggcggtcggggcgaacaatatcggttcgcagctgctgccgggcgcctccgggttcgtctcgctggagaaaatcatcagcatgaagcccgacgcctggatcatgaccggctcgaagcgcggcaacagccaggtgctgcccctgggttatgcggttaagccagaggcggtgaaggcccaggcgcagacgctgctggcgcggcctggggtcagccagatcccggcggtacaggaaaagcgggcctatggcgtttatcaccacttctataaccacccgtggaatattgtcggcatggaatacctggcgaaagatatctacccgcaggctttcggcgatctcaacccggatgagacgtaccattatatcgtgcgccatttcaccgacctgccggaccagccgttcgtcttctcctggcagcagagcgagtaatccggcatgcgtttaacctccgactccgtgctcgacgggctgcccgccgggacctctggcgtgatgaatgattatcgccgtatcgtgcgtcgccgtctgctgctgatcctcctgctggcgctgttgattgtcgcgtcgctgctgctcgattttatgctcggcccctccggtctgccgctgcagaacctgtggcagacgttaaccgatccggccagcgccgatccgggcacgcgcgccatcgtctgggatatccgtctgccctatgcggtgatggcgattatcgtcggtctggcgctgggactggccggcgccgaaatgcagaccatcctcaataacccgctggccagcccgtttaccctcggcgtctcctcggctgcggcgtttggcgccgcgctggcgattgtgctcggtattggcctgcccggtattcccggccagtggtttatctcggccaacgcctttatcttcgccctgctggctgccctgctgctggacggcatcacccgctggacccaggtggccacctccggcgtcattctgttcggcatcgcgctggtctttacctttaacgctctggtctcgatgctgcagttcatcgccaacgaagacacgctgcaggggctggtgttctggaccatgggcagcatcgatcgcgcctcctggagcaaagtcgccatcctgttggtcgccctggcgctggtgatgcccctgtcgctgcgcagcgcgtggaagctgaccgccctgcggttgggcgaggaccgggccatcagctttggcattaacgttcgccgtctgcgcctgaccacgctgctgcggatcagcattctgtcggcgctttcggtggcctttgtcgggccaatcggctttatcggcctggtggcgccgcatattgcgcggatgctcttcggcgaagaccatcgcttttacctgcccgccagcgcgctgatcggcgccctggtgctctccctggcctccatcgcctcgaaaaacctgatccacggggccattattccggtggggatcgtcacttccctggtcggggtcccgttctttttgagcatcattttacgtcatcgggggcaggtatgagcgaccagacattatccgggctgtcgctgtctcacttcagcgccggctaccccagacgcaaggtgatcgagaacctgacggttccccatctgccgcgagggaaaatcaccgcgctgctggggccaaacggcagcggtaaatcaacgttaatgcgggcgatggcgggtctgggcccctgccgcggcgagctgctgctggagggggaaaatctgctgacgcagccgttctcacgtcgcgcagagcaggtggtctatcttccgcagacgctgcccgccggcgtgcatctgcatgtgctggagtcgataatcgttgcccagcgcgccgccggaggacgccacagtccgcagcgccaggaggaggtgatggcgctgctgcgacagctggggattgcccatctggcgatgagctacctcgatcagctctccggcgggcaaaagcagctggtgggtctcgcccagtcgctgatccgccagccgcgcctgctgctgctcgacgaaccgctcagcgcccttgacctcaactaccagtttcacgtgatggatctggtgcgccgggagacccggcggcgcaacatcgtgaccctggtggtggtgcacgacatcaatattgccctgcgtcacgccgaccacgtgctgatgctcaaggcgggccagctgctcggcgacggcaccccggccgcggtcatcacccccgagactctggcggccgtctatggggtgcgcgggcgtattgaaccctgttcgcagggggtgcggcaggtgattattgacggcctggtggacagcgaggcctgaccgcggcgcggggcggttcgtccgccccgcgcccgccggcttagtgatcgagatagatatagttttcccagcttttcatgcggatcaggatcttcctgatcagcgacagctctttcaggtgatccgagtagaccgccgcctcgagggtggccccctgcggcagagcgtattcggcaaaacgcggatcggtcaccttcagcaccaccagcgcccggccatgggtattgagcgcgtctgtggtcagcagtttgccctgcccctggaactggctctcgccaatcgccggcagcacgtcggccacttctccgcgaaagacggtgcccgggatagccggaaacatcagctccgcgggctcgcctttgtgcagacgctgcagggcgttctggcgaaatgccgcgacgtactcccgcgaggcggcgccctccaccggcacaaaggtcatcagcgggatcatccccagcgcagtggacatggtgcccggccgtaagccgacggtactgacatagccatcctccggggcgcggacgacggtgttctccagctgaaactgcgccttttgcagctgcgccagcagggaggccacggtggtgtttttgcccttcaccaccgagtccagcgcattacgcgcctgaaccacctttgcctgagccgcgctgacgctggcttcatcggctttccacgtctgcagacgggtatcaaccatttgatcggagaaggcgccctgggcatggccctcccgatagcgggcatactcccgccgcgactggtcgcgctgggccaccgcacggctcagctcggcctgcgcctggcttaacgccgcgtttaaggagagcgcatcctgactggctgcttttatctgcgcctgcagatcgtccactttcgcctggaagggcgtcgggtcgagggtaaacagcacatcgcccttatgcagcatctggttaggcttcaccggtacgctctgcacccggccgcgtacctgcgacacaatcggcacggtgcgaaacacctggttaccgacgtcggtataagggaagttgtagttcatcccgaagatcaccgcgccaatcagggcgataccgccgagcaccgccgtcggtacggtccacttattgagcgggatgcgaaaaactttaaacaccacgatgcatagcgcggcgtaggtcagcaacattaacgtttccattattttgcctccttcgctttcagaacgtccacctcgcgctggacctgttccagctgctggaccaccgtttccagacgctgatgcagcgcctgctgctcgtcggcaatgtggcgcatcccccatccgcggtcttcgcgccacagcgtcgcccagatccataacaagggccacagcgcgtggagggtaaataagctgacccaaccggcataatgaatcgcatcctgatgaggatgacgccgctctttggcgatttcataaggaatatcgtgaataacaatcacgccataaaaaagtattaaggccacggcgatcagaatggccagcgccacatagtccagggtcataaaataactccagagtgcaaggttaaataaataaaacagccagattcaggcgtaacggggccgggggaaaaagcgcgcttagcgctttccctggcggtaatagcaacgtgatggcgtgaatctgccgaatcggatttagaatttctcaggaatatgacggtcgatggagatcagcttgccttttttcaccgtgatatatcccccctcgcgcagcgcggccagcacctggtacacatagctgcgcgagagattggttcgtttaataataaatgccgacaggctctcatgctgacccccatcaatttcgccgcgatataaatagcgcgacagcatcgatttaatggtctgaaagctggtctggctgccgcgttcatagtgggcatcaagggcaaatatgcccatataggccaggatcgtggtcagctcttgcatatagcccggcgacgaatgaaagaatattcgctcaaaatcgctggcggttattttcgccagctggcactcgcccagacactgataatagagcgcgaccgacggacaataatgttccagtaatcctaacggcatatgcgcgataacaatcccgaccaggttctgctcatcgccaaaggccaatgtcatttgcccctgcagcagaaagtagagatagcccggctgcggaataaagccctggtctttgcccaaactcagcgtttcactgcaggcgatcaccgccggcagatgtgtagtcagcgtcagcttctggtaccgatcgtaaatatcgccaaaactggggttcatcgcgctacgcactcctttacctttggccaccgcggcggggctaaccgcgacctggtgaactatacctaagcgggtggggaaggaaaagtccagatctggagtggcgaaatattccgcctggctcacattttttaccctcgcctccctgtttcgtgacccaatcgttccgcttaccggtgggctgtgctttaatgagctaaaccggtttaataaagtttagcttagaggagcttgtcgtatgaatggaaaaatctgggtactcggcgatgcggtcgtcgatctcctgcccgatggagagggccgcctgctgcaatgccccggcggcgcgccggccaacgtggcggtcggcgtggcgcggctcggcggtgacagcgggtttatcggccgcgtcggcgacgatcccttcggccgttttatgcgtcacaccctggcgcaggagcaggtggatgtgaactatatgcgcctcgatgcggcgcagcgcacctccacggtggtggtcgatctcgatagccacggggagcgcacctttacctttatggtccgcccgagcgccgacctgttccttcagcccgaggatctcccgccgtttgccgccggtcagtggctgcacgtctgctccatcgctctcagcgcggagccgagccgcagcacgacattcgcggcgatggaggcgataaagcgcgccgggggctatgtcagcttcgaccccaatatccgcagcgacctgtggcaggatccgcaggaccttcgcgactgtctcgaccgggcgctggccctcgccgacgccataaaactttcggaagaggagctggcgtttatcagcggcagcgacgacatcgtcagcggcatcgcccggctgaacgcccgcttccagccgacgctactgctggtgacccagggtaaagcgggggtccaggccgccctgcgcgggcaggttagccacttccctgcccgcccggtggtggccgtcgataccaccggcgccggcgatgcctttgtcgccgggctactcgccggcctcgccgcccacggtatcccggacaacctcgcagccctggctcccgacctcgcgctggcgcaaacctgcggcgcgctggccaccaccgccaaaggcgccatgaccgccctgccctacagggacgatcttcagcgctcgctgtgatccccttgggccggttaacggcccactttgctggcgacatcacaattcttaaaccggtttagcaatttttattttcaccgcgttaccgacatgtttaccatatcaactaaaccggtttagcaaaaattagcacactcactgatttacctttggatgtcaccaacatgtataaaaaacggaagttagccattcttattgctttgctaaccggcaccgccgccgcccatgggcagacagacctgaacagcattgaagcgcgtctcgccgccctggaaaaacgcctgcaggacgccgagacccgcgccagcactgccgaaagccgcgccgcctcagcggagcagaaagttcagcagttaacccagcagcagcagcaaacccaggccaccacccagcaggtggccaggcgcaccactcaactggaagaaaaagccgaacggcccggcggttttgagttccacggctatgcgcgttccggggtgatcatgaacgactcggccgccagtaccaaatccggcgcttatatgacccccgccggggagaccggcggcgccattggtcgcctgggcaaccaggccgacacctatgtggaaatgaacctcgaacataaacagaccctggacaacggggcgaccacccgtttcaaagtgatggtggccgacggacagaccacctataacgactggacggcaagcagcagcgatctgaacgtgcgccaggcgttcgtcgagctgggcaatctgccgaccttcgaaggcccgttcaaaggctcgaccctgtgggccgggaaacgctttgaccgcgacaacttcgacatccactggattgactcggatgtggtgttcctcgccgggaccggcggcgggatctacgacgtgaaatggaacgacagcctgcgcagcaacttctcgttatacggccgcaactttggcgatatcgccgacagcagcaacagcgtgcagaactatatcgtcagcatgaataactttgccggcccggtgcagatgatggtcagcgggatgcgggcgaaagataatgacgaccgccaggacgcgaacggcaatctggtgaaaggcgatgccgctaacaccggggttcatgccctgctgggcctgcacaatgagagcttctatggcctgcgcgacgggaccagcaaaacggccctgctgtatggccacgggctgggcgccgaggttaaaggcatcggctccgacggcgcgctgcgcccgggggccaatacctggcgcttcgccagctatggcaccacgccgctgagcgatcgctggtttattgccccggccgtgctggcgcagagcagtaaagatcgttatgtcgatggcgacagctatcagtgggccaccctcaacctgcgtctgattcaggaagtgacgcagaacttcgccctcgcctgggagggcagctatcagtacatggatctgcagcctgaaggctacaacgatcgccatgcggtcaatggcagcttctacaagctgaccttcgccccgaccttcaaggtgggcagcatcggcgacttcttctcgcggccggagatccgcttctatacatcgtggatggactggagcaaaaaactggacaactacgccaacgatgacgcgttaggcagcaacggattcaaatcgggcggcgaatggtcgttcggtatgcaaatggagacctggttctgacggcaaccggggcgacagggtaaataacacataaatataaggttcgcggcgcctgccacggctggcgccgcccacgccatatcatcatgcatttagagggtactatggattttgaacagatttcccgctcactgcttcccctgctgggcggcaaggaaaatatcgccagcgccgcgcactgcgccacccgcctgcggctggtgctggtcgacgacgcgctcgccgatcagcaggcgattggcaaaatcgacggggtgaaaggctgctttcgcaatgccggacagatgcagatcatcttcggcaccggggtggtcaataaagtctatgccgcctttatccaggccgcaggcatcagcgaatcgagcaaatccgaagccgccgacctggcggcgaaaaagctgaacccgttccagcgcatcgcccgcctgctgtccaacatcttcgtgccgattattccggccatcgtcgcctccggcctgctgatgggcctgctggggatggtgaaaacctacggttgggtcgacccgagcaacgctctctatatcatgctggatatgtgcagttcggcggcgtttatcattctgccgatcctgatcggctttaccgccgcacgcgaatttggcggtaacccctatctgggcgcgaccctcggcgggatcctcacccatccggcgctgaccaacgcctggggcgtcgccgccggcttccacaccatgaatttcttcggcatcgaagtggcgatgatcggttaccagggcaccgtcttcccggtgctgctggcggtgtggtttatgagcatggtcgagaagcggctgcgccgcgtgatccctgacgcgctggacctgatcctcactccgttcctgacggtgattatctccggctttatcgccctgctgctgatcggcccggccggtcgcgcgctcggcgacggcatttcgtttatcctcagcacgcttatcagccacgccggctggctggcgggcctgctgttcggcggcctctattcggtgatcgtcattaccggtatccatcacagcttccatgccatcgaggccggactgctgggcaacccatcgattggcgtcaacttcctgctgccgatctgggcgatggccaacgtcgcccagggcggcgcctgctttgcggtgtggtttaaaaccaaagatgccaaaataaaagccatcaccctgccgtcggcgttttcggcgatgctggggatcaccgaggcggcaatcttcgggattaacctgcgctttgtgaaaccgtttatcgccgcgctggtgggcggtgccgccggcggcgcctgggtggtgtcgatgcacgtctacatgaccgcggtaggcctgacggcgatcccggggatggctatcgtgcaggccagctcgctgctgaactacattatcggaatggcgatcgccttcgccgtggccttcgcgctctctctgacgctgaaatacaaaacggacgctgaataatgtcattaccgtcacgtctgcctgcgatcctgcaggccgttatgcagggccagccgcaggcgctggccgacagccattatccgcaatggcatctggcgccggtcaacggactgctgaacgatcctaacggcttttgccaggtcgccgggcgttaccacctgttttatcagtggaacccgctcgcctgcgaccatacctataagtgctggggacactggagctctgccgatctgctgcactggcggcacgaacctatcgccctgatgccggatgaagagtatgaccgcaacggctgctactctggcagcgcggtcgagttcgagggcgccctgactctgtgctacaccggcaacgtgaaattccccgacggcgggcgcaccgcctggcaatgtctggcgaccgagaatgctgatggcaccttccgcaagctggggccggtgctgccgctgccagaaggctataccggccatgtgcgcgaccctaaagtgtggcggcaggacgggcgctggtacatggttcttggggcgcaggatgtgcaacagcgcggcaaagtgctgctgtttaccgccagcgacctgcgagagtggcgcctggtaggggagatcgccgggcacgatgtgaacggcctggcgaacgccggctacatgtgggagtgcccggatctctttccgctggcggacacccacctgctgatctgctgcccgcaggggctggcccgcgaagcgcagcgctttctcaatacctatccggcggtgtggatggcaggccgcttcgacgccgaacgcgggatcttcgaccacggcccgctgcacgagctggacagcggatttgagttctacgcgccgcagaccatgcaggccgatgatggccgccgcctgctggtcggctggatgggcgtccccgacggggacgagatgcatcagcccacccgcgcgcagggctggatccatcagatgacctgcgtgcgtgagctggagtggcaggctggcactctgtatcagcgtccgctgcgcgagctggtcgccctgcgcggggaagcccagggctggcgcggacagaccctgcccctcgccccgatggagctggcctttgacctttcccccgacagcacgctggggctggactttgccggcgccctgcagctcaccgtcaatcgcgacggtctgcgtctgtcgcgccgcggcctgcagacggcggagatgcatcaccgctactggcgcggcgaggcgcgacgcctgcggatctttatcgaccgctccagcgtggagattttcatcaacgatggcgaaggggtgatgagcagccgcttcttcccgggctatccggggcagctcatcttcagcggtgcgacgccggtggcattctgccgctggctgctgcagccatgcatggtagaataagcgttttgctttcaggctcccgggtgctgatgaaaaccaaacgcgtaactatcaaagatatcgccgaactggcgggcgtctccaaagcgaccgccagcctggtactcaacggtcgtggtaaagagctgcgcgtggcgcaggagacgcgcgagcgcgtactggcgatcgctcgtgaacagcactatcagccgagcattcacgcgcgctcgctgcgcgataaccgcagccataccattggtctggtggtgccggagatcaccaactacgggtttgccgttttctcccacgagcttgagacgctctgccgggaagccggcgtgcagctgcttatctcctgcaccgacgaaaacccaggtcaggagagcgtggtggtcaataacatgatcgcccgccaggtcgatggcctgattgtcgcctcttgtatgcacagcgatgccgactatcagaagctcagcgaacagctgccggtggtgctgtttgaccgctcccccagcgacagcgccctgccgctggtgatgaccgactcggtcaccccaacggccgagctgatctcccgtatcgcgcctcagcatgcggacgagttctggtttctcggcggccagccgcggctgtcgccgtcgcgcgaccggctggcggggttcacccagggcctggcccaggcggggatcacgctgcgccctgagtgggtgatcaacggcaactaccaccccagctccggctatgagatgttcgcggcgctctgcgctcggctggggcgtccgccgaaggcgctcttcaccgcggcctgcgggctgctcgaaggggtgctgcgctatatgagccagcatcatctgctggattccaatattcatctcgccagcttcgacgatcactatctgtatgattcgctttccctgcgcattgataccgtgcagcaggataatcgccagctggcctggcactgctacgatctgctcagccagctgatcgacggtcaggccccggagccgcttcagcgctacctgcccgccaccctgcagattcgccatccctgacggcgcggttggcaattagcgttttcgcctggcgcgcgccgcctgcctcagcgccagcagcgcgctggcgagcaccgcgccaaggccgatcgttaccggccagcggtaagccaccagcaacgagggcaatccaccatccggcgccagcatcaccagattccagcccgccagccccgcgttgccgttcagcgcccggcttaacatccgctgatgcggggcgaatggctgaatggtctggtagtggctgccgaacagcgagggctgcatctctcgcgggaactgcgcctgcacctgggccagcacgctggccggcagcgcgtgcgatgccgccagcagatgcccgtcgccattcaccagcagcagctgataatgccgctcccgggcgagggtctggagagcggcgcgcatcgccgccagcggccaggtcgcttcccgctgcggcgccggaatgttcatccgccgctcaaggcgttccgccacccactgcgcatcctcctccagctggcggatctgcctctcacggtaaacctctctggccggcaaattcatgccccgaccgagcgccaggatcgccagccccgcgagcagcgtgacgataaggcccctttttcccgctagccagcgcggcgagaatttgccaaaggatggtgtattcatacgactccagaaaccgcaggccacgcgtggcccctgacgaatggacaacggaagtggcgaaactgtacaggatgcgcagcgcgggcaaaacagacaggcggagcctggcggggagtattttgtttatttctggacaggacgggcggcaacgacatccttcgccgttgccgcccgttgataagattagtgttttttccggttgcgacgcatatcgatggttaccgccgcaacgataatgatgcctttaataatatcctgcacataggcatcgacgccgacaaaggtaaaaccgcttttgatcaggccaaggatcatcgcgccaatcagggtgccggtaatgcgccccactccgcccattaagctgctgccgccgatcaccgcggcggcaatcgcgtccagctcgtaggacatccccatactcgactggccgctgctgacgcgcgccgccagcaccacccccgccagtccggagagcgccccggcgatggtgtagacgatcaccagatatttattcacgttgatgccggacactttggccgaggtcatgttgccgccgatggcatacacatatttgccataccgggtatgcttcagcgcaatgtgaaacacggcggcgatcacgaagaagataatcaccggcatcgccccctggcctatcgccgtaaagctgtcggagaggaagctgatcgggttgccctgagtgtaatactgcgccagaccgcgcgccgaaaccctcatcccgagggtggcgataaacggcgggataccggtccgcgtcaccaggaaaccgttggtcaggccgcacagcaggccgacgccgatccccgcgcaaatggggatcaccgccggcaggttgaccagcgccgggaacattggcgacaggctatcggaggttggcgccaggctggccgccaccaccgccgcaagggcaataaccgagccggaggagaggtcaatcccggtggtgatgatcacctgggtgacgccgacggcgatgatgccgataatcgccacctgcagcacaatcagcaccagccggttggtattgagcaggaacgactggtcgcgaacataccagccggcgatttcaaaggtcagggcaatcaccagcatcaccacaaagatgccggtatctttcggcattttatgccgcaaattagcgaagaaggaggaaccctcgctggccggagccgccgttaatttcatattactcattctctttgcctcaatgggatgccaacgacaaaatggtttcctggtcggcttcgtctttttccaggatgccggtgatacgaccttcatgcatcaccatgacccgatcgctcatgccaaggatttccggcagttcagaggagaccataatcaccgccaccccccgattcgccagttcactgataagatgataaatctccgccttcgccccgacgtcgataccgcgggtcggctcatcgagaattaagattttcggttgcgctaacagccagcgcgcaatcaggactttttgctgattccccccgctgaggttattaataatttgatccatcgtcggcgttttaatattgagccggcgtatttgctccatgcagtcttcggccattttcacgtgctggacaaaaccgctcttgccgatatattccggcattttgacgatactcatattttccagcaccgacagcaccagaaacaggcccgactttttccggtcttcggttaataatgccatccccttttcaatcgccacggagggggaatcgatggtcaccggcgccccgtcgatcagcacttcgccgctgtcgaagcgctccataccgaacaggctttccatcacctcgctgcgcccggcgcccaccagcccggccacgcccaggatttcgccacggcgtacgctaaagctgacgtcatggaacacgccctgacgcgtcaggttgcgcaccgtcagcacctcttcgccgatggtgttattaaatttcggaaacagctgggttaattcgcggcccaccatctgggtgatcagcgactgccgggtaaattcggtggtgtttttgctccctacccaggtgccgtcgcgaaagacgctgatctcatcggtgatggcaaagatctcatccattttgtggctgatatagatgatcgctttcccctgggcgcgcaggtcgcggatgatggtgaacaggtgagccacctcgccttcggtcagcgccgaggtgggctcatccatgatcacgatatccgcgttccatgagaccgctttggcaatctccaccatctgctgggcggcgatgctcaggtcgcccaccagccggtcagcggttaagcggatattgagcttatccagcagcgcctgggtctggcgggtcagctgaccgtggtcgacaaagccgtacttcatcggctcgcgccccagccagatattctccgccaccgtcatatgcggcaccagattgagctcctggtggatcatcgagatccccgagcgcagcgcatccatggtgtcggtaaactccaccggctcccctttcacgcgaatcgaccctttatcggggcgatagataccgatcaggcatttcatcagcgtggatttaccggcgccgttctcgcccatcagggcatgcaccgttcccggacgcccgcgcaatgagacattatcgagcgccttcacgccggggaagaacttactgataccttcggcttcaagggcaaaagcgttcatacatccacctccgtaccacaggttggccaggactatttctgattacggttggtaaattcagccatgttctctttggtgatcagctgatacggcacgtcgatgattttttccactttctcgccgttcgccagcttgatggccgcgtcgactgcgccttcaccctggcctttcgcatcctggaagatggtggcgatcatcttgccgctcttcagcatctgcagggcatccggggtgccatccacgccagcgatgagaatatggttcgggtttttgcccagcgcctgcagggcgccgatcgccatttcatcgttgttggaggcgatggcctggatatcctcaccgctggtcatccagttgctgaccacgtccacggcgtcattgcgggtaaatttcgcggtctgcttctggacgattttgatgttcgggtatttcgctaccacctcttccacccctttggtgcggtcgcgagtggattcattcgccaggtcgccgagcaggatcgccacattgcccttaccgttcatcgctttcgccagcgcttccatctgcagacggccggcgagaatggagtcagatcccacataggccatcttgtcggtcagctccgcttgcggacggcggttcacaaacaccagcgggatcccggctttggtggcctgatccatgatcggtttcaccgcgttggtatccaccgggttgacgataatggcgtccaccccctggccgataaagttctgcacctgctgcagctgctgggagacatcccctttcgcgtcctcgatctgcgatttaacgccatcttttttcatctctttttgcatcgaggtacgcaggatcgtcaggaagttatcgtcaaacagcgccatcgagacgccaatggagacatcttttgccataaccaccgcaggcagcatgcaggctaacaaagaggcaacaatcgttttcttaatattcatagttgatccttgattttgtaggtacgccggtgaatgaaacaaaatgaaaaattaatttcagttacgttgcggcaaatgtctgctggtatatcgacgacgctgcggcacctctcgcactccatcgtgatctaaatcacaaataacggctgttttatcatcactattttgaaacatcagtccatttacgccgcaacctggatttcagaccatttatttcattaacaagaaatttgaaacttttataagtaaataactgaaatgaaaattttaaaactatgcagtaacagaattttgacagacatctaacattgccgcataaatgagcgaaaaatgagaagcagacaacgctttgaagcgatccctcccggcggggttggcatttacccgccggggaaatccgtgttgtcaggaagggaggcgccgtacgccttagtccacgttctcggcgctgtagaggataaagtcgactttaccgtcggcataggtttgcggctggtagccggactccagatggcgcagcatcaggtcgatcgccagctgggcgtgctggcgggtgttctgatcgagcgttaacgccaggctgcccttcgccagctgctgccgggtggtgttgtaacgctcatgggtgatccagcagacgtcgccttcgcggcggtggcgggccagcgcctcggcaatctgggtattgccaagcccggtgttatagatcccaacaatattccggctgcggcacagggcttgctccaccaggcgggtgatctgctcccgccgctcctcgcccgccagcacgtcgctgagctgcaggtggggaaagcgctggctcagcacctcgcggaacccctgaatgcgcaggcgatgcgcgctgtaatcttgccggccgctgaccatcagcacctcgccgggccgcggcgtcattctccccagcattaaccccgccgtgcggccagcctgcagctgattgatccccacgtggcagagtcggtcggcgccgggcaggtccgtcgccagggtgatcgccgggacgccagcctcccggcagcggcgcagcgcgtcgtgcaccgcgggatggtcattgccgaagacgatgatcccctgacgctgctggcaactacgcgcaatgcgccgggccagcgtcgtcggctgcgactccgggacaaaggtgcggtgcaaggtcagacggcgatagccgaggctatccgccacggcggcaaaatcctgcgccagctgcggaaagaaaaacgagtcattgctgctgagaaagacctcaacctgccagggaaagcggtgctcctccggcaggatccgcttcagccccgcctcgcgcgccgcctgcagcactttgcgcgtggtctgcggcgatacgccgccgcgctcgttcagcacccggtcaacggtggccacgccgacgccaatctgtctggccagcatcgccagtgaaatatttttcatcgcccctctcttcatgatggaaatccatcaaaacggcagtgtcagtgagtttagcaaaccgattatggtggcagcgtcccctcgccattctggagaaaaaaatgatctgcaaacgttttgccctggtaggcagtggttttatcggtcaggttcatgccgccagtcttgctcgtcatgaaggaagtgcgctgacgatggtggccgatgccgccccggagcgcgcccaggcgctggccgcccgctatggcgcccgggcggtgaccgtgagcgaggcgatccatagcgacgccatcgacgcggtgctgatcgccagttcaaccccgtcgcatgccgaactgctggaagccgccgcccgggcgggcaaggcagtctattgcgaaaaaccgatcgacctctccctggcgcgcgcccgtgaggtggtggagcgggtgctccccctgaacgtgccggtcactgtcggctttaaccggcgcttcgatagcagccatcagcagctccgccgccagctggagcaaggactgatcggccgggtcgagctggtgcagatggtctgccgcgcctccagcatgccgccgctcgactatctgcgcagctccggcggccagatgcgcgatcaggcgatccacttcttcgatctcctgcgctttctcactggcgatgaagtgcgcaccgtagcagcgatgggcgcggcgctggccctgccggacattgccgaatttggcgatgtcgacacctccatcctgatgatgcagatgcgcggcggcgcgctggcgcagttggacaatacccgccgcaccggccacgggtacgatgaacggatcaacctgctgggcgccgaaggcgcgctggagtccggtagccagtcgccggcgggccctaccctgtggcgcggcaatcagcgcattgagccgggcctgtggccggactggttcagccgggtacagggatcttattaccagcatcttgacgcctttattcgctccctgaatggtgaaaccgtcgccgacctgcccggcctgctggacggcctgcaggcgcaggccattgccgaagcggcggttcagtccctacagcatggccagtttgtcgccgtcgatgactgtcgctgagcgggtgcgaggcaaccgctatctagcgcagtacctgcctttatgccgggcggcggcaacgccttgcccggcctacataacacaggcattaatatgctttaatatcaaacggttgcatagatatcccaggcccgcgcaagcgcagcgccgccgggcaacagacatcaggcatcgtacgcgtccttttgccgggcaatggcagatacgctcgcgctatctgcaaaccaatgcccggccggctccttagcgttcttcgttaaacaccgcgcccacctggcgccgcacctcatccatcacctgcagattctgcagcacccgactgagcggccgcagcggcgagtcctgcaacccctgtccgatgcaccaggcaaaatgctccgcctgccagaacagctggtcgtagcgattgcgcggctcttcccagcgcagcacctgcccgccctggctggcggcgagcgtgaagccgccgggggcgtaaaactggccgtcgatcgtcagggtcgcctggcgtccggccaccaccgccccgcccggcgtgttgctgaacaaagtggtgtttaacaacccctgcatcccgttctgccagctaaacagcatcgacgtctgaccgttcagcccctccgccgtggcgctgccgcgggcgacaatctcctgcggcatgccgcccaccatcagcgcaaacgaggtcacatagctgccgaggtccatcatcggcccgccggcaagatcggcattgaagatgcggtgctcgggggtgaaatactcgccgtgatcggccagcagggtatgcaggtcgccgagcgccccatcctccagcagctggcggatcacatcatatttcggcgcgtaatcgcaccacattgcctccagcgccagcttctcctggcgggcggcttcggcctgcagctcacgcccttcgccgaggttgagggcgaagggcttctcaatcagcacgtgtttacccgccttcagcgcctgcatgccgtcgggaaagtgatggttgtgcggcgtcgcaatatacaccgcatcaatatccggacgcgccagcatctcctccacctggccgtaagcctgggggatcccccattccgcggccacccggtcggccttcgcctggctgcgggaagccaccgccaccacctgctgccggctgtaggttttcaatgagtgcacaaagcgctcggcgatccagccaggaccgataatgccccagcgcaggatgggaatgctctgcgccgccgggcggcgcggggttggtaagtgtgacggaaacatagcggctccttagtctttaaccacgttcacccagcgacggctggccatcgaggcttcaatcgccgacagcacgcgctgattctgcaaaccaaattcaaagttgggatagcagtcgccctccccgcaaatcccctgcaccaggtcatgcacttcgatcaccttgacgtcaaaatagcccagcccgccgccgccaaaatcgaagccgaagaagccggcataggccgggatctggctcccggcatacagcgtcttaaagccgcggtcatgtttgtcatcgttgaagcgatacacctgcagctcgttaaagcgctccccgtccatatacagcgtgccttcggtgccggagacctcccagaacacgccgaagatccgcccggcggcgatgcgcgaggcctcaatcacccccgcggcgccgctgtcgaaattgaccaggcactgaacctgatcgtcattttccacttcccgccactcggcatcggccgcgacccggctggcatacccggcatcggtttgcggcaccggacgctggcgcaggcaggtttgcgcgctggcggtcacttcgcggatcccgcccagcaaaaactgggcgacggacagggtacgggcgccgaggtcgccaagcgccccgctgccgccgagagttttcgagcagcgccaggaccagggcaggttcgggtcgttataaaacccctgatcaaaggtgccgcgaaagcgcaccggttcgccaatatcgccccgggcgataatctgctttgccagcagcgccgccggcgttttgatgttgttaaaagccaccatggtcttcacccccgcgcgccgtgccgcctgcgccatctcctgcgcctgctgctcattgaccgccagcggcttctcgcaatagacatgtttacccgccgcgatcgccgccattgccattgtgtagtgcagatggttcggcgaggtgatatccaccacatcaacctgcggatcgtttaccagctcgcgccagtcgccgtaggccttttccgcccccagtttcgccgcgtggcgttcggccatcgcctgatcctgatccgccagcgcgtagagatgcgggcgcttgggcagatcgggatagaacatcgccgcgcgacggtaagcgtcagcgtgtgcctgccccataaaacctgagccgataaggccgatatttaaccgcgcgctcatgatgcgtactcctctgacgatgaaggggaagataaatggtgcgccagccaggcataggcgcggctggcggtggccagcggcggcgccatcgccgggtcctgctcggcttcgataatcagccagccgcggtagtcgctgtcccggacaaagtcgaggatcggcgcatagtcgatgcagccgtcgcctgggatggtaaacagcccggcgcgcaccgcctcgttaaagctcaggttttcccgatatagacgccccagcacctgcggacgcacgtctttcagatgcagatggcggatacggtggccatatttgtgcaatacgcgcgggatctcgaccccggcgacaaaggcgtgcccggtatcaaacgccagcccgacgttgtcatgggtgtgagacagaaaccgctccagctcgtcatcgtgctccaccagcatcatcagatgatggtgataggccagctggaggtcatagtcgcgcagcagcaggtcggcaaaggtattcagcttgtggcaatacgccgccaggctgacgcggcttaacggcggcgagagcgaaataggctcatcaagcggggtttcacctggcagttgcccgcattcgccgtaaaccatcaccttcgcgccgagctgccggaggagctgggcgtgctcccgcaccgcctccagctccgcttccacgctgcggtcggccagcatgccgctgtaccagccggacgccaggcgcaggtcggccgccgccagcagcgggcccagggttgctgcctggcggggaaatttccgtcctaactcaatgccctgatagcccgcctcccgcgcctcgcgcaggcaggtatccaggggaatatcaccgcctaaatcctcgagtacatcgttggtccagcacagggggctcacgccccaccgcagttgctctgtcgccatcttgttctcctttccaccctgtggtcttgtctggcgtcactataagcaggtgacgaccgacgatgaaaacggagaaatgatggaaatccatcattgcgctggcggtatattcgctatttcaggtaaccctgaaaaataaatggaaataatgcttgccgccggcttattttgcggataaaaattactggcttaataacccgctccagaggttatccctttcattcgaaatatgatgatagcaatatgaaaacaactcaacaccgcaccagcgcgggcttttgccgcacgccaaggacaggcctgctgttatttgcctgaatgacacatagccgcttttaaaacatcaaataattaacattctctctgcaataatatgacaagcagtgggaaggttggcttgcgaaataagcatgaaactttgatgttttactaataaataaccccagagcctcttgctaattacttatcaggactggttgggttattttattctgacgccaacgggagaatacaccaacgtgtatccctctctctggcccggcacgccgctatcgcgatgagaaacaataagatgaataagacctggcttttcaccaccctgaccctggcgctggtcgccgccgcgccggcccacgccattagcgcgaaataccgggaacagcttgaacgttccggctgcacgcagatgaccgacgggatcacctgcgatattcataaaaccaaagccgagaatgccgccgccgcacagcacgccgatagcggcttcggcccctgggtgggcacctggtatgtttatacggagtatggcgataaaattgatgagattaccgtcaccgctaaaacggtgaaaacccgcggccatctggttgaggcggcgaaagccagccagggtaaactgaccttccgggtgaaaagctcagcctttacgctgaacgacgcctttaacggcgtatgggcaaacggcagccagcgcggcacgttgcaaaaagtcctgtaataacatcgctctgccgacaggccggggataatgcagggagaacctcccggcgcaggccgggagggagtgcaacggattacttctgcggacgcatggccgggaagaggatcacgtcgcggatggtatggctgttggtaaacagcatcaccatgcggtcgataccgatacccagaccggcggtcggcggcaggccgtactcgagggcggtcacgtagtcttcgtcgtagaacatcgcttcgtcatcgcccgccgctttggcgttcacctgatcctggaagcgctgcgcctggtcttcggcatcgttcagctcgctgaaaccgttaccgatttcgcggccgccgatgaagaattcaaagcggtcagtgatttccgggttgacgtcgttacggcgcgccagcggagaaacttccgccgggtattcggtgatgaaggtcggctgaatcagatgcgcttccgccacttcgtcaaagatttcggtaactatgcgtcccagcccccagcttttctctacctgaataccgatagattccgccagcgctttcgccgcgtcgaagttatccagatccgccatgttggtttccggacggtgtttcttgatcgcttcccgcatggtcagtttttcaaacggcttgccgaaatcaaacacctggtcgccatacggcacttcggttttgcccagcaccgtctgcgccagggtgcggaacagcgactcggtcagttcgatcaggtctttgtagtccgcatacgccatatacagttccatcatggtgaactctgggttatggcgtaccgagatcccttcgttgcggaagttacggttgatttcaaacacgcgttcaaaaccgccaaccaccagacgtttcagatacagttccggcgcgatgcgcaggtacatatcgagatccagggcgttgtgatgggtaatgaacggacgggctgacgcaccgccagggatcacctgcatcatcggcgtttcgacttccataaagccgcgggccaccatgaactggcgcatggtggcgaggatctgcgaacggatacggaacgtatgacgcgactcttcgttggcgatcagatccagatagcgctggcgatagcgaacttcctgatcctgcaggccgtggaatttatccggcagcgggcgcagggctttggtcagcaggcgcagctcggtgcagtggatcgagagttcgccggtttgcgttttgaacagcttgccgcgggcggcgatgatatcgccgaggtcccatttcttaaactgttcgttgtagacgccttccggcaggtcatcgcgcgccacgtacagctgaatgcggccgccgacgtcctggagggtgacgaaggaggctttgcccatcacacgacgggtcatcatccgaccagccaccgcaacttcaacgttcagggaagcgagttcatcgttgtccttcgcatcgaattcagcatgcaattggtcagaggtatgatcgcgacggaaatcgttggggaaagctacgccctgctcacgcagcgcagccagtttttcgcgacgagctttcagttcattattaaggtcaatggcctcatcggcaccttgtgcttgttgttcagacatatggattcctcataaccttgctttcaaactagcttcgataaattgaaccaggtcacccttccgcgcggcctgtctctgggaagacaccagagcacaatcttaacgatcctggattcactccaagctgatctcactcagctatggcttcagtaacggtattttttatcgttggcctccgcgcatgccagaatatcctcctcctgttcactaagctgtgcaaggagcgacttcgcgctccgctgttgaggtaatgcccccggtcgcgctgcgcttaccggggctacgaatcgcagcccggacaaggtgtttacgccacgagccgggacgagcgtcaggcgccgccgccggtaatttcaccggcagccgcacgacgtttgccaacgctacaggccgcggcaaaggcgataatgaccatcaccgccacgcagccgagggtccattcgcccatctgcgcgaagaaatgctgataggcggcaatcgccgtatcgctgatttgcgattcggtggtttgctgggcgaccacgcccgccagccagttggccaccgcgccggtggccagcatatagatcccggtcaatacgccggtgacgccgggcatgttcagacgggtgatttgcgccatcgccaccgggtcgataaacagttcggcaaagcccatcatcgccagcccggcgaccatcatgcccatcgaggcctgaccgtcagccgcgccatggcgggcattgagcgccagcagcataaagccgccgcccatcagcagcaggccgaaagaaaatttcagccagacgcgcagcacagaacgcacgctgccttccgggcgcatcagccacgccagcaccacgccggccgccatcaccgctatcgcgttaactgactggaacagcgcggtcggcacgtcccagttcagcagacgacgattgacgaagtggtcgataaacaggctaatcgagctcccgccctgctgcgccagcacccagaacagcgttccggcgagcatcagcaggacgatctgccacagcgcgcgtcgatgctccggggctttgatcatgatccgcgccaccatctgggcagcgaacaggcagacgatcgccagcagatagccggaccagttgttttgcagcagcagcgtgaaaaataccggcgccaggcagagcatcaccagcagccagccccaggtcggcagcacgaacttcaccgcccgcagcgccggtttatcgacgccgcgggtatgccggaagtggcggctgccgcttaagaaaatcatcaggccgataaacataccgatccccgcaagggcgaagccgatatgccagccgtaccactgcgccgccagtccgcaggcgatgggcgcggcaatcgagccgacgttgccggcggcgtacagcagcgagaaaccgccgtcgcgacgcgggtcgtcgtgagcgtacagttcgccgagcaggcagctgatattggatttaaacaggccgtagccgcagatgatgatcgccagcgcgacgtacaaactccatgcggaggtcgactcaacgcccagcaccacatggccgagggtcatcaacagcgccccggcaattaccgccgtgcggttgccgagcaggcggtcggcaagccagccgccgagaataggggtaacgtaaaccagagatgcgtaagcgctgaacaggctgatggcgtggctgtcgtcgaagccaagctggtgggtaaggtaaaggatgagtaaggcgcgcatgccgtaaaagctgaagtactcccagatctggatcgcaacgatgtagtaaatcgcgcgcggctgtgagggtgttttcatgtgttctccttgcagcgtgaaaaagggaagtggcaagccacttccctggtgtgcgtctattacttgttattctcttctttcagcactttaacggtgtaacgaccttccgcctgacgataggcgccgtggatatcggtttcgaagcctggatagtgggcgccgatttcgcacagcatctgcaggaactccagcaccggacggctctcttcggtgatcatctcacccggcatcaccagcggcactcccggaggatacggcaggatcatgttggcgttgacgcggccgaccatctcttcgagatacacttcttccgtctgaccgtgcagctctttctggaacgcggcatacggggtcatcaccatcgatggcagcacttcaaacgcgcggaacatcagatccggcaggttgtgatgctcaatcagtttgtgaatgttctgcgcgaggtcctgaatacgcatgttttcatagaattcaggatcttcacggtacagcgacggcagcatgtttttcacccgcaggttcaggtcgaacgcgcgtttgaagtcggtcagcgcacgcagcaggctcagcgctttagtcttatcgataccgatactgaacaggaacagcaggttgtacggaccggttttctctaccacgatgccgtgttcgtcgaggtatttcgctacgatgcttgccggaataccgaagtcatccatggtgccgtctttcttcatccccggagtcagcagcgtgactttgatcgggtcgaggtacatgtgttcattatcgatgtttttgaaaccgtgccatgcgctgtcggaacgcagcggccagcattcaggaccatcgatatgctccggctgccagacgtcgaagaaccagccgtcagactcgcctttcagacgtttgatctctttacggaacttgatggaacgttcaatagagccgtcgatcagacgcttaccagcgttccccttcatcatcgccgccgcggtttcggtggaggccacgatcccgtagtgtggagaggtggtggtgtgcatcatgtaggcttcgttgaaggtctcttcgtttacgtcgcctttcacatggatcatcgacgcctgggagaacgccgccagcagtttgtgcgtggactgggtttcataaatcactttcccttcgacgcggccgccgctcatcccgcatttgccttcatagatcggcgagaagttggtgtaaggcacccacgcggagtcaaagtggatggatttcacatccagggttttcttgatgaagtcggtgttgtatagcagaccatcataggttgagttggtgataaccgcgtgtaccggccaggtcgcattcggcgtctctttcacacgcttggcgatagtcgcgtgctggaattcgctctgcggaataccgccgaggataccgtaggcgttacgggtcggacggaagtagatcggcgtaatgtcgctcatcatcatcaggtgagtcagcgatttgtggcagttacggtcaatcagcacggtgctgccggccggcgcggagtacatgccgacgattttgttagcggtagaagtaccgttggtcaccatgtagctgcgttctgcgttaaacacgcgagcgatatactcttccgcttctttgtgcgggccgctgtggtccagcagggaacccagttcagaaaccgaaatggagatatcggatttcatggtgttggagccaaagaaatcgtagaagatgctgcctaccgggcttttctggaacgcggtaccgcccatgtggcctggggtacagaaggtatatttaccttcacggacatatttgaacagcgctttggtcagcggcggcagaatggtgtcgatgtattcgtcagtgttctgtttgattttgttcgcgatatcttccgcagcgcccagcgcatattcgaagaagcgaacctgcatgcgcagatcgttcaggctaacgtccagagtggagtaggtgttagcgaacgcatacagcggcatgtactcgttcattttgctgatttcttcgcacagttcgagattgtatttatcccagtcgaagatcacgccgcacagacgagagttgttttcaataagttttaataagtcgtcacggtcgttcgggtagacaatacggaagtccaggcgttcgagagcacgatgcagttcacggatgggttcttctttgaagtaaacccccatgtgattcatgattgcaataacgttcatagtcaaatctccagatgtagaaagcccctcccgtcgcgtgatgacaggtgatggaaggagcctcaggaaaacgggttgctgattagtgcacgttagcggtggtgttgttatccgatgcgttgttctggcgctggtgcattttgcgaccgtagaacatcaggataatcaggctaacgatgaaagtgccggccagttcgaaggagcttgcgcccatcagcgcgatgaagcagaacacgcaacccagtaccgaacaaatcaggctaacgaagttacggatgttgatgccttcgaaacgaatcaggtcaacacaggagtagaagtaaggcagcatggtcagcagtaccgcgataccggtcagttcgccgaacaggtcagaggctttaccaccggcggagttcatcagggtaatcagcaccatcagcgcggtcattttcactgcggccagcagcaggccttttttcggaataccgttgttatcaacttcgccatacactttcgggaagttaccgtcgttggcggcacgtacaccggcctggccaaccagcatcatccacgagcccagagaagtcaggcaggcaaaggcggtgaaagcggataccatcggtgcagcccagccgccgaggatggtagaggcgctaattgcgaacggcgcaccggacgcggccatctgagaagcaggatacataccggcgataacctgagtcgcggcgatatagacgataccggccatcgcagtgcccagcatggtagccagcggcacggtacgtttcgggtttttcaccatcccggtactcacggcggcggattctacgccaacgaaggcccacaggcagagcaggatacttttaataaccgcgtggctatcggtggtgctggaggtattccagttcgcctgataggtagcgacatcaaaccagtgccagccgacgaccgcggtcatgactaccggaataagcaccagtaccagaccaatagtggtcagacggctgacccaggtcccgccgagcatattaacgaaagtaaagatccacacgatggcaatacaggcaatacctgctggcaccgggttatttaaaattgggaagaacgtagagagataagaaactgcggtaatcccgatggccaggttaccaatccagtttgcatgataataaaggacaccggtctggaaaccgaatgccggagatatttcgccagcgtaggcaataggaccgccctgctgcgggtttttagtggccagtcgggcataaacataagccagagacatcgcaccaataattgaaatcacccagccccaaatggcaataccaccgatgctggccaggttcgcaggtaataatgcaatcccgctccccatcatattaccggcgacgacaccggtacaggcaaatagcccgatcttcttggcagaactcatggttgtttttctcctaagtttatttgggaggtacagatcatgatacagaaccattaattgacccgaccaactgccaacaagattactgatttgtacgagataagtcctaaagataaagtgatataaaaacaaacatcagacaaatgatattttgacctttttcgcttaacatataaacatgacaacagggtgtcagaaaaagataaacatcgttgtattacagcaacttacaagaagcagggcgtgttatctgactgttatttaaagcctcctgaatgctaaataaaaataacaacaagaggcttcatgagaaacataaatttaacctcaccatgcccaaaaccttgcacatgatgagggtttacttattctgaagagagaaagttgtcgagatatggaacgactcggttaaccgacgtctggaaaaccccattttcaatccagtacagggtatcttcgccaggacgtaaattaaacgccgtgatgtaagaatcggcagccagacggttctcacctttcatctcatagactttgcctaacagcacataatttagccatgacatctctaaatcaatcgcactattaattgcggtatttgcttcgtcgactttgcccttccccaatgaatccaccgcttttatttgataataaatcgccatgtcttttatacccggcatcgcccctacccgctcgacttcactgtagagggcggccagctgtttatcgtccagcggctgttgcgaatggcgcaatacatccaccagcgttttttcggcataggcgtaaataaaatccggcgcccgcttaatcacatcatccagcaggctactggccttacttaatgaatcgacgtcgcccttcattaacagctgatgcgactggtagaaataggttaacgccacgctttgcgagggctgatattgcctgagcatcgcctgcattcgcgccggccacggctgcgccagggcatccgacaggctgttcatcagatcgttctggatggtcagctggttatcgttggtcacaaagtagcgcttatccagcatcgtcgagctgtcggcgttgtccaccagctggaccgacataaagcactgctgcgcccgatagtggcgctgattgacgaactcgatggtcagcgttttcccggagctgctcggctcattgatgttgtagtccgttttgtcatgcaccataaaggtcgagaaggtgttcagcgaggtggtgatcaggctggccagtcctacggcgtaggagtgctgcgacgaccagttagcgcaggagttgccattcaccaggtggatatcgatatcgcgcggattgagcagcagacgcgccttgttgaccggcggccgcgattccatgctcgacagcgccaccagcgccacgcaggtgcccagcgccaacaggaacagcccccacaccagggcggtagtgaggcgcttgcggcctgacggcgcgctggccacggtaggagccggtggcggcgcggcggcatcagggagagggacagagacgtcggatggcgcaccggcggccggcggcgcaggaacggcggtcgacggcgcaggaacggcggtcgacggcgaaggcgtcagcgcctccatcgacggggctagctcctccccctcttcggtgcaccagatcaccggcaccgtgagcttatacccccgtttgggtaccgtcgcgatgtactcaaggctaacgtcgtcgccgtctttgagcgacttgcgcagttcagaaatactctgcgtgacgacgtggctggtcacaacgttccgggtccagacgttttcgataagctcgtcccggctaagcacttcccccggatggcgggcaaaaaagaccagaagatcgattaaacgcggttcaagggtaagctggcgccccttcctgctgatttggtttacagagggggttaccagccattcaccgacgcgaacaacaggttgtagcatacaagaaagccccagacaaaaagggaaaggcgcgatgataacacatttgtcctacctatttttgccaggggtcacttcctcaggcattaggccggaattggctctttattaacaataaaaagcaataattcattaacatcgtgatcatgaaatctatatatagcgataaaaacgcatttccgctgccgctattgcctaaggcaattccgatagcagaaaaaaataagcccggaggcttaacgcgctccaggctcagtgcgttgcgcgccgatacggcacgctttaaaaaaggttatttatacacttccgctgtggcttcaaagttagggccatgctcacgcgcagcggtgatcacgtagtactttccgcctttctcatcggccagcttggagagctgatcgtgcagatcggaaggcgaagagaattcgccaccggacggccccaccgagatcggcccgactttggtcagtttgaagtgtttcacttcttctttggtaatcaactgcgcggcggaggcgccaaatgcaacggcggaaagggctaacgcgactatcacttttttcatcctgcaatctccttggaattagccttcagtcaggccctttcagtatagacggcgatttactgagcgtgctaccgatgcgcttattttttggccgaggcgttcagtaacgcggcggtaccccttccgggcgggtcttaaagcgccggtgcagccacatgtattgctcgggcgccatcaggatgcactgttcgataatctgattcatccaggccgccgtaacctcggcgctcgccagcggcggcgtgcgctccggcgtcagggagatcaattcataccccatgccgttgggcttgcgccgcggaacaaacggcacaatcgtcgccccggacattttcgccagcatccaggtaccggtggtggtcgctgcctgttcgacggcaaacagcggggcgaagacgctgctggccggaccgtagtcatgatccggcgcgtaccagagaatttccccctcttttagcgccctgaccatccctttcagattttttcgatccagcatggtcttgttagagcgcaagcgtccccaggtttgcagccagtcaatcagcgggttatcgttaggacggtagacgccaattcctggggtaaacatgccgtacattcgcgcacccatttcgagggtcagaaaatggataccgatcagtaaaatgccctgcttttcttccagaagctccaccacctcgttaacgccgctggtctcggtccagcgcgctacccggtgcgtcggccagaaccaggccatgccggtctccatcagccccatgcccagcgattcaaagtttttcaccagcagcgcctcgcggtcggcggcgctcatctcgggaaagcagagttcgagattacgtctggcaatccgcgcgcggcttttcatcacccgcattgccagccgcccaagcgccgttcccagacggtagatcaccggatacggtaattgcaccagcagccacaaaaagccaattcccagccacaacagccagtaacgcgggtgcaacagcgcgcgggaaaatttgggtaaatttgacatagtaatcctgttaattcactcaataatagctgagcaaaaaccgcgaaataaagtagcggatcctgcacgtagtatttttccaattcgtgcggtaatactcaatcacaaagcgcgttattataagccgattccaggataaattcagcccttacgctggggactactctattattagacgcaacgcgtaaaatttcctgtttaatgcataaataaataaacctaacctctacggctcggccaattgtcgataaaatagccagtacatttgcctcagcctctcgaccaatacctcttttactcacgctttattatggcgatagcgaacgcaaacagtccgtttcgcccggtttgacacggccagcatgcggttatttgtgactggggcaaaggttaagcatcgacattgcggatccttttcccagatatgctacgtttacagcgctcattcgacgcaagtgcctttgccgacgtcgccgctttcagaagccatagtgagaaggaactatgacaatgaattatcaattagtgaagcaagtcagagaaaataacccattaagaaaaagcttcattgaccttgccgttaagacttttgacctgtcttttgaagagtggtatcagcaaggttactggaccgacgcctatatcccctatgcttttgtcgaacgcaataaagttatcgctaacgcttcggccaacatcatcgacctgcgctggcagggcgagccccggcgttatattcagattggcaccgtgatgaccgaaccggaccaccgtaataagggattagccggccagcttatccatcacatcctgcaggactggcagcaggaggcggacgccttctttttattcgccaatcccaccacggtggatttttaccccaaatttggcttcacccgcagcgaagagtatcaatatattatgccggtctccccgcgagccggtgattttcgtaaactggatatggacagccctgacgatgtcgccctgctccgccattactatgaaaaatccaacccgttctcaccgctgcgggtggagcataactttggcctgctgatgttttactgctcagcctttatgaagcattttgtctattactcggcaaaaaatgaggcggtggtcatcgccatgcaaaacggtccggtgctgatctgctttgatctattctgcgacgtgggcaagagcctgtcgacgctggtcaacgaactggccgatgaccacgtttaccaggccatcctcggttttacccccagtgaagaccggctcggcgagtatgagaagatagagggagaagatatcctcttcgtctatgaccagaaggaaaacctgtttaaagacaggaagttgatgtttcctttactggcgcatgcctgacggcgccgcgccgccaggcagatcagttataagtcaccacgaaggtcgcgctggcgttcgcttcgcccgcagtcactgcgggcccgttgaccgctcgccgcgtcgggagacgtaatcccgatagccctcgccaacgtaaatctgccgtggccggtagatggtcagcggcgcctggtgcatctcgttccagtgcgccacccacccgaccgtccgaccgaccgcggtgaccaccgcaaacattgacgaaggcagattcatcgctttaaggatcaccgcggtatagaaatccacgcttggcgacaggccattgtccacaaaataggggtcggtcagcgccacgtcctcaagggccatcgccacctgcagcaggcggtcggacatgcctacctccgccagcacccgatggctggtttcacgcaggatatcggcgcgcgggtcacggtgacggtagcgcgagttgccaaaacccagccggcgaaatgcctgcggatcgcgcttcgcctggcgcagaaacgccggaacctgatcgacgctttcaatctcctccagcattcgcatgctcgattcatttgctccgccatgcatcggcccccacagcgacgccagcccggcggcgacgcaggcgaataagttcgccccggaggagcccgccgcgcgcaccgtagtggtcgaggcgcactgcccgtgatcggcatgcagcaccaggatctggttcatcgcctgctcgataaccggattgagaacgtatttttccgccgggatagcaaacagcatctgcaggaaattaccggcataggagagatcgttgcgcggatacgccgcgggttgctcaatggtgtacttgtagctcatggcggcgatagtgggcattttcgacagcagccgggtggcggccagcgcccggtgctgcggattttccacgtccaggacgtcatgataaaacgccgccagcgcccccaccagggcgcacatcagcgccatcgggtgcgagtcgcgacgaaagccgctgcacatgcgggctatctgctcatggaccagagtatggcgggtgatggtctcgcgaaaggtttgatagctggcctcatccggcgcgtcaccgttcagcatgatgtaggccacttcgagaaaatcgcactggcgagccagctgatccaccggatagccgcggtgcaatagcacgctgttttccgtatcgatccacgagatcgccgactggcatccggcggtattggcgaagccggggtcatagctgcagaatccggactgatttagcccgcgcatgtcgactcccaccggcccccgcgttcccgacacctgcggcagggcgatgggcggttgttgtccggcaaaagaaagcgttaacggtgtagtgctcatcctgttagtcccccagcaagcttatcagcgacccgaagtcattcttcaggcggaaagaccaacataaccaatgtgatgcagcttattcattgatgtcatcactataaccctgacaaagaggatattttgctggccttcacggggaaacaggccgtctttccccagcccaccgccggatagcggcacaaatcgccaaggataaaggcgatcatcgctgtcaaaatttacgttgagtaaagaaaggatgaagaggagctaccatgaattttgtgctgtcgatgacccttatctgcatcgccatcgcctggctgatgatgagcctcctgccggtgtagatgcaccgctaaccgccacgccagtggtctggataacccctccttcaattgatttccgccgtggtcttcgcctctgaggtttcataagagccatataagaagtactggttgcatatcaggctgttgcgttttcccgccgaggggtaggctaaaggcccactgttaaggaggtgatatgtctggactgatcaatccacatgcggccccggaagaagcagcctatgcgctgctgattgagctcgttcgcgcccagcgcgtgccgcaatatgaaggcgaaatttccggcctgctggcgatgtacgacgaagccgttaaacactttaaagagaaagagaccgagcgttaggcgtggacatcgtggtgcgagaaaagcgtgacgcctgcggaagccgcgcaggcgttggctggatagcggcttgggtcatcagctgccgcggtaggtagagtatccgtactgactgagcagcagcgggatatgcagtttttgattttgctttgtgacattaaaaataaccggaatcaccgggaagaacgtattcatattttggcttttaaaatagtcaccggttttaaacgtcactttatacacccccggctccatattctccgcctgcggatagagcgatttaatccgcccatcggcatccgttttaccggtggcgatatgctgccagctctccccctgctgtttatccagctcaatctgcacccccggtgaagggagcccggtttgctgattaagaatgtgtacgctgagcgtcccctctggcgccgccagcgcgctgaagctgagcagagaaattacggaggcgataactaatttcataatcgtgaccttattgggcaagtgaaagtgccctaactatagtcagcgcggcggggaaaaaaattaaactttttgttatcagtttgagttgatgggtactgtctccacacacaacacgctgaaccggtttcctcgtaagaagaggaagtgtcttatgagtaggtagccccgtgctcttagtaacaggatacggtgacactaagtctatcaggcaggggaaatagatttgctgggttcaaatatcacaaggtaaaaagatatacgccgtggcctctgccgcctctaccagaacagtgcttactgcaaatgggctgcagtattcgaaataatcatttaatattatttaaactactattccagtgtaagtaatcacctggttcagatattgatcgttatcattgattctcttgtcgccacgccttaaccatctcctttgttacctctttcttgtagcaaataggtgagtacccaccagctttgctccaggcactgcggccaccgcacgagctgccgttccgggcggtattgaagggacaggcacaagtaccggggtaggatgcgacagagtcatcaataatcctttgactgacctgatcatcgcttaaggaattcgatttggcgatggaaatatctgatgcaaagacgcacacaacagcgaatacggagatggcgacgaatttgatgttcattcggatctttccaggtagtggatgaacatcgagggtatgctttcaaatagtgttcaatattgatctataacaactgtacttcacgccagcttaaaatgcgatatttaacccagtcagacagaacctaaagctataatgactattagcctgttaccggcaacatattttcacattcctgcagagcgcttattctgcactcagctataaccagcattaaccattctgttcgatattacagagcagtaatgctgtactctgactggccatcgtccgacagatactacaagacattagaatcatcgaaatggtccgtcgatatgctcacctggcacctaaccatttaactgagcacgcacgtcaaattgactcaatttttgcaaatttttgcagaagatgtcccaaatatgtcccacaaggaaaaatcagcgactggaggaagttgataagtgattgattattaaatggcacgccctacaggattcgaacctgtgacctacggcttagaaggccgttgctctatccagctgagctaagggcgccctgagaagcgagtgcttcgcggagtgaaacgcgtggaattatacggtccacgtcggttgagtcaatccattttgccaggaaactgcggggcttatacgacgctggcgaaatatcctccaccaactgtacaagaagcataccgccgggcctaatgcgcgcgtaaatcgactcagtggccaggcgcaacgcacttataaccatgtaataactatggccataacaggctaaattagcctcagacaggataaaacagcaaacgaggactgacagcgaggcccgcttctgacaaaatatcctcatccccctttcgtaaagatacagatggaatcctctctctgatggcagcaaaaattattgacggtaaaacgattgcgcagcaggtacgctctgaggttgcggaaaaagtgaaggctcgcgttgcggccggaaaacgcgcccctgggctggccgtcgtgctggtcggcagcaacccggcctcgcagatttatgtcggcagcaagcgcaaagcatgtgaagaagtgggcttcgtctcccgctcttacgatctcccggaaaccaccagcgaagccgagctgctggagcttatcgacactctgaatgccgataagaccatcgacggtattctggttcagctgcccctgccggcagggatcgataacgtcaaagttctcgagcgcatcgcgccggataaagacgtcgacggcttccatccttacaacgttggccgcctgtgccagcgcgcgccgcgcctgcgtccgtgcactccgcgcggtatcgtgaccttgctggaacgctacaatatcgacacctacggcctcaatgcggtggtcattggcgcctccaatatcgtcggtcgcccgatgagcatggagctgctgctggccggctgcaccaccaccgtcacccaccgctttacaaaaaacctgcgccatcatgtcgaaaacgccgacctgctgatcgtcgcggtgggcaaaccgggctttattcctggcgagtggattaaagaaggggcgattgtggtcgatgtcggcatcaaccgtctggaaagcggcaaagtggtcggcgacgtggtgtatgaagatgccgccgaacgcgcgtcctacatcaccccggttcccggcggcgttggcccgatgaccgtcgccaccctgatccagaacacgctgcaggcgtgcgaagagtatcacgacgttgaggaggcctgagatggcgacattttccttaggtaaacatccgcacgttgagctgtgcgatctgctgaagctggaaggctggagcgaaagcggcgcccaggcgaagatcgccatcgccgacgggctggtaaaagtcgacggcgcggtggaaacccgcaaacgctgcaaaatcgtcgctggtcagacggtgagctttgaaggccagagcgtaaccgtcacggcctgacaacgaaaagaaaaacgcccgcttttgcgggcgtttttttatggcttacttccggcgccaggtggtgccctgcgggccgtcttctaacacaatccccatctcgttaagacggtcgcgcgccgcatccgccgccgcccagtctttcgctttgcgcgcgtccagacgctgctggatgagcgattcgatctccgccacttccgcgtcgtcaacctgcgcgccgctctgcaggaacgcctccggctcctgctccagcagacccagcaccgcagcaagcttacgcaggtgggccgccatggcgttcgccgcggccgcgtcctcggttttcaggcggtttacttcacgcgccatatcgaacagcaccgaataggcttccggggtgttgaagtcgtcgtccatcgcctcgataaagcgtgcttcgaaggcttcgccccccgccgcgtcgacggatttgtccgtcccgcgcagcgcggtgtacagacgctccagcgccgaacgcgcctgcttgaggttctcttcgctgtagttcagctggctgcgatagtggccggacatcaggaagtagcgaatcgtctccgcatcgtaatacttcagcacgtcgcggacggtaaagaaattacccagcgatttcgacatcttctcgcggtcaaccatcaccatgccggagtgcatccagtagttgacgtattcgccgtcgtgggcgcaggtggactgggcgatttcgttttcatggtgcgggaacatcagatccgaaccgccgccgtgaatatcgaagtggttgccaagctgcttgcagttcatcgccgagcactcgatatgccagcccggacggcccgcgccccacggcgacggccagcttggctcgccctctttcgacatcttccacaggacgaagtccatcgggttacgcttgacgtcaaccacgtcgacgcgcgcccccgcctgcagttgatcgagatcctgacgcgacagcaaaccgtagttcgggtccgtcggcacgtcgaacatcacgtcgccgttatctgccacgtaagcatggcctttggcgatcagctgctcggtgatctcaatgatctccgcaatatggtgcgttgcgcgcggctcgctgtcgggacgcagaatattcagcgcgtcaaaatctttgtgcatttcggcaatcatgcgatcgaccagcgcgacaaagctttcgccgttttcattagcgcgcttaatgattttgtcgtcgatatcggtgatattgcgcacgtacttcagcttatagccgagaaaacgcagatagcgcgccacgacgtcaaaggagacgaaggtacgtccatggccgatatgacagagatcgtaaacggtaataccacacacgtacatgccgacttccccggcatggataggtttaaattcctctttctggcgcgtcagtgtattaaaaatttttaacatcgaagattccgtgtagacgtgtgtgggtaatgaagtctctataatacccataattcagaccggacgcagcacacattgcaaggtgcatcgacccccgcggttatgctataacacccccctatatctcacccgacaccgggtgctggcaccacactcatcggaacaggatgcaaaaatggttactttccacaccaatcatggcgatatcgtaatcaaaacgtttgacgacaaagcgccggaaacagttaaaaacttcctggactactgccgcgaaggtttctacgacaacaccattttccaccgtgttatcaacggcttcatgattcagggcggcggttttgaacctggcatgaaacaaaaagcgaccaaatctccgattcagaacgaagcgaacaacggtctgaaaaacacccgcggcacgctggcgatggcccgtactcaggcgccgcactctgccaccgcgcagttcttcatcaacgtggttgacaacgacttcctgaacttctccggcgaaagcctgcagggttggggctactgcgtcttcgcggaagtggttgaaggcatggacgtggttgacaaaatcaaagcggttgccaccggccgcagcggcatgcaccaggatgtgccgaaagatgatgtgatcatcaaaagcgtcaccgtcagcgagtaattcgtggcgacactttttattgcagatttgcacctgcaaacagaagaaccggcgatcaccgccggttttctgcgttttttacagggcgaagcccgccaggcagacgctctgtatatccttggcgatctgtttgaggcatggatcggcgatgacgatcctaacccgctgcaccaacaaattgcctcggcaatcaaagccgtcgtcgacgccggcgtgccgtgctacttcatccatggcaaccgcgattttctcgtcggccagcgctttgcccgccagagcgggatgatcctgctcgccgaagaagagcgactggacctctatggccgtgaagtcttgatcatgcatggcgacacgctgtgcaccgatgaccaaggctatctggcgtttcgcgccaaagtccacaccccgtggatccagcgtctgttcctggccctgccgctgtttatccgccgtcgcatcgccgcccgcatgcgcgccgacagcaaagccgccaacagcagtaaatcaatggaaattatggatgtgaatccacaggcggtagttgacgcaatggagcggcatcacgtgcagtggctgatccacggccatactcatcgcccggcggtccatgaactgcaggccaacggccaacccgcatggcgtgtggtacttggcgcctggcacagcgaaggttcgatggtcaaggtgacgccggacgacgtcaaactaatccactttccgttctgattcctgcgcgagcacaattccgaaagcgccttttgcccgggcgaaggtgcgcgcttccccccgccctgcatgctagtcttccacaacgtcactctcaaggaacgagcatgagcaggaaaaagtggagtcagccgctgacgtggggaatgatcatcgcgatcctcaatccgttaggggtaagttatatcgccttaatcggcgtcgttatcggcaacacgctgacgtttgtctggtgtgcgatgctggcgtgggctatctatttttatgccatttatttgctctgcacccgccctcacgatagccggctggtacaaatctatttactgcttatgggcaccctgatgctcccgtgggggttagtgctgcttatcacctgtatcatgagggagataaaggtcaatcaggcactcacgccatcacctccaggcgagacaaaagacggctaaccatgcgcacgcaaccgttttccttgctggcagttcatgctattctctgtggcctctaaagcagtgtgaaacacacccacaggagttttaagacgcatgtcttcccgcaataattcggcgcgtatcgccatcgtgatggggtccaaaagcgactgggctaccatgcaatttaccgcagaaatccttgatgccctgaacgttccgtaccatgtcgaagtggtctccgcccaccgcacgcccgataagctgttcagctttgctgaaagcgccgaaagccacggttatcaggtgattattgcaggagcaggcggcgcggcgcatctgccgggcatgattgcggcgaaaaccctggtgccggtgctcggcgtaccggttcagagcgcagccttaagcggtgtcgacagcctctactccattgtgcagatgccgcgcggcattccggtcggtaccctggccatcggcaaagctggcgctgcgaacgccggcctgctcgccgcgcagatccttgcccagcacgatgctgaactgcaccagcgcctgagcgcctggcgtcaggcgcaaaccgatgaagtgctggataatccggatccgcggggtgcggcatgaaacaggtatgcgtgctcggtaacggccagttaggccgtatgctgcgccaggccggcgagccgctgggcatcgccgtttggccggtcggcctggaagccgacccggaagcggtgccgttccagcagagcgtcatcacggcagaaattgaacgctggccggaaaccgccctcacccgcgagctggcccgccacccggcgttcgtcaaccgcgatgtcttcccgattatcgccgaccgcctgacgcaaaagcagctgtttgacaagcttggcctcgccaccgccccgtggcagctgctggcggataaaagcgagtggccggcggtgtttgctcgccttggcgaactggcgatcgttaagcgtcgcgttggcggttacgacggccgcggccagtggcgtctgcgggaaaacgagatcgatcagctaccggccgataactacggcgagtgcatcgtcgagcaggggattaacttctccggcgaggtatcgctggtaggcgcccgcgctcatgacggtagcaccgtcttctacccgctgacccgtaacctgcatcaggacggtattctgcgcgccagcgtcgccttcccgcaggccaacgctcgccagcaggaacaggcggaaagcatgctgacggcgatcatgaacgagctgaactatgtcggcgtgatggcgatggagtgcttcgttaccgccgaggggctgctgattaacgagctggcgccgcgggtgcacaacagcggccactggacgcagaacggggcgtctatcagccagttcgagctgcatctgcgggcgattaccggcctgccgctgccgccgccggtggtcaacagcccgtcggtgatgatcaacctgatcggcaccgatcttaactacgactggctgaagctgccgctggtgcacctgcactggtatgacaaagaggtgcgcccgggtcgtaaagtcggccacctgaacctcaccgacagcgataccgatcgcctgagcgcgacgctggaagcgatcaagccgctgctgccgccggagtacaccagcggcctgttgtgggcgcaatcgcagctcagctaagcccttcgtgccggggatttgatctatccccttccccggcacaccttgaggcgcgtacaatcccccccttgctgtaaagctcatttctgttttgacttcagaggataccccatgaccaatgggacggattatcgcgccattctcgccagcgatacgccactgattgacgtacgcgccccggtggagtttagccaaagcgcgatgccggcggcgatcaacctgccgctgatgaatgatgaagaacgcgccgcggtcggcacctgctacaagcgccaggggccggaagcggcgctggcgctcggccataaactggtccagggtgacctgcgcgccagccgtactcaggcgtggctggaagcgtgcgcccgttacccgcacggttacctgtgctgcgcccgcggcggccagcgctcgcatatcgtccagcagtggctgaaagaagctggcgtggattaccccctgatcgtcggcggctataaagcgctacgccaggcggcgatccaggccaccgacgaactggtgcagcgcccgatcgtgctgattggcggctgtaccggcaacggcaaaactcagctggtttgctcgcgcccggacggtatcgacctggaagggcttgctcatcaccgcggttcttcattcggtcgaaccctgcaggatcagcatccgcaggccacctttgaaaaccacctggcggtcagcctgcttaaaaaagccgaacagcagacccgctgggtgctggaagatgaaggccatatgatcggcgccaatcatctaccggagagcctgcgcctccgcatggcgcagtcgccgctggcggtggtggaagatccgtttgacgttcgcctcgaacggctgcgcgaagagtatttcgatcgcatgtatcgcgactttatcgccgcgtatggcgaagagaaaggctggcaggcatacggcgagtatctgcatcacggcctgtttgccatccgccgtcgcctggggctgcagcgttttgctcagctcactgaacggctcgatgaggcgctggtgcagcagcagcgcaccgccagcaccgaggcgcactttgcctggctggtaccgctgctggaagaatactacgacccgatgtatcgctatcagttggggaaaaaagccgggaaaattctctttcgcggcagctggcaggaggtcgcagcctggctggcgaagtaatcgcatgctctattgtcccggcttgcggcgtaaacgccttagccgggctaccggtcggcgcgatttgtagccacggtaagcgcgcgcgaccggggagttgtgaccgcttagaagtcgtagcgcagacggaccaggttcatatcgccaaggttgtcggtgctggaggtaaacacgtgttcgtagtcaacgcggaaaccgtaatccagctggaagctaatccccagaccgttatcgatacgctggtagttgcggccgttcacatattccagacggtcgcccataaagtacggctgaatagatttaacagcgtattgattgatcgggaatttatagcccgcaaaatattcaatcccccaggcgtcaccggcaaagtaattatgcacatcggttttcttggtggtgaggaagttctgataccagccgccgccgaaggagaaggtccagttatccggggtccagctcatcgcggtaccgacgatattctggtcataggttttgctgtcggcgcttgacgggtcgcgcatttcggcgcgggtgtagttccacgcggtaccccaggtcagatccttcatgatgtggtagtccgcgccaacagaaccaccgcctttacgcttgtaacgcaggccgttacccggcaggtattcgctgtcttcgaacagataagagccgtaaagatcgacatcacctacagttttcttatatttcagcatattacgtgaacgataggagccatcgtaatcgccattaataccgttccccggggcctgaccgatcatatcgtagtcccagatatcggttttcacccccaccacatcatagtaaatgctgttctgctgcccgtaggttaacgtaccccaggtatcgcttttcaggccggtatacagcatgcggcgggtggtattgttcgcgccttccgcgtagtggttatcccagtcaaacagcgccggaatgttcacgcccagctcatagtagctgatccagctaatatcatcgaacaggtagtaatccgccgcgaagcggaagcgggtgccgccgtcaaaaccgttacgcttataggagcctttgtcgccatcgccggtcatcatgttgaactgcggccggatactgccgccgacggtaaagttaagccggcttaacggatcgcccgcctgcggatcttgtttcagcagcgtaatctccgcgtgggaaggcaatgacgttaacgctaatgctgcgccgatcgagatcgccagcgcttttattgtgtgtgccatagtttttccttgattaataagccaccttatattttccagttgaatattaaccgcgaatcagcatagcgtgttgttgggtttttaatgttttgtgctcttaaaaatcaatgatttatcaatttgtgcgtttaaaataaaagcgccgccaaaaacggcggcgcatcatcaaaatgcaatattcttactggctaaactggcggaatagcgcttttccttttaacagacgcagccccagcccgccgccgcacagggataacaacaccgctcccgtcagcggcagcaacacccacaggcgccagtccggcgcccagggaaaatcaaagactttcgtctgcagcatcgccagcgccacttccgcgcctatcgccgccaccaggccggaaaccagccccagcagggcaaactccgcccacagcgtagcgcgcagcagcgattttccagcccccagcgtgcgccagaccaccagctcctgatggcgttgacgcataccgacctgcacctgcgccagcaacagcagcacgccgcaggccgtcaccaggcctaccatcacctccagcgcccggctgacctgggagagcacctggccgacctgacgcaggatggcgccgatatccagcatactgacggtgggaaactcgcggttcagctgggtcaacatcgcgggaccgttatcccagcggaagctggtgagccagctctgcggctgcccgtccagcgccccggcggggaaaataaagaagaagtttggccgcaggctctcccagtctactttgcgcgcgctgctgaccttcgcgctgaactcctgggtatcgccggtaaaggtcactgtatcgccgatctttatccccagccgctgcgccagcccctcctcaatcgatacctcgcccggcttcggcggccagctgccggccaccagcggattatgatccggacgctgttcgctccaggtgagattaagctcgcgattcagcgcttcgtctttgttcccgtccgtggattgaccgttgatctgcgtcagacgggcccggacgatcggatagaattccgccgcccgcgtctggtgttcggcgaggaaggtcttcaccggcactatctgctcaggggcgatattgatcagaaagtagttcgggctctgcgggggcaactgctgctgccagcggtcaagcagatcgccgcgcagcaccaacaggagcgccagcagcataaacgacagggaaaacgccgccagctggctgagggtcgaccacggctggcgcagcaggcggttcaccgccagacgcagcggcaaggctttgagcgtcaggcgtttgagcagccacagcaatccccagcccaccaggccgcacagcagcgccagcaccaccgccccggccagcaccgaccacagcagcgggctgccgcccagcagccaggccaacaggcccaccaccacgacgctaaccgccgggatccagattttcaacggccagacgttagccaccacatcctgacgcagcactcgcagcggcagggtcgccagcagcagtcgatagggtcgcaggcccaccagcagggaaatgacgcctgtcgccccgatagcccacagccacggccaaccgctggcagcgggtaacgcggcgggcagcaccggtttgagcaccagcagcagcagacgctccagtgccaggcccgccaccccgccggttatcaccgacagcgtcaacagcagcagccattggccgacgataagcttgcgcagctgcgaccttccggcgcccagcgtcttgagtatggcgaccagatcatagcggctgcggcagtagtggctcatcgctaccgccactgcggcgacggccagcagcagcgtcaacagcgcggataacagcaggaattgctgcgagcgctcaagagatttgcccagcgcgctgtcgtcctgttcaaggccaatccagcgatgttccgggccgagcttcggcagcagccactgctcataattggccagctgttcagcgtcgccggcgaacttatatcgccatgcgacgcgactgccgggctgcacggccccggtttttgccacgtcggccatattcatcatcagtcgcggcgccatctggaaggggttaaaccccgcatccggctcctgaatcacctccccggcaatgcgcagcgtggcatcgccaacgtcaatcgtatcgccggttttcaggttcaggagcgccatcagccttggcgccagcagcacgctccccgcctgcggcttcagccccggcggctgcgtctcgagggtgccatacagcggataacggtcgtccaccgccttaacgtccgccagctgcggcgtatccccggcgaacgtcatggtggcaaagctcagctgctcgccgacggtcagccctgacttccgcgcctgtgcgatccactcggcgggcacctcgcgcgaactgcgcagcgtacggtcgccggccataaactcacggctttgctggctaaggcctttctccatccgatcgcttatcgaccccagcgccagcacgcaggccacggcgaggcttaacgccagccagacgatcagcagcgacggcgagcgccattcgcgccagaaccagcgggcgatcatgcttcctcccgcagctggccatccaccaggcgcagacggcgatcgcagcgcgccgccagcagcggatcgtgagtgacgaggatcagggtggtgccgtgttcgcgattaagcgagaacagcagatcggcaattttgtccccggtctggcgatcgaggttgccggtgggctcatcggcgaacagaatggccgggcgcccgttaaaggcccgggccagcgccacccgctgctgttcgccgccggagagctgcgccggcaggtggtgcaggcgtttgccaagtcccagctgctcaagcagcgcgcgggcatcgccccggctctggctatcgctggcgccgcgcaacagcgccggcagctcgacgttctccagggcgttgagcgtcgggatcagcataaacgactgaaaaacaaaaccaacgtgctgcgcccgcagcgccgcccgcgcctcttcatccatccggtgcagcggtttgcccagcatcgatacttccccgctgctgccatcgtcgaggccggcgaggatcgccagcagggtcgatttaccggaacccgactcgccgatcagggcgatggtctgccgcggtttgacaaccagctcaactccggtaaggatggagagctgatgctccccctgaccgacggacttcttaagatgatgaacttcaagtatgttttccgctggcatgtgcctttcctgttgttgttcctgtttacctgccgcgcgatggcggcggacacgctgctgatcctcggcgacagcctgagcgctggctatcggatggcggccaacgccgcctggccggcgctgctcaatgagcagtggcaggcgaaaacgccggtggtgaacgccagcatcagcggcgatacctcgcagcaggggttggctcgcctgccagcgctgcttaagcagcaccagccgcgctgggtgctggttgagctcggcggcaatgacggactgcgcggttttccgccgcagcagaccgagcagacgctgcgcaccattattaaagatatcaaagcggccaacgccgagccgctgctgatgcaaattcacctgccggcgaactatggccgccgctataatgaagccttcggcgcgatttacccggccctggccaaagaattcgctattcctctcctgcccttttttatggaggaggtctatctcaagccgcaatggatgcaggacgacggcattcacccaaatcgcgacgcgcagccgtttatcgccgactggatggctaagcggctggctcccttagttaatcatgactcctgaacgccaggggtcgctgacaggtaaagttatgcaaaaaacggttttagtgacaggctgttccagcggaattggtctggaaagcgcgctggatttaacccgccagggctttcgcgtgctggcggcctgccgcaaagcagaggatgtcgcgcggatgcaggatctggggctaaccggtattttgctcgatctggatgacccgcagagcgtggagcgcgcggcagcggaggtgattgcgctgaccgataatcgtctctacggcctgttcaataacgccgggtatggcgtctatggcccgctgaacaccatcagccgccagcagatggaacagcaattttccgctaactttttcggcgcgcatcagctcaccatgctgctgctgccggcgatgacgccgcacggcgaagggcgcatcgtgatgacctcctcggtgatggggcttatcgccagtcccggccgcggagcctatgccgccagtaaatatgccctcgaggcgtggtccgacgcgctgcgcatggagctgcgccacagcggtattcaggtcagcctgattgaaccgggcccgatccgcacccgctttaccgataacgtcaaccagacgcaaagcgataagcccgtagaaaatccgggcatcgccgcccgctttaccctcgggccggaggcggtggtggaaaaagtgcgccatgcttttaccagcgataaaccaaagctgcgctatccggtcaccctggtcacccacgcggtggcgctgcttaagcgcctgctgcctgcccgcgcgatggacaaaattatccacggctgagttgaagcgcggaatgccgcccccatgtaaaacagaaatcgactaacgagaaatgcccatgtccgaacagaatattgtcaacattagcgaagcgaacctgcagcagacgctacagcagtccatgaacgttccggtgctgttttatttctggtctgcccgcagtcagcactgcgaacagctgaccccggtgctcgagcgcctggcagcccaatacaacggccagttcacgctggcgaaggtcgattgcgacgccgagcagatgctcgcctcacagtttggtctgcgcgccatccctacggtttatctgttccagaacggccagccggtggatggttttgaaggcccgcagccggaagaagcgatccgcgccctgctggataaagtcctgccccgtgaagaggagctgaaagctcagcaggcgctggccctgatgcaggaagaaaaatacgccgatgccctgccgctgctgaaggaagcctggcagctgtcgaatcaggaaagccagattggcctgctgctggcggaaacgctgattgctctacaccgttccgatgaagcggaaagcgtgctgaaaaccattcctctgcaggatcaggatacccactatcagggtctggtggcgcagattgagttgctcaaacaggccgccgacaccccggaaatccagcagctgcagcagcaggtggaacagaatccggaggatgcgcagttggcctcccagctggcgctgcagctgcatcaggtcgggcgtaatgaagaagcgctggccctgctgttcagccatctgcagaaagatttaggcgccggcgatggccaggcgcgcaagatgctgcaggagatcctcgccgccctcggtactggcgatgcgctggccgccaaatatcgtcgtcagctctattcgctgctgtactaatccgttgccttccccggatagcgctgcgcttatccgggctacgcgaactatgcggaacgtagcctaagtagcccgggtaaggcgtgaacgccgcaacccgggatcgttcacgggcgctttttcagctgcgtcaccactagctgatggcgggcgttgaagaacttccggtaggtcagatagccggcgataatcgtcgacaggctggcggtcgacagcagcataaaggtcaccatgatctggtacttaatcgccttcaccgggtcaataccggcaaaaatcagccccgacatcatcccaggcaagctcaccagaccgaccgttttcgccgaatcgacggtgggaatcaatgacgcgcgaatactctcgcgaatcagccgcgctgaggccatcttcggcgtcgcgccgaggctcagtttctcctgaatctgctgctgctcgctgctgaagcgctggcccatattgttgtagcacagccccaccgccaccatggcgttcccggccaccatcccggcaatcgggatcacctgcatcggcacgaaggcgatcgagccagaaaacaccagtaccgccagcgttagtccagcgccagtagtgatggcgataaacgacgagataaaagctttgtcgatatatttactgcgcttcttcgcattccacgccgcgttaaagcagataaacagcaccatcaacagcgtcagaaccgcatgattgacgttaaagatatatttcagcacatagccgacgattatcagctgcacgatcgcccggcaaatactccagataatatctttttccagcgccagcttttcccgatagctgaccagaatagcgatcagcaccagcaccatcgacagcgccagcgattcgttcgtaatgttatgcccgttcatgctgtacctcctgcatatttccgccggcaggttgcagcgtaatcacttcatcggcatgcgaaatttcattgcgatcgtgggtgacccacagaacagcgacctgtttttccgttgcgtagccatgaataatttcattcacattctgtttattactttcatccagcgcgctggtaatttcgtccagcagcagcacgcgcggcagaaattgtagattgcggatcagcgatacgcgctgcttttccccgccggagagttcgttaatggatttttccagcatattttcgtcaaggccaaagcgctgcaggtcggccagcagcgcctgcggatccggttgtttattgcggatctgccacggaaaaatcagattatcgtaaaccgaatcaccgaacagggccggcgtctgcgcgcagtaagagacctgttggcgatacctttccggcgacagcgtcgcgacatccgcatcgtcgaagaacaggcgcccggaggttgggctgagcagcgaggcgataatcttcagcaaggtacttttcccgcagccggaagggccggtaatcaacttgaattctccggcgcgaagctgaaaactaatattgtgtaaaataacggcgtcgtcggtcttaaaccccacaccgtcgagacgcaaaagcgcgttattttccttcatgagtcttcctgattattttctgaaacaccgctagtttaccgcactttcctttctccaggatgaggagaaagatatactcagtttaaacatgcgctatttccttgtagcgccccgccaggcaacaagacaggaggtttttgatgctgatttttattcctatccttattttcgtcgcgctggttattgtggccgcggcggtgaaaattgtcccgcagggctaccagtggacggtggagcgcttcgggcgttttacccagacgctgcagccgggattaagcttagtcgtgccgtttatggaccgtatcggccgcaaagtgaacatgatggagcaggtgctcgatatcccctcgcaggaggttatctcccgggataacgccaacgtcaccatcgacgcggtctgttttattcaggtgatcgacgcgccaaaggccgcctacgaggtcagcaatcttgagcaggcgatcgtcaacctgacgatgaccaacatccgtaccgtgctcggctcaatggagctggacgaaatgctctcccagcgcgacagcattaacacccgcctgctgcatatcgttgacgacgccaccaacccgtggggggtgaaaatcacccgcgtcgaaattcgcgacgttcgcccgccggcggagcttatcgcctcgatgaacgcccagatgaaagccgaacgtaccaaacgcgcgtacatccttgaggccgaaggggtgcgacaggcggaaattctgaaagcggaaggggaaaagcagtcgcagatcctcaaggccgagggcgaacggcagtccgcgttcctgcaggcggaggctcgcgaacggtccgccgaagcggaagcccgcgccacccaaatggtctcctcggcgatcgcctcaggcgatattcaggcgatcaactacttcgtggcgcagaaatacaccgatgcgctgcagcaaattggcgccgctaacaacagcaaagtggtattgatgccgctggatgccagcagcctgatgggatcgatcgccgggatcagcgagctgatcaaagaaggcgctggcgatcggaaaaaatcatgatcggcatgatcctcgcacacccccatctgttctggctaagcctcggcgggctgctgctggcggccgagatgctgggcggcagcggatacctgctgtggagcggcgtcgccggcgtggtgaccggcgccctgacctggctcctgccgctgagctgggaatggcaaggcacgctgtttgccgttctcaccctgctggcggcgtggctgtggtcgaaatggctgcgcaagcgcgtcaaaacgcagcgcccggccgatgcccagctcaaccagcgcgggcagcaactggtgggccgccgcctgacgctggatgccccgctggtgaacggccgcggccacgtccgcgtgggcgatagctcctggccggtgattgccgatgaagacttcgcggcgggcagcaaggttgaagtgattgccgtagaagggattacgctacgaatcagacccgccgtccgttaagcctgcgccttgcgatggcagcagccggaaagattatcgataatcgggcactccgcgctgtcgtcgccggggcaggattcggccagcgccagcaggtgcgcgcgcatattttgcagctcgcggatatggttctcgatatccgccactttctccagcgtgcgttttttcacatcggcgctgtgccgcgacgggtcgttgaacagggccaccagctcgcggcactcttccaggttaaaccccacctgccgcgcctggcgcagcagcgtcagctcatcgagatgctgctgactataggtgcggtagccgttttcgctccgcaacggcggcgtcaccagccccttctcttcataaaaacgaatcgctttgctggttaagccggtttttttcgccacatcgctaatattcattttttctccttgaccttccccttgctggaaggtttaaccttcttaatactcgatgaaagagtgggtctggtcaatcgttgaccggaaaattattcaggagttatttatgtctaacactatcgacctgacgctggatggcctctcctgcggccactgcgtcaaacgcgtgaaagagagtctggagcagcgtcctgacgttgagcaagcggaagtcaccctcactgaagcccatgtgacgggcagcgccagcgcgcaagcgctgattgataccgttaaacaagccggatacggcgcggagctcagccacccaaaggctaaaccgctggcagaatcatcaatcccgtcggaagcactgacagcggccactcctgagcttccggcagcccatgacgaagatgacagtcaacagctgctgatcaacggcatgagctgcgccagctgcgtctcccgggtacaaaacgcgcttgccgcggtgccgggcgtctcacaggcacgggttaacctggcggaacgcacggcgctggtgatgggcagtgcgtccgccgcagaattagtgcaggcggtggagaaagccggctatggcgcggaggcgatcgaagacgatctgcaacgccgcgaacgtcagcaggaaaccgccctcgcgacgatgaaacgttttcgctggcaggcgattgtcgccctgctggtcggcgtgccggtgatggtctggggcatgatcggcgataacatgatggtcagcgacgacaaccgttcgctgtggctggttatcggccttgtcaccctcgccgtcatggtcttcgccggcggccacttctaccgcagcgcgtggaaaagcctgaaaaacggcaccgccaccatggacacgctggtggcgctcggcaccggcgtcgcctggctgtactcgatgagcgtcaacctgtggccgcagtggttcccgatggaagcccgccatctctattacgaagccagcgcgatgattatcggcctgattaacctcggccatatgctggaggcccgcgcgcgtcagcgctcctcgaaagcgctggaaaaactgctcgacctgacgccgccttcggcgcgggtcgtcacgcccgagggcgagaaagatctgccgctcgcggaagttcaggccggcatgacgctgcgcctgactaccggcgaccgcgtcccggtcgacggcatgataagccagggcgaagcctggtttgatgaagcgatgctcaccggcgaaccggtgccgcagcaaaaaggcgatggcgacgccattcacgccgggaccgtggtgcaggatggcagcgtgctgtttaccgccagcgccgtcggcagccagaccacgctggcaagaattatccgcatggtgcgccaggcgcagagcagcaaaccggagatcggccagctggcggataaaatctccgccgtatttgttccggcggtggtcgtcattgcgctgattagcgctgcgatctggtacttcttcggcccggcgccgcagatcgtctataccctggtcattgccaccacggtactgattatcgcctgtccgtgcgccttaggcctggcgacgccgatgtcgattatctccggcgttggccgggcggcggagtatggcgtgctggtgcgcgatgccgatgcgctgcagcgcgccagtgaactcgacaccctggtgttcgataaaaccggcaccctgaccgaaggcaagccgcaggtggtggcggtgaaaactttcgctggcgttgatgagcataccgcgctgcgtcttgccgccgcgctggagcagggctcaagccatccgctggcgcgagcgatccttgataaagctgccgacggcccattgccggaagtcagcggcttccgcaccctgcgcggccttggcgtcagcggcgaggcggaaggtcatcgtctgctgctcggtaaccaggcgctgctcaacgagcagcatatcaataccgcggaggtggaaagcgagatgacagcccaggcctcacgcggcgccacgccggtgctgctggcggtggatggtcaggccgccgcgctgttcgccatccgcgacccgctgcgcgaagacagcgtcgacgccctggcgcgtttgcatcggcagggctaccggctggtgatgcttaccggggataaccccaccaccgcgaaggctatcgccaaagaagccggcattgatgaagtgatcgccggcgtgctgccggacggtaaagccgatgccattaagcgtctgcagagccaggggcacaaagtggcgatggttggcgatgggattaacgacgccccggcgctggcccaggcggatgtcgggatcgccatgggcggcggcagcgatgtcgctattgaaaccgcggcgatcaccctgatgcgccatagtcttcacggcgtggccgatgcgctggcgatttcgaaagcaacgttacgcaatatgaagcagaacctgctgggcgcgtttgtctacaactcgctgggtatcccgattgccgccgggatcctctggccgctgaccggcaccctgctcaacccggtggtcgccggcgctgcgatggcgctgtcgtcgatcaccgtggtgagtaacgccaaccgcttgctgcgctttaaaccaaaagagtaaacgccgtcagatgaaacgggcgccgacgttgttcggcgcccgtttttttgccgggacaagaaaagcccgccggaagggtgacgtgtatcaccatatgcgctagcatgaagtcctcacacttcggagcgcgtatgggcctgttaaaccggataaaaatgctgtggcgagccgccgtcggctcgtcttattcctggcctgcgatggatatcgtcctgcccggcgaacgctatttgcacctcgtcggcagtatccatatgggcacccgcgacatggcgccgccgccggcgaagcttctgaaaaaaatacgccaggccgatgcgttaatcgtcgaggccgatatcagcggcaatgaaaccccgtttagcaatctccccacttacccaccgctggcggaacgcctgagcgatgcgcagctgagcgagctagaggcgcgaaccggcgagctgggcctgtcggtcgggctgttcgacagccagccgctgtggcaggtggcgatggtcctgcaggccacccaggcgcagaagctggggctgcgaccagattacggcatcgattatcagttgctgatggccgcccgcgagagcaacatagcggtgatggagctggaaggcgccgacagccaaatcgcgctgctgcgcgagctgcccgacggggggatggcgctgctggaggatacgctgacccactggcgcaccaacgcccgtttactgcaggtcatgatcggctggtggctggagcaaccgccgtcgcgcggcgcggtatcgctgccgacgacctttagccagtctttatatgatgtgctgatgcaccagcgcaacctcgcctggcgcgagacgctgctggccttgccgccggggcgctacgtggttgccgtcggcgcgctgcacctgtatggcgaagggaatctgccggatatgctgacataaaaaaaatggccaatattgctattggcccgtcaaagaggaatttcatcattattattatcccgggatttgcatcccggatcgtctgattgtcgctcaaagtgaccatcactgccaacactattgcgcaagatggtactattttttagacaacctgcgggcgtattctgacgtcacgcaaaaccggttggtaagaaggatagctatgactcccgccgttaaattactcgaaaaaaacaaaatttcctttcagatccacagttacgatcacgatcccaatgagaccaacttcggagatgaagtggtgcgcaagctcggcctcaatgccgaccaggtttacaagaccttgctggtcgccgtgaacggcgatatgaagcatctggcggtggccgtcactccggtcgccgggcagctggatttgaagaaagtggcgaaagcgctgggcgctaagaaagtcgacatggccgacccgatggtggcgcagcgtatcaccggctatctggtgggcggcatcagtccgctggggcagaagaagcgcctgccgacggtgattgacgccccggcgcaggaatttgccaccatctatatttccggcggcaaacgcgggctggatattgagctggcggcgagcgatctggcgcagcttctcgatgcgaagttcgccgatatcgcccgccgcgattgataaaactatcccggatagcggcgcacgcgccttatccgggatacccaactcgtagccccggtaagcgtagcgccaccggggaaatagccaacctgaagcccaggcttactgccagctcacctcgcctttcggctcataggcggcggcatccagcggcgagttcttctcgatatactctttcagcacttcggcatcgataaagccggtattcacatacccgggtttatcggcgatgttcggatagccatcgccgccggtggcgttaaagctcagcgtcgccatccgataggtcttcgccggatccaccggttcgcctttgattttcagatcgttcagcttaccgtctttggccacgaaactgacgttggcaaactgcggataagcgccggaatccggcttcatctgcgcgacggcggtcaggtaatccactacctccttgccgttcatatcgacataggtcagcacattgccgaacggctggaccttcatcacatctttgtaggtgatatcccccgcctcaatggagtcgcggatcccgccgccgctcatcaccgcgaaatccgcgttactgcgcgccatttgcgccgccagcagcaggtggcccatattggtctgcacaaagcgcactttactgcggtcgccctccagatgaccattcacgctgccgattttgacctgcagctgcgccttgcctttgttctggaacggcgtcagcagcgacatcatctgcgggttctcggcgatctgcggcgtatacagcacccgctcgctttggccgttatcgtaagtcacttttttcttcaggttcaccgggatcagctgatagtgcaccagcttcatctcgccgttgcggaactcaaaatcggcgcggccgacgtatttgccccactcatgcgcctggacgatccagatgccgttctgacgatccggagcgcacggggtgcctggcacataatcgacctgctttttattttccgccgccatgcataccggatcctgcgaatgaccgccgacgatcatcgccagcgatcccgcaggtaaactccgcgccatttcaacgtcgcccggcgcgttagagccgtggttgccattgtcgtaatggcccatatgggtggtggccaggatcacgtccggcttttcattctgctgcagctcctggataaccagcttcgcctcttccgccggtttgcggaattcgatatcggtgaaatattccggattgccaatcttggccgtatcgtcggtggttaagccaatcaccgcgattttcagcccaccgcgcttaaacaacgcccagggtttgaacagccgttcgccggtgcttttctgataaatatttgccgacaggaacgggaacttagcccacttttcctgctggcgcagtacgctcagcggattatcgaattcatggtttcccaccgccatcgcgtcgtagccgatcaggttcatgccgcgaaaatcgggctctgcatcctgtaaatcagactccggtacgccggtattaatatcgccgccggataacagcaggacgcttcccccttccgccgccacctctttacggatgccatcgaccagcgttttctgcgccgccaggccatattcgccgtagtcattgcgccagaaatggccgtggtgatcgttggtgtgcaggatggtaattttataggttttatcctgctcataggcctgtgccgacaggctgcccagcgataaagcggcgaatagcgccagcgctacgctgtgtttgaaataatgcatgcttcactccctgacttaatcccaagtgccgaaagtatagcgagttagtcgcgttgacaaatatgttttcagaattgcgacttccttcaaaccttatcaacaggtatgttagtcggataataattctacccgtcatacttcaagttgcatgtgcgttggctttcctcgctcaccccagtcacttacttgagtaagctcctggggattcgctgcgtcgccgccttcctgcaactcgaattatttagggtatcaacctgcattctctacaacaaatagaactcgctgaagtgaacctatgacaaccaaccaatccgctcaacccttgtccggccccgctgcgccgccgcaaaaagcacgcacctcgtttggcatcttaggcgcgatcagcctgtcccatttgcttaacgatatgatccagtcgcttattctcgctatctacccgctgctgcaggcggagttctcccttaccttcgtgcagatcggcatgatcaccctgaccttccagctcacctcatcgctattccagccggtgattggctacatcaccgataaacgctcgatgccgtggtcgctgccggtgggcatgtgcttcaccctctgcggtttgattctcctcgcgctggccggtagcttcggcatggtgctgctggccgccgcgctggtaggtaccggctcctcggttttccatccggaatcatcccgcgtggcgcggatggcctccggcggccgtcacggcctggcccagtcgctgttccaggtgggcggcaatttcggcagctcgcttggcccattgctggcggcggtgatcatcgccccgtacggcaaaggcaacgtcgcctggtttgtgctggccgctctgctggctattgtcgtgctgtcgcaaatcagccgctggtatgccgcgcagcatcgaatgaataagggcaaaccgaaaccggccatcgttaatccgctgccgcgcaagaaggttattctggcggtaggcattctgctgatgctgattttctcgaaatatttctatatggcgagcattagcagctattacaccttttatctgatgcataaattcggcttaacggtgcaaaacgcccagcttcatctgtttgccttcctgttcgcagtggctgccgggacggtaattggcgggcctgttggcgataaaattgggcgtaaatatgtgatttggggttctatcctcggcgtagcgcctttcacccttgttttaccctacgccagccttgaatggacgggtattttgacggtgatcattggttttatcctcgcctcggccttttctgctattctggtctatgcgcaggaactgctgccgggacgcatcggcatggtttctggcctgtttttcggcttcgcctttggcatgggcggccttggcgccgcggtgttaggcctgctggcggaccataccagcattgatctggtttataaaatctgcgccttcctgccgctgctgggattcctgacgatattccttcctgataaccggcaaaaagcctgattattcggcggccaaagtgcaaccttggccgccgttaacccttgtgtcatcagcctgttccacgatttccccccgccattttcccttctgtgccttttcatcggctaattgcatttttttgcacaactcaagaattattcataaacaaagtgaacgtttttgtcataaactattacccggacagggtagcaaaatggaccgatacaccactggaaaggagacggaatgcaccacgcaacaccgcttatcaccaccattgtcggcggcctcgtgctcgcttttattctcggcatgattgccaataagctacgtatttctcctctggtgggatatctcttagcgggcgtgctggccggacctttcacccctggctttgttgctgacaccaaactggctccggaactggcggaacttggcgtcattctgctgatgttcggcgtcgggctgcatttctcacttaaagacctgatggcggtaaaatcgatcgccatccccggggctatcgcccagatagccgtggcgacgctgctgggtatggcgctctccgccgccctcggctggtcgctgatgaccggcatcgtctttggcctgtgcctctccaccgccagtaccgtagtgctgctgcgcgcgctggaggaacgacaactgattgacagccagcgcgggcaaattgccatcggctggctgattgtggaagacctggtgatggtcctgacgctggtcctgctgccggcgattgccggtatggcggagaaaggcaacgtcggcttcgcgtccctggccctcgacctcgggatcaccattggcaaagtggtggcctttatcgccattatgatgctggtcggccgccggctggtgccgtggatcatgtcgcgcagcgccgccaccggctcacgcgagctgttcactctgtcggtgctggccctggcgctgggcatcgccttcggcgccgtggagctgtttgatgtctcttttgccctcggcgccttctttgccggcatggtgcttaacgaatccgagctcagccaccgcgccgcccatgacaccctgccgctgcgcgacgccttcgcggtgctgttcttcgtctccgtcggcatgctgtttgacccgatggtgctggtccaacagccgctggcggtgctggcgacgctggcgattattatctttggtaaatccgcagccgcctttttccttgtgcggatgtttggtcactcgccgcgcaccgcgctgaccatcgccgccagcctggcgcagattggcgagtttgcctttattctcgccggcctgggaatggcgcttaacctgctgccgcaggccggacaaaatctggtgctggccggggcgatcatctcaattatgctcaacccggtgctgtttaccctgctggaaaaatatctcgataaaaccgaaaccctcgacgagcagacgctggaagaggtcctggaagacgagaagcaggtgccggtcgatatctgcaaccacgcgctgttggtcggcttcggccgcgtcggcagcctgctgggcgagaagctgatggcccaggggatcccgctggtggtggttgaaacctcgcgcacccgcgtggatgagctacgcgagcgcgggatcagcgcggtgctcggcaatgccgccaatgaagagatcatggagctggcgcatctggactgcgcccgctggctgctgctgacaatccctaacggctacgaggccggagagattgtcgcttccgcacgggaaaaatgtccgaatatcgagattatcgcccgcgcccattatgatgacgaagtggactacattatcgatcgcggagccaatcaggtggtgatgggcgaacgggaaattgcccgcgccatgctgcggcttctggaaacgccaccggccggcgaagtggtcaccggctgatgtactgccctctccccgccgggagagggacgcgcttaccgatcccagtacgcctcttccaggctgtcctcacgctccggcaggccgcgagttaaacgcggcgagtgctggttcagcacctgatagctcacgcggttggcatatttacacacctgcgccagcgaggagtaggtcagccatttgcatttgtgcttgctggagttggggacgttattgcggtggtagttattggcggtgatgtcatgcagcagcgccgccagcgcgccgtcgcctgcgccgttggtgttcatgatcttctcggggccgcccatatagggagcgatatgggaatatatgcgcagcggattaacgcaatcctggtgacgcatcgcgcggctgaattcaaactggttaaactccgggatcgcccccggcagcagcggatgctgggttttacgcttcgcctcttcttcggtgaagcccgccatatacaggcccgccgggccggcggtgcacagcaccaggtcgacccagtccagcgccttattcgccgctgacagcggatcggcaaagccggtcagcgcttccccttcctcttcgttcattgccagaatagagacatgctcctgcaggaactcctgccaccacgccgggttatcggcaatcacgtatttggttccgagggttaacaccaccggcacatcgtgctttttggcatactcaatagccttcatcgtggcgtccggcatcggctcgcccggcttgcagcggaccaggtaagaggtcagcaccagcgccgaggcgccggcgatcaccgcttccggaatgctttcgggacgccgcttgttcatgtggcccgggctgatggcgaaggtgcgctcgccgctgtcaccgatcagggtaaagcagcggccaatggcgccgtcgacgccctgcagatagttcagatcggtgcggctggaggtattgcacaggtaacgataggcgtagccgccgatttcgatattgctgcacatcacgccaagcagcaccgagcgatcgtccgccagcaccgagtagttgtgcatggtattgccgatggtgccgccggcaaactgatgggtaatgagattgttgcgcaccagctcctggtacagcgcctcggcgacgtcatcttcaatcaccagcgaatggcccgcgctcaggccgtagcgcacgataaacgcctcatccactttcgcttcgatatccaccagcgtctggtcgataccgaccacccaggagacgctggattcattctccggctgaatttgctgcagcagcggatcgcgggcgttaacgggaaaatagtgtttagatttgcgtttaccgggaaatttcatagtggcgcttaaataacagggaacaagcgggaaatagtagcatattccccgccctgcgcgcgatcagcgataaggcgccgtcagattgaccatcatctcaatatgcgctgcgtccgcattaagcgccggaatatattcatattgcttgccgcctgcttcgaggaatatttcccggttctggacggcgatttcttccagcgtttcgagacagtcggcggcaaaccccgggcacagcacctgaatatgcttcgtccctttctcgccgagcatctttagcgtttcatcggtgtacggcgtcagccagggttcccggccaaagcgcgactggaaagtcatcatcacccgctccggcggcagccccagcgcggaaaccagttcccgcgtcgtatcgcgacagcgctgaggataatcatcgccctggttggcatagcgctgcgggatcccatgataggagagcagcagcagatccggttccccatggacagcgaaggaagcgcgcacgctggccgccagcgcatggatatagtccggatgttcggcatagtcgcgaataaacgagatacccggaatggcgcgctttttcgccagaatccgcgccagttcgtcccagacggcggccaccgtcgagcaggaatattgcggatacagcggcagcaccacgatgtgctccaccccctgcgccagtaagtcatccaccgcgctggccagcgacggtgaaccatagctcatgcccagcgccaccggggtatccggcagcctggcagccagcgcctgctgctggcgacgactatacaccatcagcggcgatccctcttccatccacacggactgatagagcttcgccacgcgcggggagcgaatcggcagtatgacgccgcgcagcagcggccaccatagcagacgagacgtatccaccacccgtttgtcgctgagaaattgtcgcagatagcgcttcaccgccccgggggtgggcgcatcgggagtgcctaaattggccagcaagatacctgttttcgtctgatgcattaccgcctcttaaccatttgaatcgcagccaattgtagctgaaatggcactaaacggaaccaatcatagcaaaaggtagaagtgagaggagttctcatcctgccgcagcaggatgagaaaaggctttatcagccgaggattttttccagttcggcgcgcacgtcagctaccgctttggtgccgtcgactttggcgtatttggtgttgcccgcctgcgcttctttggtgtagtagccgatcagcggcgctgtcatctgatggtattctaccagacgcttacgcacggtctcttcctgatcgtctttacgggtggtcagctcttcgccggtcacgtcgtctttgccttccaccttcggcggattgaatttgatgtggtatacgcgaccggatgccgcgtggacgcgacggccaacgatgcggtcgacgatcagttcgtccggcacgtcgaattccagcacgtaatcaacggtaatgcccgcctctttcatggcgtcagcctgcggaatggtccgcgggaagccgtccagcaggaagccgttacggcaatcttcctgggcgatacgctctttcaccagcgcgatgaccagctcatcggtcaccagcttgccagcgtccataatgtctttcgcttgcttaccgagctcagagccggattttaccgccgcgcgcagcatatcgccggtggagatttgcggaataccgtatttctccatgatgaactgagcctgagttcctttacccgcgcccggagcgccaagcagaataatacgcattacgaaaatcccctcaaaagtcgattcaatttttcaaaaacgctaaaccataccaccagaacggcgatggctcaaggaaggcggtgcggctgaaacggttaatggtgagatattttatgcaatccaatgtgaaatgccccgcctgagcacatcgctcagacggggcatttatcccgttcccggcgtcgcgtcgctcggccgggctactcgttcaggttcgcgtcaggaagccagcagctggttcatacggcggataaactggttcggatcttccagcgtgccgcgctcggccagcagcgcctgatccagcagcagttccacccattcgccgaactgggcgtcgtcctgggtatcggccgcgcgtttcaccagctgatgcgccgggttcagttcgaagatgtatttcacttccggcgccgcctggcccgctgccgcgaacagcttcgccatctgagtgctcatctcgtcggcgtcggtggtgacgatcgccggggtgtcggtcagacgatgggtcagacgcacctctttcacccggtcgccaagcaggtttttcacccgctcaacgaacggctccagcgctttttcggcttctttggtggactcgtccacttcatccgccagcttgtccagcgactcgtcggctttagcgacagactggaacgctttgccgtcgaactcggtcaggtagctcatcatccactcgtcgatgcgatcggagagcagcagaacttcaatccctttcttacgcagcagctcgaggtgcgggctgctcttcgccgccgcatagctgtcggcagtgatgtagtagatcttctcctgaccttctttcatccgcgagacatactcttccagcgacacggtctgcgcggaggagtcggtatgggtggttgcgaaacgcagcagtttggcgatcgcttcctggttgctcggatcttccgccgggccctctttcagcaccaggccgaactgtttccagaaggtttggtatttttcagcgtcgtctttcgccagcttatccagcatctgcagcgcgcgtttggtcagcgcggtgcgcaggttgcgggtcacgctgctgtcctgcaggatttcacgggagacgttcagcggcagatcgttggaatcgatcaggccgcgcacgaagcgcaggtagttcggcataaactgctcggcgtcgtccatgatgaacacacgctggacgtacagcttcaggccgtgtttatgatcgcggttccacatatcccacggcgcctgcgacgggatatacagcaggctggtgtactcctgcttaccttccacgcggttgtggctccaggtcagtgggtcgctgtagtcgtgagcgatatgcttataaaactctttgtattcgtcgtcgttaacttcggatttgctgcgggtccacagggcctgcgccttgttgattttttcccacgaaatcacggtttcgccgtctttctcttcccgtttttcaatctcaaccggcagcgcgatatggtcggaatacttgctgatgatagagcgcacgcgccagtcgttgaggaaatcatcttcgccttcgcgcagatgcagggtgatttcggtgccgcgatcggctttggtgatatcagctacggtatattcgccttcgccggcggattcccagaacacgccgttttccggcttgtcgcccgccgcacgggtacgcacggtcactttgtccgccacgatgaaggccgaatagaagccgacgccgaactgaccgatcagctggctatccttcgcctggtcagaacccatcgattcgaggaacgctttggtgccggatttggcgatggtgccgagatggtcgataacctcttcccggttcataccgataccgttatcggcgatggtcagggtgcggttgtctttatcaaacgaaacccgcacgcgcagctcgccgtctccctcatacaaatccggctgcgacagcgcgcggaaacgcagcttatcggccgcatcagaggcgttggaaatcagctcacgcagaaagatttctttgttggaatagagggaatggatcatcaggtgcagaagctgttttacttctgactgaaaaccacgagtttcttgtcctttcatctgattcaacctcaacaatgccattttaaatgggtaaaaaaccgttgagtgggagatggggacagcggggaaatttttcaagcggaggcggcgaaggccgcctccatttgttcagaaagtaatcttgtggcgaccggccagggagtgggacagcgtggtgccgtcgaccatctccagctcgccgcccaccggcacgccgtgggcgattcggctggcgtcgacgccatactgcgcgcacagctctgcgatgtagttggccgtcgcctcgccctcaacggtcgggttggtggcgaggatcacctcggtgatcgactccgcctccagccgttgctccaggcgatcgagcccgatgtcatcaggcccgatgccgtcgagcggcgacaggtgccccatcagcacgaagtagcggccggaatactgcccggtctgctcaatggcatagatgtccgccggactctctaccacgcagatctggccgttttcctggcgacgcgggttgctgcagatattgcacacctcctgctcggtgaaggtgcggcaatcggcgcagtggccgatctccgacatcgcacgcgtcagcgcctgcgccaggcgcatcccgccgctgcgatcgcgctgcagcagggtaaacgccatgcgctgcgctgacttcgggccgacgcccggcagacagcgcagcgcttccataagctgagttaacagcgggctggtttgcatcagaacggcatcttgaagcctggcggcagttgcataccggcagaaacggaagccatcttctctttctgggtctcttcgatacggcgcgcggcgtcgttgaacgcggcagccaccaggtcttcgagcatctctttgtcgtcttccagcaggcttgggtcgatctccacacggcggcagttgtgcgcgccgttaatggtcactttcaccagacccgcgccggattcgccggttacttccagctgagcgatctcttcctgcatcttctgcattttttcttgcatctgctgggcctgcttcatcaggttacccaggccgccttttccaccaaacataggcttctctctcagtcagtcatcgttaaaggtactgaatgccagtcagactggcattcaaatggggcgaatactctcttcatccagatcggcgtcgaagaaacgacgcagggtctgaatgttattatccgcgataatggcttcgcgcgcctgcgcgagcttctcttcataaatagcctgccgccactccagcggcgtacgcatcgcgggattatcgtcttccacgatggtcaattcaaccggcgtaccgtacaacacccccagcgcttcagccagcttttgctgcgcgctggcggaattgaggtggcgctggctgggacgcagatgcagacagacgcggctgccctcctgctctttccacgcgttgagcgccacctgctcgaccagcttcggtaccgccagctggctcacttccgccgcccagctgtcgcgctcgaccgcttcttcggcgagcttggccgccagctccggcgtcttctcatgctccagcgcctttttcagcgctttgggcgtggcgacttcgactttgctctcttccaccaccgtcgtcgccttccagcgataggcctctttcttcgccggggcctgctccagcgcggccgcggccggacgagcctggacgcgctcggtaatcgaactcagtcgctccagcgcagcgttattcaccggccgcgcgcgggaagcggctgccggttcactcttttttggggtggttgctccctgactgcgctgcaggtggctgcgggccgccagcacctggctggtggtcggcggcaaactctgcggcgactgtggcggcggcgcggcgggggcaaccggctgacgcggcgcgggcgcggcggcctgtgccggctgcacctccggctccggcagcggcttacgcggatgaaacgccagggcacgcagcagcgtcatttcgacgcccatccgccggtccggggcgtaaggcagctctttgcggccaatcagcagcgtttggtagtagagctgaacgtcgccgggcggtacggttcgcgccagttcgcgcatccgcacttcgaccgcggccatgtcggcgcccagcgccgaaggcgacagctgaaccatggcgatgcggtgcagcaggctctgcatctcgaccagcagcgcctcccactcgacgccgcgtgcggcggcgtcattgacgcccgccatgacccgctcgccgtcggcagcaaccagcgcttcaatcagcgacagcgcctgatcgtcatcaagggtgccgagcatggtgctcaccgatgcggccgtcagctgcccttccccactggcaatcgcctgatcggtcaggcttaaggcatcgcgcaggctgccatcggccgcccgcgacaacagctgcagcgcgcggggctcaaaggcaatctgctcttcgccaagaatatgctccagctgatggcggatctgttcaacgtccagcgccttcaggtggaactgcaggcagcgggataagatcgttaccggcagcttctgcggatccgttgtcgccagcaggaatttgacgtgcgccggcggctcctccagcgtttttaacaacgcgttgaagctgtgacgcgacagcatatggacttcgtcgatgagatagaccttaaagcggccgcgggccggcgcgtactggacgttgtccagcagatcgcgggtatcttcgactttggttcgcgaggcggcgtcaatctcaatcagatcgacaaagcgcccctgttcaatttcccggcagttatcgcacacgccgcagggggtggcggtgatgccggtttcacagtttaaccctttcgccagcagacgggcgatggaggtcttcccgaccccgcgggtaccggaaaaaagataagcgtgatgaatgcgccctaacgacaagccgttcgccagtgcggtcagcacatgttcctggccgacgacgtcagcaaaggtttgtgggcgccatttacgggctaagacctgataactcatgggctggctctgaaacgctggaaggtgaaatcacgaaggggtcatgctatcacagccccgcccgatcggcgaggctatgtggagggatttgcttagtggcccgggaacggcaccagacagtagcagtggatccccagcttctccaggcgctgttcgccgcccagatcgaagagattgataatgaaagcggcatcgtgcacttcgccaccgaggcggcggatcagtttgaccgtggcgtcgatagtgccgccggtcgccagcagatcgtcaaccaccagcactttatcgcccggtttaatggcgtcaacgtggatctccagctgatcggtgccatactccagctcataggtctcggcaatggtttcacgcggcaacttacgcggcttgcgtaccggaacaaagcccacgcccagcgccagcgcgaccggggcgccgaacaggaagccacgcgcctcagtccctaccactttggtaatacccgcgtctttgtagcgctcggtaagcagttcaatgctaagcgcgtaggccttcgggtcttccagtaagctggtgacatcgcggaaaagaatgccaggttttggataatcctcgatactctggatgctgttcttcagatattcaagctgctgtgcagttgcggtcataagtgtatgcctgattgaaacggtattacccacgggcgtgcaaaaggggccaaagaaacatttgtttaacctttgaccaggcttgcccgcgctcgaaaacgccagaatttactggctgtcggcaacaattgcaacaggcattattgcgcatcagtgcttttgttgctttgcgtcaaccaccggaatgcgccacataaagatcagcagacaggccagaatgaccaacagcatgatgcgcacccacgtaagcttaaccagccatagcgaaatagcaaaagtcaccacgatcatcgcaatggcgcgcggtttagcgccgcgaggcatggcgcggtactgttgccagtggcgaagatagccgccaaaccaggagcgatacagcagccactggtgaaagcgcggcgatgagcgggcaaagcaccaggcggcgagcagaataaacggcgtcgtcggcagcaacggtaagaagacgcccagcgtacccagcgctaccgccagccagccgataatggttaaaataacaggtggcataatgcgaatcgttatcaaacagatgaggctactgtagcacagttggctgacggaaaatggagggggttggtgaaaactgctcaacttttacaaacgctgaacgaccagctgagtgagctggccgcgctggtggcgccgctggcggagcacgcgaccctcagcccgcgctttgaccgccagctcttccacacccgcagcacgctgatgcaggcctatctggcggaagcccaacacaactttaaccagctccgccaggccgtcgagcgccagcagctgccgcaggtggtctggattgccgagcgtctggcggcacaaatcgccgcgctgcgccgtgaaaccgccacctggtccttgcgcagttgggaccacgcgtcgccaacgttgagccgctggcagcgccgtcgcctgcagcatcaggagtatgagcgccgcctgctggcgatgcgcgaccaacgccagcgtcagctggcgcaggcgaccagccttgacgagcagcagcggctggggaaagaagttgaagcctacagcggccggttggcgcgctgccgacaggcgctggacaagattgaaaacgtactggcgcggctgacgcgctaacaggagagcccgatgtcgctggaaaatgcatccgatgaggtcaaactggccgtcgatttaatcatgttgctggaatcgcatcagatcccggcgcaaaccgtgctgagcgcgctggaaattgtccggcgggattatgcaaacaagttaaaaaacgcggaaagcgggtcgcaaaacccagagaagtaggatgttgtctccggcagtgtgctggcagtctggtcctctgcgcatgacgccactggagacaatattgatggaaaaagtcagtcaaaccccacacgacgcggtgtttcgccagatgctcatgcatcaggcggtcgcgaaggattttttgcagttgtacctccccgcgccgtttctggcgatctgcgaactggattcgctgcagctggtctccggtagctttgttgaagaggacctgcgcgccagctattccgatatcctttactcactgcgcacgcgtcatggaccgggctatgtgtacgcgctgattgagcaccagagtaccccggacaagctgatggcgtttcgcctgctgcgctatgcgctggccgccatgcagcgtcatctggacgccggccacgacactctgccgctggtggtgccgattctgttttatcacggcaaagtgagcccctggccctgggcccgcaactggcaacagctattcgccgatccggcgctggcgaaggcgctctatagcaatgattttccactggtggacctcaccgtaatgccagataatcagatcgcccgtcatcggcggatggccatgctggagctgctgcaaaagcatatccgccatcgcgatctggccgagctgcaggtgccgctgattgcgctgatgacgcaaggctatctgacagaagcgcagctgaatacgctgctgcgctatatgttgcaggcgggaactacggaacatccgggggcgctgatccgcactctggcggcgcagtcgcccaggcataaggagctgatgatgaccattgccgaatggctggaagagaaaggccgtaaacagggacagcaagagggtgagcaggaagctacccgcagcatcgccgccagaatgctggcgcgcggcctcgaacgtcaaaccgtgcaggagctcaccgggctgagcgatgaagaactcgccgcgctggcgccctgatacagcaggggcggctttgcgccgcccctcttcgatcaggacgcggtggtgggcgccagatcgtcgcctttcccgtcccgtttcacttcggtgacttcatcgcctttttcattgcgcagatgaacttccagctggttaaaggcaatgttgatgtcattctcccggcacaggcggtcgatggcgcggttgagctcatctaccgtgtagctgcgatcgcgcagttctcgaacatacagacgcagttcatgatccagggtactggccccgaaggtggtgaagaaaaccgctggcgccggctcctgcatcactttcggatgatcgtgcgcggccttcagcagcacctctttcaccttatccaggtctgagccataggcgacgccgaggcggatcaccacccgggtcacggtgtcggagagcgaccagttgatcaagcgctcggtaacgaacgccttgttcgggataatcacctctttgcgatcgaagtcggtgatggtggtggcgcgaatacggattttgcttaccgtccccgagaaggttccgatagtgaccgtatccccaatgcgcaccggacgttcgaacagaatgattaggccggagacaaagttaccgaagatctcctgcagaccaaaacctaaaccaaccgacagcgcggccgccagccattgcagtttatcccaggagacacccagcgccccgaataccgtcatcgccccgatagcgataatcgcatagttgagaatggtggtgatggcgtaggaggtcccctgacgcatgttgagccgcgacagcaccagcacctccagcaaacccggcaggttgcggatcagcgcccaggcgaccattgacgccacaatggcgaacaacaaactgcccatcgtcacgctgcgcaccacgctggcccccgcctcggtaccgttgtagtgccagagggtaatgctgtcgaggtaggcgaaaacggtgatcaaatcagaccaaatcgcccagaacatcactgcgaacagcgcgaccatcaccaacatggtgatgcgcagcgtctgctggttgacctgctcgagagcgatagttggctcttcctgcggctcggcgccttccgccccttccttcaccagatgttgacggcgcgccagcgcgcggcgccaggcgatacgccgcgccgccacgctcaggccgcgcagcaccgtctggtacagcaggttccagatcatcaccagatacacggtctcgatccagcgtcccgccagacgcagcgtcgtgtagaagtagccggttgccgtcagcaccatcagggccaccggaacgatagacaacaccgtgatcgtcagcagacgcaggctgtgcgactctttatcgcgccagctttcccggcacatcggccaaaccagcaccgcgatcagcagtaagttgaagaaaatcaccaactgccccagcacgtcgtccatcaggttcagcggcgacagttcggaaatcaccgaccagaaattcagcggcagcagcgccaggctgacgcgaacaatctgccgccgccagtggctggtcaactgcgccggcatattaaagtggttgaccgcgacgccgttcttttccagcactttccagcacaggccaaacaccagccagaacatagccagctttttactgtacgcccacagcagtccgctaatatttaactgcatggtgagtaagatcagaccgatagccagaatcaacagcaccaccggtaaggcgcggatcagatcgatcaggatcgccttcggcgtatgcaactgggtatcgttgcgcagctgtcccacctgggaagcaagctttgcctgataatccttgagccactgcagacgccagcggatgaggccggcaatcaacagcagcggtaaaccggccaggaaagcgacaaacaccgcaggccacgctttttcccagttcacggtgattttcatcgccttaaactgacctttcagcgcctccgggaaggccttaatccactcccagtccatcggtttattgctgttcacccagaaaatttgctgggtcagaatttccttcagactgctcgagacgctcatcagctgctgctggttgatctgcaggttgatggccatcatcagctggttacccaactgtttgttgaactgatcaagcagttcgcgacgcatgtcgatcacttccagtagcgcggcgtggacttcatcgttcacttcgctgctgtgcccctcctccagtttggcgacaaaggcatcgctctggaacagcgcgtcgcgctgctggttcacctcaaactgttcaagccgcaggtcggcgatgcggttggtcatatcctgcagctcatccgccgacggtaatgtctgttgctgttggtaaagaatacgcgacagcagcaggctcccccgcagaactgaaatttgctctttaatatcccgttcagactgcagcgcgcggtcgagccagttcttgacctggatattgcgctgcaccagctggttaccgttctctgttgcctggatcagcttctcgctgagctgatggttaatatccagctcctgcttgaccagcgggttggcctgaatacgcgccgtttcgtcgggggtaaccgcctcctgggcggttttctcggtcagggtcagccgtttgctgttcacggcctcctgcagcagctgtagctgatgctccagccggttgctccaggcggtgacgtagtcacgctgcttctgcagggtatcctgcaggatagtgttgccttcgaggctcttgcgctgttgctcgatctgcgcgttgagcaatgcctgttgagcctgcaacagcacctgctgggtcgggcgtagggtctcgtcgcccaccgaggtgccattcagacgattgcggatctgctgcagctgctgggaggcgttgaacatcgcattttgcacgcgttccggctgcgtttgcagggaaaccagttggctgttataggtcgccagatcgttttgcgcattctgtagatcgtccagcgtctgggtgacgcgcgactccagctgacgcagggagagcgtacttagcgttttgcgcgtcgcgtcgtcgttcgggacatcgctcaggttattgaggctctccaccgcctggcgcagcttcgccggcgcctgctcgacctgctgtcgcagctgtgccgtctcgcttttgatacgctcgattttatccagcgtttccagcgtctgagtcagatcctgctggaccagtttgtcctgcggagtcagttctttttgcttgtttaacgtattgagctggctctgcacctctgcccgatcggggagatccgcggcgcggccctggactgggctgaaaaggccaataaaacagagcagcgtgataataaagatgaacgtggcgcgttgcctggagatcgtgtgcagcatagttaatatgaatgaatgcaaatgccggagaataccgggggtcgtcgcaagcgcgcagaatagcacttctcagcgctggcgaatagcggcggacggcgctaaaaattcacgcccatccgcgcgctacctttaagctgacaagctctccgggccgcgtagcgtcgggcagaattgatacatctccagcagaatagcgacgtagtcccgcgcttccgcatgcaggtcgaacgaatcgggggcaaacagccagttttccatcagcccggaaaggtagctgcgcattaacacggccgcccgccgggtgagtaaattggcgggcagcagcttcgccgcgatgcattctttcaaggtctgctcgatacgctcataactcgccagggagagctgccgctgggcctgctgcaccacggtcatttcaccgacgaactcacacttatgatagataatctccatcattaatcgtcgacgttcttctgtcactgtcgcttcaagaacatagactagaatctccctgataactgagagtggatcgttggggaattttgcccgatactcaatttcgagatcgctaatactggcgtctgacagctcccaaatttcgttgaataaatctgatttattcttgaaatgccagtagatagcccccctcgttacacccgcagcttttgcaattgttgccaacgaggtagatgatacgccttgctgcgaaaacagacgcagagcaacatccagaatcagttgccgggtttcacgtgcctgttgtttggtttttcgtgccataggttaatgactttacagaggttacgtttacatacatttgtgaatgtatgtaccatagcatgaccataatagaaagactgtagtgggtttgtggttgtttgagccactgaacattttgaaattggacactcgaggtttacatatgaacaaaaacagagggttaacgcctctggcggtcgttctgatgctctcaggcagcttagcgctaacaggatgtgacgataaaccggctcaacagggagcccagcacatgccggaagtcggtattgtgacgctcaaatccgcacctctacaaataaccaccgaactgccaggccgcaccagcgcctatcgcattgcggaagtccgtcctcaggtcagtggcattattttaaaacgtaacttcgtggaaggtagcgatatccaggccggcgtctccctgtatcagatcgatccagccacctatcaggccagctatgacagcgccaaaggcgacctggcaaaagcccaggcggcggcaaacatggatcaactgacggtcaagcgttatcagaaactgttgggcaccaaatatattagtcaacaagactacgataccgccgttgcgacggcgcagcagagcaatgcggccgtggtcgcggcgaaagcggccgttgaaaccgcgcgcatcaatctggcctacaccaaagtcacctcgccgatcagcggccggattggtaaatccgccgtgaccgaaggggcgctggtacagaatggtcaaacgaccgccctggcaaccgttcagcagctggatccgatctatgttgacgtcacccagtcgagcaatgatttcctgcgcctgaagcaggagctagccgacggccgcctgaaacaggaaaacggcaaagcgaaagtggagctggtgactaatgacggtcttaagtatccgcagtccggcacgctggaattctcggatgtcaccgtcgatcagaccaccggctcaatcacgctacgcgctattttcccgaacccggatcacaccctgctaccggggatgttcgtccgtgcccgtctggaagaagggattaaccctgacgccctgctggtaccgcaacagggtgttacccgtacgccgcgcggcgacgccagcgtcatggtagtgggggaaggcgataaagtcgaagtccgccaggtcactgcttctcaggcgatcggcgataaatggctggtcactgacggtctgaaatccggcgatcgcgttatcgtcaccggcctgcaaaaaatcaaaccaggtgtgcaggtaaaagcgcaggaagtagcttctgatgataaacagcaagccgcaggcaacgcgccatcagaacaaaccaagtcttaacttaaacaggagccgttaagacatgcctaatttctttatcgatcgccccatatttgcatgggtgatcgccattatcatcatgctggctgggggattatcgatcctcaaattgccggtggcgcaatatccgacgattgcgccgccagcaatttccattaccgccatgtaccccggtgctgacgccgaaacggtgcagaacaccgtaactcaggttatcgaacagaatatgaacggtatcgatcacctgatgtacatgtcctcaaatggcgactccaccggtacggcaaccattacgctgaccttcgaatccggtaccgatccggatatcgcccaggttcaggttcagaacaagctggcgctggcgacgcctctgctgccgcaagaagtacagcagcaagggattagcgttgagaaagcgtccagcagcttcctgatggttgtcggcgtcattaacaccaacggcaccatgaaccaggacgatatttcggactacgtggcggccaacatgaaggatccgattagccgtaccagcggcgtcggcgacgttcagctattcggttcccagtatgcgatgcgtatttggatggatccaaacaaactgaacaacttccagcttacgccggtggatgtgatcagcgccctgaaagcgcagaacgcccaggtggccgcgggccagttaggcggtacgccgccggtgaaaggccagcagcttaacgcctcgatcatcgcgcagacgcgtctgaccaatacggaagagtttggcaacatcctgctgaaggtgaaccaggacggttcccaggttcgtctgcgtgatgtcgccaaaattgagctgggcggcgaaagctatgacgtagtggcgaagtttaacggccagccggcatccggtctgggtattaaactggctaccggcgcgaacgcgctggataccgccaacgctattcgcgctgaactggcgaagatggagccgtttttcccgtcggggatgaagatcgtttacccgtatgacaccaccccgttcgtgaaaatttctattcacgaagtggttaaaacgctggtggaagcgatcatcctggtgttcctggtcatgtatctgttcctgcagaacttccgcgccaccctgatccccaccatcgcggtaccggtggtcctgttaggcaccttcgcggtgctggcggcgtttggcttctcgataaacaccctgacgatgttcgggatggtgctcgccatcggcctgttggtggatgacgccatcgtggtggtagagaacgtcgagcgcgtgatggcggaagagggtctgccgccgaaagaagcgacgcgtaaatcgatgggacagattcagggcgcgctggtaggtatcgctatggtgctgtcggcggtatttatcccgatggcgttcttcggcggctcaaccggggccatctatcgccagttctccatcactatcgtttccgcgatggcgctgtcggtactggtggcgttaatcctgacgccggcgctgtgcgccacgatgctgaaacccattcagaaaggcagccatggcgcgaccaccggcttcttcggctggtttaaccgcatgtttgataagagcacgcaccattacaccgacagcgtaggcaacattctgcgcagcaccggtcgttatctggtgctgtatctgatcatcgtggtgggtatggcatggctgttcgtccgtctaccgagctcgttcctgccggacgaggaccagggtgtattcctgagtatggcgcagctgcctgccggcgccacccaggagcgtacgcagaaagtgctggatgagatgacgaattactatctcaccaaagagaaggataacgtggaatccgtgtttgcggttaacggcttcggtttcgccggccgcggccagaacaccggtatcgcgttcgtttcgctgaaagactggagccagcgtccgggtgaggaaaacaaagttgaagcgatcaccgcgagagcaatgggctacttctcgcagattaaagatgcgatggtcttcgcctttaacctgccggctatcgttgaactgggtaccgcgaccggctttgacttcgagctgattgaccagggcggtctgggccacgaaaaactgacccaggcgcgtaatcaactgtttggcatggtggcgcagcatcctgacgtgctgaccggcgtgcgccctaacggtctggaagatacaccgcagtttaaaatcgatatcgatcaggagaaagctcaggcgctgggcgtctccatcagcgacattaacaccacgctgggcgcagcctggggcggaagctatgtcaacgactttatcgaccgcggccgcgtgaagaaagtgtacatcatgtccgaagcgaaataccgtatgctgccggaagatatcggcaagtggtatgttcgcggcagcgatggtcagatggtgccgttctctgctttctcgacctcgcgttgggaatacggttcgccgcgtctggaacgctacaacggtctgccgtcactggaaatcctcggtcaggccgcgccaggcaagagtaccggtgaggcgatggcgctgatggaagagctggcgggtaaactgccttccggtatcggctacgactggaccgggatgtcttatcaggagcgactgtccggcaaccaggcccctgccctgtatgccatctcgctgattgtcgtcttcctgtgtctggcggcgctgtatgagagctggtcgattccgttctcggttatgctggtcgtccccttgggtgtggttggtgcgctgttagccgccaccttccgcgggctaaccaacgacgtttacttccaggtgggtctgctgaccaccatcggcctgtcggcgaagaacgcaatattgatcgttgaattcgccaaagacctgatggagaaagagggcaaagggctgattgaggcgacgcttgaagcagtacgtatgcgtctacgtccaatcctgatgacatctctggcgttcatcctcggggtaatgccgctagttatcagctccggcgccggctccggtgcgcagaacgccgtcggtacaggcgtaatgggcgggatggtgaccgcgacgatcctggcgatcttcttcgtgccggtgttctttgtggtggttcgtcgccgctttagcaaaaaatcggaagatatagagcacagccatcaggttgagcatcattaatcttcactcctgaacaaagggccgctaccgcggcccttttttatcactggctggcaaggcacatattgccattgtttatttttcgttctgcatttaatatatattgatatggcgcaggctatttttagcagcttgttcaacaactcgggatcggcaaacactcatttaccaggaataatcctactatcattatccacgggtcggcggtttctgaacgcgacagctgcctgccttaaaccaatgattcataagatttctctatttctccggctgtgggccagcgcctgcgaaattaattcgtctatttttaagataatttctcgctgataattgtaatttttcgtaatagcacgatgaaatctgttggagagtggattatagttaaatcagcaggattactcagttagtgtcaggtcagttagtcgtgttcatcccacaacggtgtttgctagtcgtcgtttaaaccactcaaaaggggatgcgttatggacgaatactcgccaaaaagacatgatattgcacagctacgctttctctgcgaaacgctgtatcatgactgccttgcaaacctggaagagagcaaccatggctgggtcaacgacccgacgtcggctgtcaatctccagttaaatgaattgatcgagcacattgccacattcgctcttaattataaaattaagtatgcagaggataataagctgatcgctcaggttgacgaatatctggacgacacttttacgttgttcagtaactacggcattaactctacggatttgcaaaagtggaaaaaatccggtaaccgactatttcgttgctttgtcaacgccagccgggaaaacccggccagtctatcgtgttagaattattacaatcaaaaggtggaattatgtctgataagccattaactaaaacagactatttgatgcgcttacgtcgttgccagacaattgacacgctggagcgcgtcattgaaaaaaataaatatgaactgtctgataatgagctggcggtattttactcagctgccgaccatcgtctggcggaactgaccatgaataagctatacgataaaatcccgacttctgtctggaaatttatccgctaatttacgcgtattacgtggtctgctggccggacggtacgggtcagccgccatagggtatctttgtgatagacatcacatcattcagccaacagcaaccctgtaaccggtttcttttttatactgctacggccatcaacagtcaggtataaggaagacccatgagtgaagaaaaacgcaaaatgatcgccggtgagctctatttatctggcgacccaacgcttcgcgccgatcgcctgcgcgccagacagttgttgcaccgttataatcattccgccccggatgaccaggaacaacgtcagcatattctggccgagctgttcgctcgcgccggcgatgcgtatatcgagccaagctttcgctgcgactatggttataatatttttctcggcgccggtttttacgccaattttgactgcgtgatgctcgacgtctgccctatccatattggcgataactgtatgctggcgccaggcgtccatatttataccgccactcatccgctggacgccgatgcgcgtaatagcggccaggaatacggcaagccggtaactattggccacaatgtgtggattgggggtcgggcagtgatcaatcccggcgtgaccattggcgataatgcggtcattgcgtccggcgcggtagtcaccaaagacgtacctgcctgtaccgtcgtcggcggtaacccggcgcagatcattaagcgccttccgccgacaaatccgtaactgttatgcttttctgtaactgatctgttactttctccgcagaatattgcaacataaaatagccttcaggctgagcctgccgcgcctggtccgccgggcgcggcaggctcattgcagaattcgaggaccaagatgacagaaatacaacgcctgctgattcacaccattgacgaactcaacgtccaggaaaaacgcgataatcgcccgcgttttagcatcagttttatccgcaaccatccgggactgtttgttgccatgtatgccgcgtttctggcgacgctggtggtcatgctgcgctctgaaacgctggtagactcggtctggttgctggtggtgctgttcattctgttcaacgcctttttcttctttgacgtctatccacgctatcgctacgaggatatcgatgtcctcgactttcgcgtgtgctacaacggggaatggtacaacacccgctttgtcccccggcagctgatcgaccgtatcctgcagtcgccagacgtcgatagcgagcagaaggcgcagctcaaaaagatggtcgccaccaaaggcgagctctccttctacgatgtctttaccctcacgcgcgccggtgctgcgcaataaggcgatttagggtccgcagcgccgggagatagcgagaagcagaggtattgccatacccaagcaccagtccgctccgcgctcgctgcgggtcgagatagaaatgacttaacgcggcgggcgccagctgaaactggcgcgcctgctgcgcaagcgtccggtcattaacgccctccatcgccaccgtcaggtgcatcccccctcccccgccgagaacgtcgcacggcacggttatctcttgcgccagcgcctcgcgcagctgttgctgacgtttacggtacaggcggcgcatcgctgccagatggcgcgcatagtgtcccttctcgataaagctggccagcgcccgctgttcagcacggtgtcccccgcgcagcagcgcgccaatggcgtcctgagcagcatccgccagcgcgggcggcataaccataaaaccgatacgcaacgctggaaacagcgttttgctgaaggtgccgagatagaccaccggggcatcaggcaccattcccagcatcgccgggatcggttctccgctatggcgaaactcgctgtcgtagtcatcctccacaatccacgccccgtgccggcgggcatattccacgagcgccagacggcgcccggcgctcatgatgctcccacagggatactggtgtgaaggagaggtgaaaatgagccggggcggctccgcgacgccgttggcaatacacatcccttcatcgtcgacagccattcctctgacccgcagccccgcccgctggaagccactcctcgcccccaggtaccccggttcttccagccacacgctgtcgcccgggttggtcagtagcgaggcgcataagttgacgccttccagcgcgccttcggtaatgacgatctgccggatatcgcaccggatgccccgggagagcgccagatgacgagcgatagcctctcgcagcaaaggatcgcccgcggcttcgccataacccagcagcgcgctaccatcttcgcgtagcacgttatccatcagtcgccgccacagcggcagcgggaaatagtttaccgccggcatgcctggcgtaaatgccagcgtcggtgagtcgcggcgcatcgcggctggcagcctttgcagccgctcaggaagcacgacgggcggcatctgacccgcctcctggcggcaggaggcgagtggtgccacctgcgttccctgacggctccgtgtcaggtacccctccagcgccagctgttccagtgcggcattgaccgtattccgcgacaggtgtagccgttcggccatcacccgcgatccgggtaaacggcagcgggccgtcagggttccctgcaggatagcgtcacgtaaggtgtggtaaagggcgcgctgtaaggtttcgaccgtgcggttccgcatcccctgcgtcaacagcgtaaaaaacccctcgtccggtatattcatattgcctcctcgtggccccataaaaacatactctaatggcactttttatggaaccagcgagcgcgtacgctgcctgtaaatccccaataaggaaaccgcaatgtgcgaatataatcagtttggccaggcgctcggcgtcgcgctgcctgactggcagccgcgcccctggccgacacgacaggtattacagggcagccgttgtcgactcgaaccgctgactcttgctcatgccagcgatctgttcgccgctcaccagctggcgccagacgcccgcagctggacgtggctgctgcgtgaacctgagaacaaccttgcagaattcagtgcctgggtggagcaggtcgccacgctggcagacccgattcattttgccgtcgttgaccagcagcgagggaaagcggtcggctcgctggcgttaatgcgtatcgatatcgctcacggtgtggtagaggtggggcatgtgcatttttcaccgttactgagccgaacggccatggccaccgaagcgcactggctgttgatgcagtatgtctttgatacgctcggctaccgtcgctatgaatggaaatgcaacagtcttaatatcccatcagcccgggcggcaaggcggctggggtttcagtacgaaggacgttttcgccaggcgctggtgagtaaaggacacaaccgggacacggactggttttcggtgatagacggcgaatggccggagctggataacgccatgcgccaatggctggccgccgacaattttaccgccgacggccaacagcgccgctcgctggagagtttccgttaacggcgttttttgcgcccctgcaccgctttgaagcgggggttgctcttacagataacgtacagccgccctttgcgtttaaccagctggcaatccgggtggcgctgtttagcgctacgtaatgagttgacgacctgcatcatgctttccttttcgcatcaataaagccgccgaagcgctggcggaatcgggctgcactgccttcattggcgaaggttttttgtttgcccgtgtagtacggatgcgatttcgaggagacgtcgatcgtcacatacggaaaagtttcgccatcgagttcaatcacgcgatcggtgcggatagttgagccgactttaaaatactcattcgcgctggtgtcgtgaaacaccaccgtacgatagggaggatggatatgggctttcatgatgacctctttattacgttataacataacaataaggttacgccctgctgtgacaaagatcaaccctgctcaatttaagggtaaggtgataaggcgagtttccccgcctttggcgtcagggtgccagacggtgggcgatggcgcggagctgttccgcaatggcctgtagatcttttccctgctcgattcgggcgccgctggaatggcgtatcaccaggcgcgccggcagaatggatgaggtatgaggcgccccgctggtgctggcgaggatccgccgcaccgcctctttcccctgcaggtcgaggtcgagcgacacggtactcagcgccggatagaaaaaggagctttcgtaggtatcgtcatagccaataaccgacttctcacccggcaccgccacctgatgctgatggaaggcgctgagcacccccagcgccatctgatcattacccaccagcacagcgctgaaattaggcgtttcgcgcagcatctgcagcgcgccggcgtagccgctctgcgcatcccagttgccgtgcaggacggtcaccggcttcagaccgtaaccatccagggtctccagccagctttttaaccggagtttggccgagactgagctgtccggccccgccagcagggcgatctcccgatgccccatctcatagagatatttgacgctggcccgggtgccgtccgccgggttaaacgaaacgttaaacacggagctgtagggatcaacgtcgagaaacaggcagacgatatcatcgttgtcagcagcgattttctgcgcctgttcggtctccagcggcacgttgataatgactttatccacccgctgagatttcagctcattgatggaatcctggatgctttggttgacgctctcatcgatcatcgaaatcagaacctggtaaccttccaggttggcatagcgttttaccgctgccgccacctgggaaggcgcatgccaggccagagaaatagtcaccagcccgaccgtctggctctccttccccaccagctgctgcgccagccggtttggcacatagcgtaaggcctctatcgatttctccaccttgcgacgcgtcgcttcggatacattagctgatttgttgagtaccctggacacggtctggtaagagacgcccgcatggcgtgcgacgtcttccagagtagcgcttttagacttcatggtccggttccttatgttgttatcccatgattgtaacaggggccatttgaaaaaacgctcaccgccacctctcactgcaaaacaatagcgataaaagtattacgttcacaatacaacgaattgtgaatcatctcacccatcgcaacaaaaaccaccgtgattatttgcagttagtcacacaataatcatatctcatttgcctgaagttacatttaggcattttatgacaccagttatgtgaacgtaatacaaaacaataagaggatagagatgaacactacactgcgcgccctttcagtcgcgttagccgctgcgctaatcgctccttccgcgtttgcggccaccgccgcgatcccaacgatcgatttccatggctatatgcgcgccggggttggggtctccggcgacggtagcgaagcggaatggcaaaaaaataagctgggccgtttggggaacgagtcggatacctacggcgagctggagctgggctctgaggtctataagaaagatgacgtcagcttctatctcgacagtatggtcagcatggtctccgacggctctaacgataatgaaaccacgctgaacgatgatgcacagttcggcttacgtcagttgaacctgcagataaaggggctgatccctggcgatccgaatgcggtgatctggggcggtaaacgttactaccagcgccatgatctgcatatcatcgataccaaatactggaacatttccggctccggagccggggtggaaaactacaccctcggcccgggcgccgtctcgctggcctggatccgcggcgatgccaacgatgttgactatcgcgtcgatggcgacagcaacgtcaatatcaactatatcgatttacgctacgcgggctggaagccatgggcgggctcgtggaccgaattcggtatcgactacgcgatgccaaacaccaccaaaaaacaggatagctacggcggactgtacgatgctgacaacggcgtcatgctgaccggtgaaatcagtcaggatatgctgggcggctataacaaaaccgtgctgcagtacgccaacaaaggcctggcgcagaacatggtctcccagggcggcggctggtacgatatgtggaactacgtgaacgacgccaccggttatcgcgtgattaacaccggcctgatcccgattacagagaagttttctatcaaccacgttctgacctggggctcggcggatgacattaccgactataccgacaaaacgcggatgctgtcgctggtcgcccgcgggcagtaccagttcaccgactacgtgcgcctgattggcgaagtcggcggtttctatcagaaagacagctacaacaatggcaccagctacaaacaggccggtgagaaatacaccattgcgttgggcctggcggacgggccagactttatgtcacgtccggaattacgcatttttgcttcatatttgaatgattccgaagatggtaaaccgtttgaagaccagacggcgaataatacctggaatttcggcgtgcaggttgaggcctggtggtaatcgcgcacggctaagactcatacgttatttttatctcctgctgtaagactgttaattatcttccggtaaactttattgccactgctgtctttgtcttattttcgggataacctgctttcaggttatcccgttttatttatttccgggcggcaaaatgttcatccagaagctgacgcagcgcatcggactgtttaccgaaaatagcatgcacctgctgaccaagaataataacccctagcgcgccctgctgctgtaatgcttcggagtccacggccgcaagatggcgaacgctaacccgcagacgggtaatacaggcgtccacttgcgtaatattcgcttcgccaccaaaggcctgaataagcgcctcgatttgctgtttttccgcctcgcttaatggctgtgccggacgcgctggggagaaatagtgcaggaaggattttaaactcaccataataaactccaggtttaagataaaaaaaagcctgctcgtcagagcaggcgtggagaagaagaaattacgcgtgacgacggagaatacggcaatcccatgccgacagggtcagaggagccgataccgccgcgtcggtcaggcaatcccaatacccttgcggcagggtcagggtatggttttgcgcgctgtagttctgcaggaagataaatgcgttgtcaccgtcggtgcgcgcagtcgccaccacgccgggtggtaactccgtcgctatcgcccgcggcagggccagctccttgctcagggcggtaaagaaatcgcgctggaaggctaaatcgttgcgggaggccacatgccaggctttgcctttcccgaacgcgttcaccgtcacagccggccgtccggcataaaaatcatcccggtaggtggccagcgcctgggcgctctcgatatggatcagttcgcagagatggcgcacctgataagggccctgcagaccgcactgattcccggcaagcccctgcaccagattaaactcgccgtcattcaggcagtcgatctcttccgcccagatccccagcagattgcgcagcgggcccgggaagccgccgagatagcagagatcggactcattgacgataccggtccagtaggtggtcaccaggtggccgccgttggcgacaaacgcctccgcccgaccggcaaagccgtcgcgcaccatatataacatcggggcaatcactaactgatacggcgttaaatcgacatcggcgtcaatcacatcgacggcgatgccctgctcccagaacgggcggtagtgctcgttgaccgtcttctcatattccatcccaagattgcgcggcccctgggcgtcatccagcgcccagcggttctgctggtcgaagataatcgctactttcgcctcggtgcgacagcccctcacctccggcagcttgctgaggatctcgccgagctggcagacttcgcggccaatgcgggtatcaatatgtccgacgtggtcgaccactgcgccgtgaaatttctcaaccgaaccgcggcttttccgccactggaaatactgcaccgagtcggcgccatgcgccaccgcctgcagcgaggaaagaatatgcattcccggcttcttcagtttgctggtcggctgccagttggtggcgcccggggtggactccatcagcacaaacggtttgccgcccttcaggctgcgcatcatgtcgtgatacatcgcggtgtaacaggccagcgcggtttcgtctttatcgcggtgccacatcggatagctgtcccaggagatgaaatccagcgcctccgccagctgccagtagtcgtaatcgtagaaatactccataaagttggtagtcaccggcagggaggcattcgccgccttcagcggagcaatttcatggcggcagaaatcagtcacctgagcggtgttaaagcgatgccagtcaagattgagaccgtggatcgacatctcgccctgcggcgcaggcgattcaatctgcgaccagtcagtataggtatgactccagaaggtgctccaccaggcctggttgaggttctccagggtctggtaacgcgccttcagccagtcgcgaaaacggttctggcagagatcgcaatggcattcaccgccatattcgttggaaatatgccagcccagcaccgccgggtgtgaggaataacgttctgccagcagggtattgatttgcagggttttctcgcgatagaccggtgacgacatacagtggttgtgacggccgccgtgcagggccggcacccgatcgcgccccacccgcagaacctgcggatagcgctgcgacatccacgccggacgcgcgccgctcggcgtggccagaaagacatgaatgccggcggcatacagtttatcgaggataatatccagccaggcgaaattaaataccccttcgcgtggctccagtttcgcccagctaaatattcccaccgacatcacattgcattttgcctgctgcatcatggcaatgtctttatcaataatatcggggtcattctcccattgctccggattataatccgcgccatgcagcagcgtactaaccttcggatgtaaaggtgcaaatttattcataataaacttcctgaaaaagacgacaaaaaattaattaaaaacttttaccgacggcaatacttttccctggcaatcaaatagcgcctgattttcacgtgcattaccctctttccactcgtcgtggatatatttcatccccgccggggtggcccaggtatttcccggcacggcaatccatgtaggctcccaatagaaaatacctttgccacgctggtctggcacatcaaccaccgcctgcattaaatcgtgaatatagttatattgcccctgtacgctggcgggatatcccccatccttttcctcttttgcctggaaactattttccgcgttatcgcagttggccagggtataggcataggccgcctcgacgacgatgacgtctttgttatagcgtttgctgatgtcatccatattggccttcagggcgctgatcgggccattccagtaggtgtacatcgacagaccaatcacgtcatacggtacatggcgcttgtcgatctcatcaaaccaccagcggaaggtatcgttcttggtcccttcggccagatgcagcatgattttcacctgctcgccctggcgcaggttctccttcaggccagcgatagccgcgttcagcaggccagccagccggtcgaactcgccgcccccctgcccccagcttttcccttccggccacaggatgccgccgttgatttcgttgccgatctgcaccatatccggcaggacgcctgcctgcttaaagcgggcgatggtatcgcgggtatagtcatgaatcgccgttttcagctgcggataatccatcttttcccaggctttcggcttgaactgcttgccgggatcggtccagaaatcgctgtaatgaaaatcgagcagcagtttcatcccctgggctttcgcccgtttcgcgagggtcagggtggtggccaggtcgttatttccgccgccatagccctcaccgctcgccgattgcggatccacccacagacggaggcgaacatagttgacgccgttctctttcagaatagcgatcggatccttgcgctgattattctgatcgtagaacgtcgccccgtgcttttcggcgtccagcagcgtggagatatccgcgcctttgataaagtccgccggcatgccctgaaacgcgcgggttgcaagcgcgtccgcggccagagaagaggtggagaaactgcatgccagacaaaccgcaagccatgcgggtgtgaatcttttcatgtgcttatcctttagtactgcccgaggtcaggccggacacgaagtatttttgtagcgccaggtagaggatcgccaccggtacggcgatcagcaccgcccccgccgcgtaggtggtgtagctggcacccattttttgcgccaccaggttatacagaccgataggcagcgtgtatttatccggggtacgcaggatggtgctggagaggatgaaatcccccagcggcccagtgaacgagaacagcgccaccaccgcgaggatgggcctcgacaacggcatgatgatctcgataaagatgcgaaagctgctggcgccatccatgcgggcggactcatccagatctttggggatcgcgtcgagataccccttcatcagccaggtattcatcgggatcatccccccgacgtagatcagcaccagcgccaaatggctgttaatcaggccaagcagttgcgacaggacaaagatggcaatcagcgcggaaaactgtgggatcatctgcagcagcaggaacagcatcagcccgttctgccgccctttaaagcggaagcgggagaaggcgtaagcggtaaagctaacgctaatcagggtcagcaccatagtcaggaagctgattttcatcgagttccagtaccaggtgaggtaattcacattgccattgaacagatcggcatagtgctggaacgacacattttccggaatgattgaggtactgagcaggctattgccggcgttcagcgacgccccgaccgtccagaccagcggatagataatcaccactgagaccagaataaccaccagccaggtgagagagagccggatccacttttcgcgtttaatactgggtgattgagccatgttgcttcccttacgccatgtcgtcatttttgaaggatttggtggcgcggaactgccacagcgccaggccgacgacaaagatcgacagcaggatcgtgatggtcgccgcgatggcgtactgcgacgaagacatcgtcagcttatagatccacgacaccagaatatccgtcccgccggcgttagagcctgccaccgcagggccgccgttgttgaacaggtaaatgatattgaagttattaaagttgaaggtgtactgggtgatgatgatcggcgcgatcgcatacagcaccagcggcagggtgatggtgcgcagacgggtaaaggcgctggcgccgtccatcgtcgccgcttcatacagatcgtccgggatcgcctgcaacacgccggtggtcatggcaaagacaaacgggaagccaagccaggtctgcatcatgatcagcgccgttttggtccagaacggatcggtgagccatgccttcggactgatgccaaaaaaggacaggatcgcgttgttgatgaccccgaaggagtcgttgaacataccggcaaaaacgagaatggtgacaaaccccggcaccgcccacggcaaaataaagatggtgcggatcagcggcttaaagcgcagatctttttggttcaccagaatcgccaacaacacgcccaccgtacactgcagggtggtcgccagcagcgtccacaccacggtccactgcagcacatccaggaaagtggagcgccagatggagagggtgaaaatattaataaagtttttcagccccacccagtccaccagcttcgccggcggggtgtggtacaggttgtagttggtgaaggcgatggcgaaaccgaacagaatcggaaagatcaccacaaacaccagcagaataaagcccggggtgatcatcaggtacggaaagccgtcgctcagcagcatctggtactgcttacgcacgctgttgagggcgatcccctcatcgcgttttttgccgttgagccacgcatcccgcagcgagagaaaatagatcagcacgccgaaagcgacgatcagcacgctgataatcccctcggctaacaggaagatagagttatcccgcggtacctcttcacccagggtatataacccccacaacccctcacgcaggaaatcataaaaaatccccataaagctgctcagcagcaccaggaagaccagccctttcagccactggcgatgataaaactgaccgaaacccggcacgattgccagcagcaggccgcaccatgcatggcgcccgggcccgcgtgcgtcgctaaaattttcgctggaatggatgctcacactcgactccttctacaaacgggaggtccccctcccgctcggtgacttcacgtgacggtgaattactgattgctggcctgcatcgcttcgatctgcatcgtgatctgtttcaccgcgttatcgagcgcggcctgcggcgcctgcttaccggtgaggctcagttcaagcgcggcgttggccggcccccacacttcccccatctcgggaatgcccggcatcgccaccgctcgcgccgactggatggcgacggcgctggccttttggtcgtttttaatcaccggatcgtcaatcatcgccttcagcggcggaatttcgccagtggcgacatagcgggctttcacatactgcggctggttgatgaactcgataaactgttgcgccagcgctttgtctttactccaggtcgatactacatagcctttgacgccgaggaaggagctcatcggcttgccgtccggcagggtcggcaggggcgccacgccatagttaatgccagcggcttcatacggctggaaagcccaggggccgttgatcaccgccgccgcttttttctcggtaaacagggaatcgatggcattcagcccgttatcgccgaggatccccgccggaaagaccttctcggcatagaattttttcaggaaggtgacggcttcgacggcgccgggggtattgagacccacctgctgcgggttaaagccgccgctgtcgtttttagcaaagatatagccgcccatcgggccaatcgccccccagctgtaatagatctggtcaaacttggcgagcaggccgtatttgttctgctcgcgctgggttttcgagtagtccagccaggcctgcaggctgtccagcggcttgtcgatcaggtccttgttgtagataagcaccagggtttccaccgccttcgggatcccatacagcgcgttgtccatgcggaaggcattgatggaggctggcgtaaaggcatcctgtttcgcctgatcgacgctgagcggcgagagtagtccctgaaccacggcgccgccgagctggtcattcgggatcaccagcacgtccggcccaatgcccgccgggccgtcgaggcgcagtttttccagttgctgggcgtagggcatctcctggagattgaccttcacgttgtactgcttttcaaaatcgctaaccgcggttttgatgccagcggattttttaatgtcctcccagacgttgagctgcccggcggcatgcgcctgcaggctggcgagttgtcccgccgccagggtggtaaggatcagtgcagcaagcgtgttctttttcattatcaacctcatgtgaaggtataacaatttaatggtttttatttgaattccgtctgccagttagaaaaataaatcttttcaaactgccgtattatttggaaaacatgttctgatgcgcttttgttatacgctacgctttgatcgttgataaaactaccataagctgccagttgtgtgatcatccttgcagaaatgaaacgtccctgtatggcgcaaaatccgcggaagttatagtcagggcatgattttactgctgttgaacatcgtcacaccgatttgttacacgtaatacaaatcacactcaacatagcgataagccaacggcaaataacagctactcactccggggaatgtggatgtccaatatacgactgaggaatgtcaccaaaaggttcggcagcacggtgacgctgcaccaggtcaatctcgatattgaagatggcgagtttgccgtcttcgtcggcccttccggttgtggaaaatcgacgctactgcgcatgattgccgggctggaagaggtcagcgaaggagaagtactgatcggcgatgaggtgatgaatgatgtcgtgcccgcccgccgcggcgtggcgatggtcttccagtcctatgcgctctatccgcacatgacggtggcagagaacatgggctacgggctgaaggtgaataaagtgccgaaaacggagatccgtcgccaggtggaaatggtggctaaaacgctgcagctctcgcacctgctggatcgtaaaccgaagcagctctctggcggccagcggcagcgcgtggccattggccgggcgatcgtgcgtaatccccgggtatttatgttcgatgagccgctctctaaccttgatgcggagctgcgcgtcgatatgcgcctgcatattgcccgtctgcaccaggagctgaagaccactatggtgtatgtcacgcacgatcaggtggaggcgatgacgctggccgataaaatcgtggtcatgaactacgggaaagtcgaacaaatgggttcgccgatggcgctgtactacaatccggtcaacaaattcgtcgccggctttatcggctcgccgaagatgaactttctgccggctatcgtcagcgactggcagccggaacgcttaacggtcaccctcgcgcaggaccatcagctggccctgaatatcgccacccagccgctgaagcccggcgctgcggtgacgctggggatccggccggagcacctcaccccggaaatcaccaccggtaccgtggtggagtttcaatgtgaagtggtggagcgtctgggcaacaatacctatctgttcggccagtgctacggccacgacaacgtcaaggttctgctgcccggcgacgtccatttccgcccctggcagaaaattaatctggctttcgatgagcgcttctgcatggtgtttgatgagaacgacctgcgcatcagcgctgatatcccggcaccggatgcacactagctaacatattgctgtcatctgcgcagcgtatgctgcgactgaatgccggaacacaccctgcccggcattcacaccctcatttttattctgctacatcggaatcatccttctctcccggcatcgcagcctattgtgatgccggctttttccccaaacgacgcgttttctcccgctgcgcccgaattatctttcgcatatactgatgacacccggcgaacgataaggacacaggcatgaggacccggcatctgatggcgctgtttacaggagtgctgatactggccatcatcctgcccatttcactcagcatctggcaggcggcgcggcaggccaaaatgcagttctatcgtgaactggatgactattccaaccgtatcgtcgttcggacgctgcaggttgccgaccaggcccgggaagcgttacgagaggctgacgcacacaccgccgcctcctgtagccctgaacatctgcttacgctccgccgcatcgcctatacccatcgctacattcaggaagtgctctggctgcgtgattccgtgccgcaatgctcctccctggaagaccatagcgtcgcggtcaccttccccccgccggaccacattgcccccgacggctatcgcacctggctgacctcaattaacgatcttggcctcgatcatcagatgacggccatgggcagccggcagcacatggtgatgatcgaccccgtctcctttattgatgtcgttcccgccagcgaagagaagatccataccatgctgtttggcctggaccaccagaaaatggtgatcagcagtcagccgctgccggcgaaagtctggcaacgcattaaagatccgcatgtggatatgcttactctggataacacagtctaccggatccagcgcattcccgagctgggctctggcatcgtaacctggtcttcaaccttgccgctgcagcagcgcattcgacagcagctgttcttctggctccctgccggcattttcaccagcctgctcgccacctggctgctgctgcgtctgctaaggcacctgcgctcaccgcgcaacagcatgctggacgccctcaattccgaagcgattcaggttcactatcagccgattatttcgttgcaggacgggaaaattgccggggcggaggccctggcccgctggcagcagcccgatggcacttttttatcgccggatatctttattcccctggccgagcagaccgggctcatcacgcagctgacggaagatatcgtcaggaaaatttttgccgatctcggcccctggctgcggcagcggccggaagtgcacatctccatcaacctgtcggtagatgatttacgctcgcccaccctgccgacgttgttgcacaatcagctacagcactgggggatcgccgccgaacagatcatccttgaaatcaccgagcgcggttttgtcgacccggagacgactatgccggtgatcgctcactaccgtcaggctggccatcggatctcgattgacgatttcggtaccggctactccagcctgagctatctgcagaaactggacgtcgacacgctgaaaatcgataaatcttttgtcgataccctcgagtaccggccgctgacgccgcacattattgaaatggccaaagcgctcaatctggccaccgtcgccgaaggggtggaaaccgaaagccagcgcgactggctgcgccagcatggcgttcagtacgcccaggggtggctttacagcaaagcgctgccaaaagagcagttcattctgtgggcagagcataacctccatgcgcattaagcggcgggtggcttgagcggaacgtcagggggcgctacttcagataggatttaatcacctgcatcaccgtctccagatccgcttcgcgctgcgtctcgtcaggctctttcaccacatggtcggtaagatgcccctgaataacctgcagcatcatgccgttgaccgcgccgcggatcgccgccagctgctgtaatatttcagcgcactcatgctcgcgattaagcattttctctaacgcggtactctgcccctgaattttcttcagccgggtcagtaacatctttttgtgtcgaactgtatgtgacattgcacgatccaccgtttcattctgtccgggattaccgacctgcgtggtcagcaacgcctgccagcataccatgatcctttttattagccgctttatctactggggggtagtattttactactgggggggagtaggataatcgcacttttggcaaggatcccgatatgaacgatttcacttcccttctgcagcagggcaatgcctggctgtttatacccagcgcaatactgctcggcgcgctgcacggcctcgaaccgggccattcaaaaacgatgatggccgcctttatcgtggcggtacggggaacgttaaaacaggcggtactgctggggctggcggccacggtttcccatacggcggtggtctggctgatcgccatggccggcctgtggtttggccgcggctggaacgcccaaacctctgaaccctggtttcagctggtctcagggattgtcgttgtgctgattgcctgctggatgctctggcgcacctggcgcgaatcgcagcctcacacgcaccatgagcaccaccatgaacatgagcaccaccatgaacatgatcaccaccatgaccatgatcaccgccatgaccatgatcaccgccatgaccatgatcaccgccatgaccatcaccatgcgtcctcatccgccgcgccgctggtggcggaggagtggcaggacgcgcatcagcgggcccatgctcaggagatcaaccggcgctttgatggccgccaggtgacgaccgggcagatcgtgctgtttggcctgaccggggggctgatcccctgcccggcgtccattaccgtgctgcttatctgtttacagctgaagaaattctcgctgggcgccacgctggtgctgggctttagcgttggtctggcgctgacgctggtggcttccggggccatcgccgccctgagccttaaacatgccacccgccgctggccgtggcttaacgacctctcgcgcaaggcgccctggttctcaggcttactgattattgtggtggggatctacatgatgcttcatggcctgagcggcctgtaagcgatgaaaggccctctccgtgatgaagagggcgatgggttaattcaggagactatttcccggggagggctgaccgcgttgcggctgacgggctggctgaaccacggtaggcacagctggatcagcggcccaatcgacagcgcgtagatgacggttccgacgccaaatttgccccccagcagccagccaatcagcagtacggaaagctcgatcgccgtccggataccgcgcagtgaccaaccagtgcgagcatgcagaccggtcatcaagccatcgcgcggcccggggccaaagcccgcgccaatatacatcccggtagcgatagcgttcagcacaatcgctcctaccagcagcgcactgcgcgccaccagcgactccagcggcggcaggacggccagcgtggcgtccgccgctagtcccagcacgatgacattgctcaccgtgccgagccccggcatttgccggatcgggatccacagcagcagtaccgccgcgccggtcaggataatcaccgtaccgaaactgatccccagctgtttagccaccccgagatggaaaacatcccacggatcggcgccgagattggcatgcacgaagagcgccgtggacacgccgtaaagcaccagaccaatatataactgcagcaggcgacgaagcatattttttcctcaacatcattgcgaatgccctcatcatcagcaaaaatggactgataattaatggccagttttggaaaagtggatcgctatgtcagcccgacgctttggaacccaatcgctggtacgcctgctcggcaactggcaggagaccagctcacgcacgccgctatggcgccagctggcggaagcgctccgcctgctgatccttgatggtcgcctgacgctgcaaacgcgcctgcccggcgagcgcgagctggcggcggccctgaacgtcagccggaccaccatcgccagcgccctcggccagttgcgggaggagggctttctctacagccgccaggggagcgggtcacgcattgttttgccggaacgccccgccgatcttcctctgcctgccggcatctcatctacgcttaatctctctactgccgccctcagcgccgggccggaggtccatcaggccttccagcacgctatgaccctgctgccgccctatctcgcacagactggctatgaccagcaggggctgccggtgctgcgggaggcgattgcccggcgctacagcgaacgcggtctgccgacgcggcccgatgaggtgatggtggtcaacggcgccctcagcgccttcgcgctgatcctgcgcctgttcaccgggccgggcgatcgggtggttattgacgcccccacctatccgatggccatcagcgccattcagggcgcctcctgccgccccgtcggggtcgcgcttccgcagcagggatgggactgcgatggactggcggcgactattgcgcagactgcgccgcggctggcgtggctgatgccggattttcacaaccccaccggacgctgtatggatgcccccacccgccagcgggtcgcggacatcgccgccaggacgcgaacaacgctggtaatcgacgagaccatggccgacctttggtataacgcgccgccgcccccgccgctggccagctttaatcccgatgccgcggtgctcaccattggttcggccgggaaaagcttctgggggggactacgtatcggctggatccgcgccagcgcgcgggccatcgcctcgcttattcaggcccgcgattcgctggatttgggtacgccgctgctggagcaactggcctgctgctggctactggaaaatgccgccacactgctgccgccgcggcgggatatgctcaaggcgcgccgggacatgtgcgaaactctgatggcggaatattttccccgctggcggttttcgccaccggaaggtgggctctctttttgggtggaacttcctgacatgctggccaccctgttctctgcgcgtgcggaaagccaggggatccatatcggcaccggtacgcggtttgggctggaaggggcgttcgatcgctatttacgtctgccgtttacgctgccggatgaagcattgcgccgggccttctccacgctacaaccgctgtggcaaagccttgctgaacagaaggaaaatacacgtttgcgaaaaataatataagaaaatagcgacgggctgacttcagcccgtcaaatgaccttcatccatgaggtatatgagatgtttttataaaattgcctggctatcctgccctctggttatggcaacccaatgacagaaagaaggcaatttcattaatgctggcgcggaataggaaaccctttcagggaaataataaagccatcttcatcttttttgattttagcgccggtgtcacaccagtcggaagcaatgcgaaagaactcatcactaccgatattccagttcaggcggacgtgttttacgtatcctgagcgcaacatatcgcaagcttcgctatagttgctggctgtagagaattgttgtttcattttttcttcttcagaagttttcttaatgctttgatttctttaggggtaagtggcgtcgcttcctcttcggtatgctggctgtcaatgtcctcttccgtcacccccgcctcacctgctgactcctccagctgaaaagccagctgcagcagcttttccgttgccgttcccaggttctcgttattaacttccgcataatgacgcaacttttcttttagctctgcgtcaatttttacattcaaaaccactgtggtcatagctacgcttcccgtgcaataaaatcatcataattaatacacgaagttaacatgctgatccagagatatattttacagcatgagcctggcaacaaattcccatcagtaagatgcgctttatttatgacatgcaaatgacattaatatttcagtagtatttcagatttatgacaagtaaatattatggaataaaagaaggggggtttaacaacaaaaactaatatgcgatctttatcagaaattaattattgcaggaataaaaaccggacaaatataagggaaacaccaggcgggagaaatgggtgggggccctgccagctacatcccggcacacacgtcgtctgctctggctgcttccttccggacctgacctggtaaacagagtagcgttgcgggagaaccaacagagcccccattgagagcgttagttgcctaacgcgctggcgcattatccctgctgacctggtgaattgcaagctcacaccgtccgcctgctggtttattgcgcaataacgcgaataaaaccagccactcacggtcagcctgtgagattgcgagcctgcgctcagcacacatccgggttatccaccatacttatcctcttcgtcctcttttatcaccagtacattgtctcgacggtaatcgaatgactgactcatcaccacagaccatcactctgcctttacctgctattgaagggatgaccatcgcctttcagggcgtaaactacctgcgtcctgaaaaaatgctcgacttcgcgaccatcagtcccgcgccggtgcgggcggttacgccgctggcgctgctctattccaccgtcggcgtgctgcgccaggtggagctacgcaagctgccggtctatatcagcggtcgggtggtgtaccctatctcgtcgttaaccatgccgggcctgcgcgcgaggctgatcatcaacgccacttcgcagcggttgaaatttcttgaaagtctcatcgccagctcagcctcggacaatgtccatggcatgcagatcctcggcctcgctctgacgttcaccgtcgaacaggccgcctgacccaggccggctgtacagctcctggcttagcgcttatgctgacgttttgccggtaacaggacagaaaatggctccgcacgacacatttccccaacgcgtctggcacatcgtggcgtcgataccggaagggtatgtcacgacctacggcgaggtcgcccggctggcaggttcaccgcgcgcggcgcgccaggtgggcggcgtattgaagcgcctgccggaagggtccaccctgccatggcatcgggtggtcaatcgccatggcgatatctccctcaccggccccgatctacagcggcagcgtcaggcgctgctggccgagggtgtgcaggtctccggcagcggccatatcgatctccagcattatcgctgggtttattgaaggcaaaaaaaagcccccatccgggggcgtagcgagcttactgggcgacaggaacggcggtctgctggaccggaaccagcgtcaggtcggcatgagtgccgccctggtttattaccgtctgcacggtatcggtaataaacatcaactggccgttaaccgtgatcgccgcgcttagcagaatgcgagcgttcggttgaatatctgccgggttgtaaggcagcgcaaagttaaatggcgcctgtttgccttcggtacgcaccgctttttgcgacaatacgcgggctggcgcatctgccagagaagcatccgacagggtcaccgtcagtaccgcatccggcggtaaagcgattctctggcggatattaatcgtccccgtgacgctcggctgctgctgcgccacgctcagcgtcgcgataccgtaagggtcgggcgcggccgcctgcgtcgaagaattgttcgagtggtgattagcacaggcggtcagcgtcgcggcgacggctaaggcactaaacatataggcaaatttcatgatgttctccttatcatcccttaatacccaggaggatgttccgccgcttcgccggcaggaactttcgtgtcgtcaataagtgtggcacagatctcagatttgttcctgttaactggtcgttattcagattattacacccatcggaccacttgcgattccaggttatacttggccacattacgcgcgctgcgccgctattgttaattgaggataagtatgagtcaggcactctctaacctgctggcattattagatctggaaaaaattgaggaagggttgtttcgcgggcagagcgaagacctggggttacgtcaggtttttggcggccaggtagtgggtcaggcgctgtatgcggcaaaagagaccgtgcccgttgagcgtctggttcattcgtttcacagctactttcttcgccccggcgatagccagaagccgatcgtttacgatgtggaggtgctgcgcgacggcaacagcttcagcgcccgtcgggtcgccgccatccagaacgggaagccgattttctatatgaccgcctccttccaggcgccagagaatggctatgagcatcagaaagcaatgccggccgccccctcccctgacggcctgccttcggaaaccgatatcgctcgcaagctggcgcatctcctgccgccgcaggtgaaagacaaattcctctgcgataaaccgctggagatccgtccggtggagtttcataacccaatgaaaggccatatcgccgaaccggtgcgccaggtctggctgcgcgccaacggcgccgtccctgacgatctgcgtattcatcagtatctgctgggctatgcttcagactttaacttcctgccggtggcgctgcagccgcacggcgttggtttccttgagcccggcatgcaggtcgccaccatcgaccactctatgtggttccaccggccgtttaatattaatgaatggctgctttatagcgtcgaaagcacctcggcctccagcgcccgcggcttcgttcgcggcgaattctacacccaggatggcacgctggttgcctcaacggttcaggaaggggtgatgcgcaaccgcaacgcataaaaaaagcctcccggacgggaggcttttcgctatcaggagagaatggcttttttatcaggcgttataggcgttttcgccatggctgttgacgtccagcccttcgcgctcctgctcttccggcacgcgcagcccgacggtcatatccgccactttgtagccgatgaacgccacaacgccggaccagaccacggtgatggcgatactttccagttgcaccagcagctgatggcccatggtgacgccttccgcataaccgacgccgcccagagaagtcgccgcgaagataccagtcaggatacagccgacgatgccgcagacgccgtgaacgccgaagacgtcgcaaggatcatccacacgcagccagcgtttcagcgcagtcacgccccagatacccgccaggccagaggcgataccgacgatcagcgccccgccgacaccgatataaccacacgccggcgtaacgccaaccagaccggcaattgccccggagcaggcgcccagcagtgaaggtttgccgcgcagagcccattcgccaaaggtccacgccaggatagccgcagcggtcgccacgacggtgttaacgaacgccagggccgcaatttcattcgctgcgctggcagagccggcgttgaagccgaaccagcccacgtagaggatagcggtgccagtgaacaccatcggcaggttatgcggtttgaacgcttctttgccgaagcccacgcgtttgcccatcatataggcgccgaccagcccggcgaccgcggcgttgatgtgcacaacggtgccgccggcgaagtccagcgcgccatgggtcgccagcagaccgccgccccaaaccatatgcgcaatcggcacgtaggagagtgtcatccacaccaccacgaagatcagtaccgcggagaaacgaatacgttccgccagcgccccgacaatcagcccgacggtgatgcaggcgaacgagccctggaaggccacgtggatatactgatagaaggtgcccatcagcgctttcagctcaatatttttcagcatcacccagtcaaagctgccgaagaagctgccgccggtgccgaaggccagggtatagccataaatcacccacaatacgcagaccaggccaaaggtgacaatcacctgagtcagcatggacagaacgttcttaccgcggatcaggccgccgtaaaacagcgcaatccccgggatagtcataaacagaaccagcgcggtgcaaatcatcataaacgcgttatcggctttgtccgccaccgcaggcgcggccatcgccagccccggcagaagggctaatgcccccagacccgatttcattgttgccattttcattgtttcgttccccatcactgtgtggtctggaaattacagtgccgcttcgtcagcttcgccggtacggatgcgaatgacgcgctgcaattcagcgacgaaaattttgccgtcgccaatttttccggtgtaagccgctttgctgatgacatcgatgacttcatccagctgatcgtcggcaatcgccacatcaatcttcacttttggcagaaagttgacgctatactcggcgccgcggtagagctccgcgtgacctttctgacggccaaatcctttgacttcagtgaccgtcaggccctgaatgccgatggaagacaaagcttcacgcacgtcttccagtttgaatggtttgattaccacggtaaccagcttcataagtcccctccagtcagtattcggtaatggccgcagctaacacgatggatataaagcaagggctatgccagaaatgaaaaaaggccgcaaagcggccctttgatggcaaaaaacaggggacaggtcaggcaatatcctgcgcaacggcgcctggcgcgcaaaaatgcaccacaacggtgcatttgatgtaacgtttttgcaccatcgcaggccgcccagcgttccctgcctgctggtggtgcatcaggcgctgagcgactcctctctggcgctggccgccagctcttcgccggccagctgcagctgatacatctgccagtagcggcctttcgccgccagcagctgctgatgggtgccccgctcgacagcctgacctcgatgcagaaccaggatggtatcggcctccacaatggtcgacagccgatgggcaataaccacgagggtggtatgctggcggaccttcgccagcgcctgctggatcgcctgctcggtaccggagtcgatgtttgccgtcgcctcatccaaaatcagtacctgcggggtgtccaccagcacgcgcgccagcgccagcagctgcttctgcccgacggagagattattgccctgctcgcccagttgggtgtacagcccatcgctcatgctgcgcgccaccgccgccagctgcaccgcctccagcgcttcccaaacctgcgcctcactgatgtcccggcccagcgcgacgttggcgtaaaaggtatccgccagcactacgggatcctgttgcaccatcgcgatgccccgacgcaacgcgctgtggctgagggatgcgagcggtcgaccatcgatgcggatctcgccgtgggttaacgggtaatagcccatcatcagactggcgagggtactttttccgctgccggtatgtccgaccagcgccacgaagctgcgggagggaatatccagcgtgatatcctggagaaccagacggtccccccggtaagcaaaggagagatggtcaatttccacccgaccgctgctcagcggcgcgtcatccgcaccccacgcctggcgcgggcgatccatcagctcgaaaacgcgctcgccggcgaccaccgcctgctgcagcatcgactgctgggtggtcagctcgataagcggctcgttaaggcgtccaagatagctgataaacgcgtacaggaccccaacctcgatcgtgcccaccgcgctaaagccgaacagcatcagcagcccgcacagcaccagcgaggaaaaaaggctcagcagcgggcgcagcagaaaaccgtccaggcgcagcgtctgcatccgcgccagatagtgggcatagctggcctcgcgcatccgttcgccaaagcgcgcctgctggcggaactgctggatgacgcccatgccgttgatcacttcgttgaagccatcgttgatgtcggcaagccaggcgcgcacccgccgcacgatcggcgtgctatagcgctgatagataatcatcacgatcagcaccgccgggaaaatcgtgatcgccaccagcgccatccgccagtcgaggctaaacatcgccaccagcatcgcgccgatcagcgcggcgctgcgcagtaccgtagccaccaccgtcacgtacagatcgcgaatgacttccgtatcgttggttacccgtgagataagctgcccaaccggctgggtatcaaactcgctgagcggctgatgcagggcggcatccatcacgtcgctgcgcaactgctggacgacgccgaccgcggcgcggttaaacagcagcgactggttatagtgcaggagcgccgccagcagctgcaggccgatataggctaccgccaggccggccaccagcttcagcggcagcgtatgtttcgccaccatgttgtcgatgaaatagctaataagcagcgggccgctcacttccgccgccgccgcaatccacatcatcgccaccgcgatggccaacggcttgcgccacggtgaaccataggccagcaggcgtttaagcgtcggccagagttcagtaaagctacgcatccagggcctcctcttgcgtctgcggaacctcgtcgagcgcggcctccagctgctgatatcgatacatgtcgcggtaccagccgggctgcacggccagcgcctcgtggcggccgcgctgggcaatatgcccatgctgcagtaccaaaatttcactggcctcagtgagcgccgacaggcggtgggcgctgataatgaccgtccgcccctccccccactggcgcaggttatgcaggatctggtgctcggtgcggccatccaccgccgataaggcatcgtcgaggatcaaaatttcggcctccagcagcagggcgcgagcaatcgagatgcgctgtttctggccgccggagagcatcacgccgcgctcgcccacttcggtctcgtagccctgaggcagacgcagaatgtcgtcatgcacgctggccagttgtgcaacccgctcaatctgcgcctgcgtcgcgtccggttttcccagcgcgatattattggcgacggtatcggagaataaaaatggcgtctgattgaccaccgccaaccgggcgcgccagctgtcgagctgcagaatcggcagcggcagatcgtgaaagcggatctcgccgtgagtgacgtcaaaatggcgctgcagcagcgccagaatggtgcttttgccggcgcccgtcggcccgcagatgcccagcatttgccccggctggagagtaaaatttacctgctccagcgaaggtttgctcgcctgcggatagatgaaatcacggatagcaacctgcaggacgccgcggcctgccggcaccgcctcggtcccgtcatccaccgccggcgcctcttcaagcatcgtgcggatacgaccataggccgcgctaccgcgctccacgatgttaaacatccacgccagcgccagcatcggccagatcatcaggccaagatacatcacgaagctggtcagctggcccagggtcaggctgccgtggatcaccatccagctgccgccgccgatggccagcaggttagcggccccgatggcgatatagatggtggggtcgaagcgggcgtcaatgcgtgccacgcgcatgtttttcgcgccggtatcggcagcatcggcagcaaactgcgccgactggcgatcctccagcccaaacgccttaatcatgcggatgctggtcaggctctcctgcgtgcgatcgttgaggctggaaaaggccgcctgagcaacgcgaaaacgttcgtgaagcgcatcgccgttgcgtttgatcgccagggccatcagcggcatcggcagcagcgccagcagagtaagctgccagctaatctgcgtcgacattacaatcaataccgcacagcccatcaccagggaatccacgagggttaatactccttcgccagcggcaaacaccacccggtccacgtcattggtggcgcgggcgataagatccccggtgcgatggcgcaaatagaacgccggatgctggcggctcagttgccggtaaaaatcttcccgcagctcaaccgccaactggtaagaagcaccgaacaacagcacgcgccagacatagcgcagcaggtagaccatcaccgcgatcagcaccagcgcgccgatccacatccacaccttctccgcggtgtaatgttgttgcgtcacgccgtcgaccacaatgcccaccaccttcggcggaataagctgcaggacggcaataatgaccagcagggcaattgcgccaagatagcggcgccactcccggcggaagtaccagctgagttgagcaaataatcgcaagcaataaaatcctgattttgtaatgggttacggcgcaataccgttattcgacaggcaaggcggtggtatattttatctgttccatggcaaaactcgaagtgacatccgacagaccaggcacactgttcactaaacgtttataaaagtcgtcatagcgtttcatatcagccacctgcacccgtagcaggtagtcatactcccccgccatccgccagaagccgagcacttccgccatctgcgtcacttcgctcacgaactgacagtaccagtcgctgctatgatgctgagtcttgatcaggacgaacgccgtcagccccagccccaccttttccgcgtccaacagggcgacgcgcccgcggagaatgccctcgtcttcgagccgtttcaggcgtttccagcagggcgtggtggtcagattaacggcatcggccagcgcctgcaaagagagggtgcaatcttcctgcagtagcgccagcagcttacggtcaattttatctagcattgggcatcctcagagaaaattttgctctcataatggtaatccacaggttaaatggcaacaatttttcctgcgctttccgctaagctaggcacaaaatgacaaacaggaaatcacgatgaatagcgcctgggttaaacatgccattagcgaaatcaacgcggactatcagcgctccgccgacacgcacctgatccgtctgccgctgcccgcttttccgggcatccacctgtatctgaaagatgaaagcacccaccccaccggcagcctgaagcatcgcctggcgcggtcgctgtttctctatggcttgtgcaacggctggatcaaagaaggcacgccaattatagagtcctcctcagggtcaaccgccgtttcggaggcctatttcgcccgcctgctggggctgccgtttatcgctgtgatgccctcctgcaccgccagacgcaaaatcgaacagatcgagttctacggcggacgctgccattttgtgcagagcgccggcgaaatctacgcggcttccgaaacgctggcccgcgagctgaacggccattatatggatcagtttaccttcgccgagcgggccaccgactggcgcggcaacaacaatatcgccgacagtattttccgccagatgagccatgagccgcacccgcagccgtcatggatcgtcatgagcgccggcaccggcggcacctcagcgaccattggccgctatattcgcagccagggctacgagacgcagctgatggtcgttgatccgcagaattcggtgttcctcgattactggcagacccgcgacgccagcctgcgcagcccggtcggcagcaaaattgaaggcatcggacggccgcgcgtcgagccgtcgtttattcccgacgttgtcgatgagatgctgcgcgtgccggatgcggcgagcgtagccaccgccctgtggctggaaacgcagcttgggcgcaaggtcggcgcctcgaccggcaccaatatgtggggcgtattgcagctggccgcgcggatgcgcgaggaaggtcgcaccggctcgatagtgacactcctgtgcgacagcggcgagcgttacctggaaagctattacaacccgcagtgggtggcggacaatatcggcgatattgcgccctggcaggcggagatcgccggtctggtcgaaaggcgataaaaaaagccagatagaagcctatctggcttgctggaagggtctctctattcgggggaataaggaagatcaggattatccagccaatgagttaaaaaatgggagactgcctgattccggcagtcgccaattaccggcagatgcggcagctcggctatcagctgcggcatcgcgttgcccatgatgaacccccgcccaacgctgcccagcatctcgcggtcgttcatcgcatcgccgaaggccatgcactcctgcagggtgaagcctaactgctggctgagcaccgccagcgccgcgcctttattgcagccaaccggcagcacctccagacagtccattgccgagcagcagagaaatgcgcgatcgcccagcgtctcattcagctggatccgcagacggcgcaaatcgtcatgatcgccgcagaaacagatcttggtgacatgctgcgccgacatacgctttagatcgcacagttgatagtgaaagccgctgaatacatgcgcttgcaacaattcaggccttgcctggccggtaaaccagccgccatcgttaaagacgtgcatgctggcctgggtatcccatttgccgtgcagcaccgcttccgccgcctcgggagcgagatcctggcgataaagctcctccccttccagcgaatggatgcgcgtcccgttgccggtgatcagaaatgcatcaagggaaaattcgccaatcacatggtgcatctccagcacatggcggccggtggcgaaggtcaaggtgatatcgcgctcacgcagccgtttcagcgcggaaagcgtcttttctccaagacgatggtccggcatcagcagggtgccgtccatatcaaatgccgccagttttgccatggtatattccccgatgtgtgatgggcttcgcttgtgttgcagtatcacctgggatatacggaagtaatagtgaatagatattattaattgttccgggtttacagcggcccggtggacgacggcccccatgcgactcttacaccgtttaaatcaataccagcgcctatggcaaccctcagccggggcgccgcagcaggtcaccgtcggcgaactggcggagcgctgtttttgcagcgagcgccacgtccgtactctgctgcgtcaggcgcaggaggccgggtggctaagctggcaggccagctccgggcgcggcaaacgcggacagctcttatttcacaaaaccccggaaagtctgcgcaacgagatgatggagcaggcgctgaacaacggtcagcaacaaaccgcgctggagctggcgcagcttgccccggtggagctgaaagccctgctccatcccttcctcggcggtcagtggcaaaacaatacccccacgctgcgtattccttactatcgcccgctggagccgctgcgtcccggctttctccccggccgcgccgagcagcatctggccggacaaatctatgccgggctgacgcgcttcgacgaaggcgacaatatgccgatcggcgatctggcgcaccactggcaggtctccccggacggcctgcgctggcatttttatatccgctccacgctgtgctggcacaatggcgatacggtggaaaccgcgcagttgcgacagcggttactgctgctgcttgagctgcccgccttgcggaccctcttcgccagcatcagccgtatcgatgtcacccatgcccagtgtttaacaataaccctgcatcgccctgactactggctgccgttccgcctcgccagctactgcagcgtgctggcgcatcccgacgatccggccattggctgcggaccgttccgcctgaagcggtttagtccggaactcgtccgcctggaaaaccatccccgctaccacctgcagcatccgctgatccaggcggtggagtactggatcactcctcagctctttgaccgcgatctcggcaccagctgccgccatccggtgcagatcaccatcggcgatcgcgaagagctgcataatctgcgtcaggtcagcaaccgtatcagccttggcttctgctatttgaccctgcgccacagccctcggcttagcaaagcgcaggcccagcggctggtgtcgataatccatcactcgtcgctactggatacgctgccgctggaggaggatctgattacgccaagccatgaggtgctgccgggatggtccatcccgcagggaccggcaaacaacgcggtaccgctgccggccaggctcaccctgctctatcatctgccggtcgagctacatgcgatggccgaacagctgaggcaacgtctggctctgctgggctgcgagctgacgctcctgttccacgacgctaaaaactgggaaggctgccagcatctggggctggccgacctgatgatgggcgaccgtctgatcggcgaagcgccggagtacgccctggaacagtggctgcgctgcgatatgctgtggcctaatttgctgaccggggcgcaatatgctcatctgcaggcgacattagacgcggtgcagtctcagcccgacgctcgcagccgcaacgatgcgctgcgcaacgtatttaacagcctgatggaagacgccatcatgacgccgctgttcaagtataactatcggatcagcgcgccaccgggggtcaatggtctgcgcctcaacgcccggggctggttcgacttcgccagcgcctggctgccggcctcgtcgacgtgagagagctggtgatggagggcgtctggcgctaccatatcgcctttattcatttagtcaggaattgccatgaaacgcgccgtagttgtcttcagcggaggacaagattcaaccacctgtctggtgcaggctctgcaacagtatgatgaagtgcattgcgtcacttttgattatggccaacgccaccgcgcggaaatcgacgttgcgcgcgaactcgccctgaaactgggcgccgtcgcgcataaagtgctggacgtcactctgctcaacgaactggcagtcagcagcctgacccgcgataacattccggtaccggactatcagcctgatgccgagggcattcccaacacctttgtccccgggcgtaatattctgtttttaaccctgacggcaatctacgcctatcaggtaaaagccgaagccatcatcaccggcgtgtgcgagaccgacttctccggctacccggactgccgcgatgagtttgtcaaagcgctgcaccacgccgtcagcctggggatggcgaaagacattcgctttgagacgccgctgatgtggctgaataaagccgagacctgggcgctcgccgactactggggtcagctggatctggtgcgccgggaaaccctcacctgctacaacggcattaagggcgatggctgcggccagtgcgccgcctgtaacctgcgcgcaaacggactcaaccagtatctggcggacaaggtcggggtaatggcggtgatgcagcaaaaaaccggactggcgcaggcataatctccggggatcgatttaccggagctttgactcaaattccccggtggcgcgatgcttaccggggctacgggttcatcacctgccgtgggccagccactcgcacgacggttgtcagcgcaggttcatctggtcaagtttcgcacgcaattccccttccagcggcagcgccttctgggttttcaaatcgatacaaacgaaggtaatcagcgcatcggccactacttcgccattggggttgagggtgaccacctggcttagggtgccgcttttgccgttgagttgctccagtttgctgctcaccgtcagcacatcgcccagtaccgccggacgacgatagttaatattgatattcaccaccacgaaggcgatgtttttctccatcatccactgaaacgcggggctgttttccaggccgtcccagcgggcttcctcaaggaactccaggtagcgagcgttgttcacatgctggtagacgtccagatgatagccgcgaactttaatttgtgtctgcatagcactaatgcctttctgttattgttgcttatgaggtaagaggtcacaccacttgatgcaacctctttatcctggcaaaaaatcaccgctgtgcaaggtctggcataaaatttacagcgtcagatgggctaaattgcgctccaccaacgcgctccccattcccgggacctgcttcagatcatcaagggttttgaacggcccgtactcttcgcggtagctgacaatggcctgggcttttttcaatcctacgccattcaacgcctgcgccagctgttcggcgctggcgcggttaatgctgacctttgtcgccccgttgtcagactcgccgggcaccgcttccgccttcgccgaagaggacgcctgcacattttctttattcaccgccgctttgccgctggcgggtgccgccagcgccccctgtacccctaccgcaaaaaccagaacgcccgcggccatcagtgcttttattccatatttcatgctgatatctccttgtgtgtagacagcaaggtcacgatagcgtcagtgcggatggtcgacaaaaggcaaatcacagaaatggaaagggccgcgaaagcggcccttgaggattacatcgtgttgctcatttttgcgagacgacgcgaaattactgctgctggtcgatgctgtcgccgagcttaattttcgccgccttgcgcaggttgctcatcagcgcttcgaaagcgatttgggcattgttctgggtgatcccctgaaccatggccttcttctgctcttccggcatgctgccggctttcacctcatccagcgctaccagcaccacatcgccttgcatattgctgcccacgccgtagaccggtttaccctgctgcggcagcggcagggtaaatgccagctggctcagcggatcctggccggtacgagaaagcgtctgcggcgcgccaaagctcaggccagccgccttcatcgcttcatcgcctttgccgtctttcagcgccgccagcagcttgtcggcctccagtttcgcctgctgttccgctttattgtgcttaacgatatcgctaacctgtgccttcacttcggcaagcggcttcaccgcctcggctttgtgttcgctaatgcgcagaacaaaagcgcgatcgccgtcaacggtaatgatatcggagttgctgcccggcgcgccgttctcacccaccagaccgccgttgaaaatagcgtcagcgaccggtttaaagttcagctcctccggcaggttatcgcggccaaaccagccggtttctacgaccttcagcccggcgacctgcgctgcgctcgccagcgattcattatcgttgctggccgcatcgctcaccttctgctgcagcgcgtagtaagcatccaacgctttttcctgcttcactttcgccgcaatgtcattacgcacgtcagccagcggcttcacctgcgccggctggacgtcgtccagacgagctaccaagaagccaaccgaggatttgatcacgccagacagctggcctttctctttcagcccggcatctttcagctcaggcacggtagaggcatcttccatccaccccatatcgccgccgttgcgggcagagataatatcggtcgatttttctttcgccagcgtggcgaagtccgctcctttttgcagctcggccagtaccgctttcgcatcggcttcagttttggtctgaatcacgctgtagcggttgcgctgcggctgagtgaactgatccttgtgctggtcgtaccatgactgaatctcgtcgtcagagacgctctcctgcatgctggcggcatccattttgatgtagctgacgcggaactgctccggcgccataaaacgggcctgattctgctgccagaaggcgttgatttcctcatcgctggcggtctgttttgccgccagggcatttacgttgatggtcgcttcgcggaccacccgctgttgagataccagcgccgccagctgatcggactcgcccggcagcatgaagtcggtacccgcaatggcgttaatcagctgctgcgtggtcagctggttacgcagcgcctgggcgtactgatcggtggtcatccccatctgggcgacaataccgctgaaacgctggttgtcgaacttaccgttcgtctggaacgcctgggtctggaagatcgcctgcttcacctgctcatcgctgatgctgaggcccagctcgcgggcatactgatccagaagcgactcatcgatcaggcggttcagcacctgctggcgcatggttttcatgtagttttcgttcgccgccagctcggagaattgatcgccaagctgctgctgcatacggttacgttcgctggcgacggcgttttcaaactgcccacggccaatctcctggccattcacttttgcggcatagtttttgccaccgccaatcaggtaaccactcaccccggtcaaaatgaacgagacgataatgataccgaaaataatcttgagcacgacgctgttggcggccgtgcgtaggttgtccatcatggtgtaacaacgctccgctgtagatgactttagctcgcgcagcatagcacgtgatggccgccgcgcgtgaggacgtattttgacaagaaaacagggtgattgtcagcccacaagtggcgataaacacacataaagtggtctgaaaaggcaataaaaaaggcacatctcacgatgcgcccttgtacttcgtcacattccctgacgggaaagccgatcagttcaccgcgtctttcagcgctttaccagcacggaagcccggcacttttgcggcagcgatagtaatttctttacctgtttgcgggttgcgaccagtacgggcggcacgttctttaacagcaaaggtaccaaaacctaccagcgcaacgtcatccccagcctgcagagattcagtaacagaagcgattaaagcatctaacgcacgtccagctgcagctttagaaatgtccgcacccgcagcaattttgtcaatcagttgagatttattcactgttctcttcctctctttataatttatatcgcacctgagtccttcatagtgcgaccgcgcagcagttatatcaggactgtcatgcccttacaacagcagttgtcgatgacccccctgccagcgatctaagttagctacacaaaaaaaggctggcaagtccgaaatgacttaccagccctatttttattagcgcaatttgcgcagaatcactatttcgcgttcacaacctgcatgccgaacggttcgttctgcagcgcaagtgtcagaacttcctcgattcgtttcaccggatggatatccaaatcggcgataacgttatccggaatttcttcaaggtcgcgtttgttctcatcaggaatcagaacagtcttaatgccgccgcgatgcgccgccagcagtttttccttcagaccgccgatcggcagcacctgaccacgcagagtgatttcaccggtcatcgccacatcagcgcgtaccgggttaccggtcaggcaggagaccagcgccgtgcacatggcaatacccgcgctcggaccatccttaggcgtcgccccttccggcacgtgcacgtgaatgtcacgcttctcgtagaagtcggcgttaatgcccagcttatcagcccgcgaacgtaccaccgtcagcgcagcctgaatcgactcctgcatcacctcgcccagcgagccggtgtaggtcagcttgcctttgcccggcacgcaggcggtttcgatggtcagcagatcgccgcccacttccgtccacgccagaccggtcacctgaccgacgcggttctcactatcggcgcggccatagtcgaagcgctgtacgccgagataatcatgcagattctcaccgttaatttcgatgtgtttcagcgatttatccagcagcagttgcttaacggccttgcggcacagcttggagatttcacgctccaggctacgtacccccgcttcccgcgtgtagtaacgaataatgccgataatggcgctatcgtcgacggtcagctcgcctttcttcagcgcattacgttcgatctgcttcggcagcagatgacgtttggcgatgttcagtttttcatcttcggtatagccggagagacgaatcacttccatacggtccaacagcggcgccggaatgttcatggagttggaagtcgccacgaacatcacgtcgctgagatcgtaatccacttccagataatggtcgttaaaggccacgttctgttccggatccagcacctcaagcaacgcggaagccgggtcgccgcgcatgtcggaagacattttgtcgatctcgtccaacaggaacagcgggtttttgacccccactttcgccattttctggatcagtttgcccggcatcgagccaatgtaggtccgacgatgaccgcggatttccgcttcatcgcgcacgccgccaagcgccatacgaacgtatttccgtccggtcgctttggcgatggattgacccagcgaggttttacctacccccggcggtcccaccagacaaaggattggccccttgattttgttcacccggctctgcaccgcgagatattcaaggatgcgatccttcacgcgctccaggccatagtgatcggtatcgaggatctcctgggcctgacgcaggtcttttttgaccttactgcgcgcattccacggcacctgcaccatccagtcgatgtagccacgcacgacggtcgcttccgcagacatcggcgacatcatcttcagcttctgcagttccgcttcggttttttctttcgcctctttcggcattttcgccgcgtcgatcttacgcttcagcgcttcgttttcgtccggggcgtcgtccatctcgccgagttctttctgaatcgctttcatttgctcgttcagatagtactcgcgctgggatttctccatctgctttttgacgcggttgcgaatgcgcttctcaacctgcagcagatcgatttccgattccatcatcgccatcagatattccagacgttcgttaacgtcggacatctcaagcacagactgcttgtcagccagcttcagcggcatgtgcgccgcgatggtatccgccaggcgcgccggatcgtcgatgctgttcagcgacgtcagcacttccggtgggatcttcttgttcagcttgatatagccttcaaactggctgatagcggtgcgaaccagcacttcctgctcgcgttcgtcaatcgccggcgagtcgagatactccgctttcgccgagaaatgctcgccattatcagacagcgcagaaatgcgagcacgctgcagcccttcgaccagcaccttcacggtgccgtccggcagcttcagcatctgcaaaatagacgccacggttccaacggtgaaaagatcgtttacacccggctcatccgtcgacgcttctttctgcgcaaccagcatgatttttttatcatggtccatggccgcttcgaggcaacggatagatttttcccgccctacgaacaggggtatgaccatgtgcggataaaccaccacatcgcgcaatggcaatacggggatttcaatgcgttcagaacgctcaggattcatagagctctctcttagtttaaagtccgccaggtagccgacgacgccacactccactgcatcgtcgttaatatgtaatccagtatatggggatgtattccacacattcaacggcgggaatgcaggaaaaataaaaggggagataaaatcccccctttttgttaactgcttgagtgaaatggttaattattcaccagatgcctgctgagcttccggtttgccgtagatcagcagcggtttgctctgaccggcgataaccgactcatcaatgaccactttttcgacatcttccatcgaaggcaggtcatacatggtatccagcagcgccgcttccacaattgagcgcaggccacgagcgccggttttacgcgccatcgctttcttggcgatagcgtccagcgcttcgtcgcggaattcgagctctgcgccttcaaggctaaacagcgcctgatactgcttggtcagggcgtttttcggctctttcaggatctggatcagggcttcttcgctcagctcgttcagggtcgccactaccggcagacggccgatgaactccgggatcagaccaaacttgatcagatcttccggctcgacctgagccagcagttccccttcgctcgctttgtcggacttcgcttttaccgtcgcgccaaaaccaatgccggagccggtttccacacggtgggaaatcactttgtccaggccagcgaacgcgccgccgcagataaacaggatcttggaggtatcaacctgcaggaactcctgctgcggatgtttacgcccgccctgcggcggaacggcggcaacggtcccttcgataagcttcagcagcgcctgctgcacgccttcgcctgacacgtcgcgcgtaatcgacgggttatcggatttacgcgaaattttgtcgatttcgtcgatataaacgatgccgcgctgcgctttctgcacgtcgtaatcgcacttctgcagcagtttctgaatgatattttcgacgtcctcacccacataaccggcttcggtcagggtagtggcgtccgccatggtaaatggcacatccagcaggcgcgccagcgtttccgccagcagcgttttaccggaaccggtcggcccgatcagcaggatgttgcttttacccagctctacaccattgctggtatcgccattgcgcagacgcttgtagtggttgtataccgcgaccgccaacaccttcttcgcctgttcctgaccgatgacgtagtcatcaaggtggtggcgaatctcgtgcggcgtcggcagcgcgctgcgctcgcggtgcggcgccacttctttaatctcttcgcgaatgatgtcgttacataaatcaacgcattcgtcgcagatatacacggatggcccggcgatcagcttacgcacttcatgctggcttttgccgcaaaaagagcaatacaacaatttgcccgatccatctttgcgtttatctgtcatgagtccaaacctctttttaagttctttgtgccgcacacgacgacgcaaatgccattctcaggcgcaagccgccatatagcgttgtgccgcccttcattagtatatacacaaaatccttcgcgctacatcgagccggtagcgaagccaccggccgcaagcctgccagacaagcggccgaataaaagccaaccgctcgcacagacgtggcgagaaggatgaagcgtaaagcggcacccttgcgccttgggcatcaattacgatgggtcaaaatagagtcgaccagcccgtactccacggcttccgcagcagacaggaagcggtcacgctcggtgtcacgctcaatctgctcaagagactggccggtatgatgcgccatcagctcattcatgcgtcctttcaccttcaggatttcacgggcgtggatctcaatatccgtcgcctgtccctgatagccgcccagcggctggtggatcatcacgcgggagttcggcaggcagaagcgcttgcctttcgccccggcggtcagcaggaacgcgcccatagaagcggcctgccccatacagatggtgctgacatccggcttgatgaactgcatggtgtcataaatcgacatcccggcggtgattaccccgcccggagagttaatgtacaggtaaatatctttttccgggttttccgcttccagaaacagcatctgcgccacgatcaggtttgccatgtggtcttcgacctggccggtcagaaaaatgacgcgttccttaagcagacgggagtagatatcaaaagaacgttcaccacgtgaggtctgttcaatgaccatcggcaccagggccatatggggtgcaaagttgtctcgttcgccactgtatgacatttccgtctcctggagtaattttaaaatacctgctgcactgattgtaaccttacggacggattatcagccacagtttctatccgctgaatgcgtcaccgcctcttcaatacgcgtgcgattgcggatgcagttgcctcccccggtaatggggatggtgttgccatatttcaagcataacaagcttttgctgtaacgctatcatggttaatgcgttttcgcaccgtgcctgtggctatcattatcttaaaaaaaaacccgccgcctttcggcaacgggtttttgctcgaaccttaaacgatagcggcgaaattacgcctgctggttcatcagttcgttgaaggaagtggctttttcagacactttggctttcgccagcacggcttcaacagcctgctcttccagcgccacgttgcgcatgttgtccatcagctctttgttcttgctgtagaactcaacgacttcagacggatcttcgtacgcagaagccatctcttcgatcagggcttttacgcgctcttcgtcagctttcagctcgttggtgcggatcacttcgcccagcagcagaccaacaacgacgcgacgtttagcctgctcttcgaacagctcgcgcggcagttccagagcctgtttctcgttgccgccgaaacgctgagcagcctgacgacgcagcacgtcgatttcgctgtcgatcagggcagccggaacgtcgatctcgttggctttaaccagaccttcgatagcctgagacttcacgcggttacgcacagcgcctttcagctcgcgttccatatttttacgcacttcagcgcgcaggccagcgacggaaccatcttccacgccgaaacgtttgatgaactcttcggtcagctcaggcagttcacgctcttcgactttcttcagattgataacgaacttagccgctttacctttcaggttttctgcgtggtactcttccgggaaggtcacgtcgatggtgaactcttcacccgctttgtggcctttgataccgtcttcgaagcccgggatcatgcgaccctggcccatcgccagtacgaagtcagaggctttgccgccttcgaactcttcgccgtcaacagaaccggtgaagtcgatggttacgcgatcttcagcgtcaaccgcgccttctttttctttccaggtcgcctgctgcttgcgcagagtttccagcatggtatcaacgtcagcgtcggtgacttcaacaaccggtttttcaacttcgatcgcgtccagaccctgcagttcaacttccggatacacttcgaactctaccgcgtaggtgaagtcttcgcccagtttgtattcgcccggaacgtagttcggcgcgccggccggattgattttttctttgatgatcgcgtcaacgaaatgacggctcatcaggtcgcccagcacgtcctggcgaacggaagcgccatagcgctgagcaacaatattcatcggcactttgcctttacggaagccgtcaatgcgaacttttttcgctacgttgaccagctcgcttttgacagcattctcgatgctgtcagcggcgatagtaatcgttacacggcgcccaaggccctgagtggtttcaactgaaacttgcatcttgttacctcaaaaaaatcacagtgctcggtcaactctggaagcgcgtgtaggtggcttcgcagaaccgggatgccctcttcaaatcagaaacacattccctgtcgtcagaatcatcccgaagacattcatatataagacgcggcattatagcggcatcacttttgtgagtcgagaacggttgtcgcctggtgctgcggcatttttcacatttcccgctcaaatttgcccgcaaaagcgctgactttgcgcattttccaggcaaaacaaaacggcccgtaggccgtttttgctaaatctgcaagcaacatactggaaaagcgccagcggttgcaaatgggatttctaagcgatactccctgcgccgcggcacggcggcgaagcaaataccgtatcctgtaatgcttcccattctttaatcgtgtaggtgtgcagcgccagggcatgcaccgtattcgacagctcctcggttagcgtgccgtagatcatacggtggcgattgaggaaacgctcgccagtgaagcgatcgctcactaacaccactttaaaatgactttcagagcccgcagggacgttgtgacgataactttcatccacgacttcgagatacatcgggtcgaacgctgctctaagttttgcttcgatctgttcacgtatcatcatgaattttctcctccgacaacgctgagatgccgccactccatttaaatgttagccgcttttaccgcttccattaggagaaaacaacaaaaaattagcattgttctgatattttcattcaaaagtatcacgtttactggctctggtcgccagatccgtcggggaacgagccattaaccgtggcgggacgctcagaaaaccgccagcacgatggatttacacgcgttgccacttccccttgccgttggcaatgctatgatggcggtaattttccttataacaacaccatgcgttgagacctgaacatgcttaagaagattcttttcccgttggtcgccatgtttatgctggcaggatgcgccacgccgccgaccaccattgaagtatcgccgaaaatcacgctgccgcagcaggatccaagcctgatgggcgtgaccgtcagtatcaacggcgccgatcagcgtccggaccaggcgctggcgaaagtgacgcgtgataatcagctggtcactctcaccgcctcccgcgatctgcgcttcctgctgcaggaagtgctggagaaacagatgacgtctcgcggctacatgattggcccgaacggcgcggtcgatctgcagatcatcgtcaacaaactctatgctgacgtctctcagggtaacgtgcgctataacatcgccaccaaagccgatatcgccatcatcgccaccgcggcaaacggcacgaaaatgaccaaaaactaccgcgccagctactccgttgaaggcgccttccaggcctcgaacaaaaacatcgctgatgccgtcaacagcgtcctgaccgataccatcgccgatatggcgcaggacaccagcatccacgatttcatcaagcaaaacgcgcgttaatgctatcgcgaacccggcctccgccgggttcgtgctttatgctatgtccagtcattacttacgcatttttcagcagccgaaatcagccattttgctgatccttggcttcgcctccggtctgccgctggctctcacctccggtaccctgcaggcctggatgacggtggaaaatatcgatctgaaaacgatcggttttttctcgctcgtcggccaggcctatgtctttaaattcctctggtccccgctgatggaccgctacacgccgccgtttcttgggcgtcgtcgcggttggctgttgaccacccaggtattactcctgctggcgatcgcggcgatgggctttcttgagccggtcacccaattacgctggatggcggcgctggcggtggtgatcgccttctgctcggcgtcgcaggatattgtgttcgacgcctggaaaaccgacgtgttgccagcagaagagcgtggcgccggcgccgcgatcagcgtgctgggctatcgcctggggatgctggtctccggtggactggccctgtggcttgccgaccgctatctcggctggcaggggatgtactggctgatggcggcgctgctggtgccctgcattatcgccacgctgctagcgcccgaaccgagcgacgttatcccggttcccagatcgctcgagcaggcggtagccgaaccgctgcgcgattttttcggccgcaacaacgcctggctgattctgctgctcatcgtcctttataagcttggcgatgcgtttgccatgagcctgaccaccaccttcctgatccgcggcgtgggatttgacgctggcgaagtgggaatggtgaacaaaaccttaggcctgtttgccaccattctcggcgccctgtacggcggcgtcctgatgcagcggctgacgctgtttcgggcactgctcattttcggtttgctgcagggggtctctaacgccggctactggctgctgtcgattaccgataagcacctctattccatggcgaccgcggtattctttgaaaacctgtgcgggggaatggggacggcggcatttgtcgcgctgctgatgacgctatgtaataagtcgttctccgccacccagttcgcgctgctctcggcgctctctgcggtcggtcgcgtatacgttgggccgattgccggctggtttgtcgaggctcacggctggtcgaccttctatctcttctctgtcgttgcggcggtgccggggattgccctattgctgctgtgccggcaaacgcttgagcatacccaacgtaccgcaagctttatgccgcgtagtgagttcccgcaggcctatgcgctggcgctggggatcctgactctgggctgcctgctgctcgcggtgtggctggcgctgctgatcctcaacgcgctggattatacgtcgttctccttcctgtccggcctgctggaggttgccgcgctcaccgccgtcggcgggattttgttcggcggcctgcttgactatctggcgctgcgtaaaacccgcctgatttaaggatccagcatcattattagccgttgtaattacgaaacgtaattataacggcttattaacgcttttatattgtccgccgcgctatttgttgttttgtgcgtttttgatttctggaaattattgacagttttcgttcgattctttaaataatttaaccgattcagctccgggaattttatttttcgttttcacaatgtcttttatttgataattaaatgttaaacaattgttctaatttatgggtggttatgcccattagccgctaagcactccttttcttatccctttcgttatcaatcccgcgaaaatcaggctttgcaagcgattaagtaacactacgttacatatgtgacaaaccaagcagaagccgctaacacagaactgacagagatccaatcatgtttacagtaatgcaaccttaccgtaaaatgcccatacactttaaacgccaccagatcccgtggaattgaggtcgttcaatgagactcaggaaatacaataaaagtttgggatggatgtcattaatcgcaggtactgtattactcagtggttgtgattctgcactccttgacccaaaaggacagattggactggagcaacgctctttgattctgacggccttcggcctgatgatgattgtcgttattcccgccgtcttgatggcagtaggatttgcctggaagtatcgcgcgagcaataaagatgcgaagtatagcccgaactggtcacactccaacaaagtggaagctgtggtctggacggtacctattctgatcatcctgttcctggccgttctgacctggaaaaccactcacgcactggagccaagcaaaccgcttgtccatgacgagaagccaatcaccatcgaagtcgtatcgatggactggaaatggttctttatctatccggaacagggtattgctaccgttaacgaaatcgccttcccggcgaacgtaccggtacacttcaaagtgacctctaactcggtgatgaactcgttctttattccgcgcttaggtagccagatttatgcaatggccggtatgcagactcagctgcacctcattgctgacgaagctggtacttatgacggtatctccgctagctacagtggcccgggcttctcaggtatgaagttcaaagcgattgccaccccggatcgggcgactttcgatcagtgggttgcaaaagcgaaacagtctccgaactccatggactccatggccgcgttcgagaaagtggctgtgcctagcgaatacaacaaagtggaatatttctctaacgtgaaaccggatctgttcaaagatgttgtgaacaaattcatgtctcacgagagcatgaacatgtctaaacctgaaggcgagcacgctgctcacgacgggatggaaggcatggacatgagccacgcggaaaccgctcactaaggggccgaggaagaaaacgatgttcggaaaacttacactggatgcagtgccctaccacgaacctattatcgtggtaacggtggctgcgattatcattgggggactggcgcttctggcagccatcacttacttcggtaagtggtcctacctatggaacgagtggctgacttctgtcgaccacaaacgtctcggtatcatgtacgttatcgtggcaatcgtcatgctgctgcgtggctttgctgacgccatcatgatgcgtagccagcaggtgctggcttcggccggggaagccggcttcctgccgcctcatcactacgatcagatctttaccgcccacggcgttatcatgatcttcttcgtggcgatgccgtttgttatcggtctgatgaacctggtggttccgcttcagctcggcgcgcgcgacgtagccttcccgttcctcaacaacctgagcttctggttcaccgttgtgggcgtgattctggttaacctgtctctgggcgttggtgagttcgcgcagaccggttggctggcctatccgccgctgtcgggaattgagtacagtcctggcgtaggggttgattactggatttgggcgctgcagctctccggtatcggtactaccctgaccggtattaacttcttcgtgaccattatcaagatgcgcgccccgggcatgaccatgttcaagatgccggtattctcctgggcatctctgtgcgctaacatcctgattatcgcctcgttcccaattctgaccgtcaccatcgcgctgctgaccctggatcgttacctgggcacccatttctttaccaacgatatgggtggcaacatgatgatgtacatcaacctgatttgggcctggggtcacccggaagtgtacatcctggttctgccggtgttcggggtcttctccgaaatcgccgcgaccttctcgcgtaagcgtctgttcggttacacctctctggtatgggcaaccgtctgtattaccgttctgtcgttcatcgtttggctgcaccacttcttcaccatgggtgctggcgcgaacgtaaacgccttcttcggtattactaccatgattatcgcgatcccgaccggggttaagatcttcaactggctgttcaccatgtatcagggtcgcatcgtcttcaactcggcgatgatgtggactatcggctttatcgtgaccttctccgtaggtgggatgaccggcgtgctgctggcggtaccgggcgcggacttcgttctgcacaacagcctgttcctgattgcgcacttccataacgttatcatcggcggcgtagtgttcggttgcttcgcaggtctgacctactggtggccgaaagcctttggctttaccctgaacgaaacctggggcaaacgcgctttctggttctggatcatcggcttcttcgtggcgtttatgccgctgtacgtgctgggcttcatgggtatgacccgtcgtctgagccagcagatcgatccgcagttccacccgatgctggttattgcagcttgcggtgcggcgctgatcgcctgcggtattctgtgccagctgattcagttctacgtgtctattcgcgaccgcgatcagaaccgcgacctgaccggtgacccgtggggtggccgtacgctggagtgggcaacctcttctccaccgccgttctacaacttcgctatcgttcctcaggttcacgaacgtgatgccttctgggaaatgaaagagaaaggtgaagcgtacaaacagcctgctcactatgaagaaattcatatgccgaaaaacagcggcgccggcatcgtgattgccgccttcgctacggtatttggtttcgccatgatctggcatatctggtggatggcgatcgccagcttcatcggcatcgtagcgacctggattattaagagctttgacgaggacgtggattactacgtaccggttgcagaagtcgaaaaactggaaaaacagcatttcgatgagattaacaaagcagggctgaaaaatggcaactgatactcttgcgcatactgcccacgcgcatgaacacgggcaccatgatacaggaccgatgaaggtattcggtttctggatctacctgatgagcgactgcattatcttcgctacgctgtttgctacctatgccgttctggtgaacggcacggccggcggaccgacgggcaaagatattttcgaactgccgttcgttctggttgaaaccgcactgctgctgttcagctccatcacctacggcatggcggctatcgccatgtacaaaaacaacaaaagccaggtggtttcctggctggcgttgacctggttgtttggcgccggattcatcgggatggaaatctatgaattccatcacctgatcatggaaggctttggtccggatcgtagtggcttcctgtccgcgttcttcgcgctggtcggcacccacggtctgcacgtgacctccggtcttatctggatggcggtgctgatgttccaggtttcacgtcgtggcctgaccagcactaaccgcacgcgtatcctgtgcctgagcctgttctggcacttcctggacgtcgtgtggatctgcgtgttctcggttgtctatctgatgggggcgatgtaatgagtcattctaccgatcatagcggcgcttctcacggcagcgtgaagagctacatgacaggatttatcctgtccatcatcctgacggtcattccgttcgccatggtgatgagtggctccgcctcgcatgcggttatccttggcaccattctggtgaccgctgtggtgcagatcgtggtacacctcgtgtacttcctgcatatgaacagcaagtccgatgaaggttggaacctgaccgcatttatcttcaccgtaatcatcattgcgatcgtggttgtcggctccatctggattatgtggaacctgaactacaacatgatgatgcactaagagcggcgagtatgtttaagcaatacctgcaagtaacgaaaccaggcattatttttggcaacctgatctccgtgatcggcggtttcctgctggcctccaaaggccacatcgactatccgctgttcgtctggacgctccttggagtatccctggtggtcgcctcgggttgtgtattcaacaactacatcgaccgggacatcgatcgtaagatggaacggacgaaaaaccgggtgctggtcaaagggctgatctcgccagaagcttcgctggtgtacgccaccttgctgggtattgctggcttcatgctgctgtggttcggcgctaacccgctggcctgctggctgggggtgatggggttcgtggtttatgtcggcgtctacagcctgtacatgaaacgccactccgtctacggcacgctgattggctcactctccggcgctgcgccgccggtgattggctactgcgcggtcaccggtgatttcgacagcggtgcggcgatcctactggctatctttagcctgtggcagatgcctcactcctacgccatcgcgattttccgctttaaggattatcaggcggcgaatattccggtgctgccggtggtgaaaggcatttcggtcgccaaaaaccatattacgctgtacatcgtcgcctttgccgtggcaaccctgatgctctcgctgggcggctacgccgggtataaatacctggtcgtggcggcagcggtcagcgtctggtggctgggcatggcgctgcgtggctataaagtggccgatgataaagtctgggcgcgtaagctgttcgtcttttctatcgtcgccatcaccgcgctgtccgtgatgatgtccgttgactttatggtgccggattcacatagtctgctggcttacgtgagataattacgcactcccgtacgatctaaagccccgtatttacggggctttttctttcctgtttcatcatcgctttctttctcatttcatacttccctcccctcttccgacgctttcccgctatctttcatatcaaaaaatgaggaaaaattgagccagcacacaccgggcatcactcgcgccgcacggtcctgcgatgctacctttcgccggggctcttgcccctttgggaaataatcactacaaggaattgcaatgaaagagttaacactgaacgaaatggagtatatctccggtggctttaatctgttcggcgcagccagcggcttcgccagctttgtcgccaactctggcgtcggcttcacctcttttgttctgacctccggcaccgcatttgcctccttcgtcggcgacagcgcgatggcgtttggttccttcctgaccggacagtcaaactgggaaacctttgtgaccgccggaaaggaaaactggggaagctttgttaacaccgccggcaacagctggaatactttcgtgaataacgcggccagcgactggaacacctttctgaccaaagcgtcggcctaagcgacgtctatcttagggcagcgccactggctgccctgtttaacccaccagcatcgcctgcgcgctgtagagcagatcgaggtgatcgcggcataacgcttccagcgaagtgcgcgattgatgactggtcagactcagcgccccccaccaggtcccttccctgtcggttaacggcaccgccagcaccagcatgccaatctcaaactcctgctcaatggtggcgtatccctggcgccgtacctgggcgattttctccatcagcgacgcaatatcggtcaccgtatagggggtacgttgttcccgggttatgcgctgcaggacggtctcacactctgcttccggcagcgaagccagccacaatcgccccccggcggtacagaaaatgggcacccgctccccaagccgcaccgacgtagagttgaacggcgtatgccgactgcgggcgatatagaccagttcatcttcatccaccacccccaccgaggcgtgctcttcggtccggctggcgatgtattcgacaatcggccgtaccatgcgaggaaactgcgccgaatcgacataggcctggccaagccgcagcgtctttggggtaagccagtaatagcgcccgtcggtttgcagatagcgctcatgcaggagcgtcagcagaaaacgtcgcgcggcgctttgcgtcaggccgctcattttcgccgtctgggcgacggtgagctttgggcaggttttggaaaaaagctgaattagcgccagccctttttgtaaaccgacgatcagatcgcgtggatgaatggtgttttgcatattcgctcacatttttgcaacatcattatcgatttcctgcgattatcgcagcgatggtgcgattaacaaccaacatgtccgaattctgcgttgtcgctcccagcttccactgaaatactttcacaacattcatttaacaaatgaggtttgaaatggtcagtggaactacccaggttgtcgccgtgattggtcatccgatcgcccaggtgaaatcaccggataacttcaaccgctactttgccgaacagcacatggacagcgtcatgatcccggtggatatcgtcccggacgcggtggccgcctacctcaacgccctgcgcggctggcagaacatgaccggcgtgctggtgacggtgccgcataaacaacgcgccgccgcgctggtcgacgacctcacgccgcgcgcccgccgactcaacgccgtcaatgtgatccgcaagctggcggatggccgcctgcagggcgatatgctggacggcgtcggctttcagctcgccgccgaggcgcagggttttcagccggcaggtaagcaggcgctgctctccggttgcggcggcgtcggcagcgccatcgcctggggactgtgcgaggcggggatccgtcggctggccctgcacgatcaaaccccggccacccggcagcgcctgcatgaccttctggctgaggcctttccggcggtgcaactgagcgcgctgccagacaccctttacggcctcgatctactggttaatggctcaccggccggcatggccggatttgatgagctgcctctaccgcaggcgcttctggatacgctcgacagcaccactcatgtggccgacgttgtcaccgccccggtgatgacgccgttgctcactttcgccgccgcccgtggttgcaaagtacagaccgggccggaaatggcgctggcgcagatgaggctgatgggccagtttatcggcgccatcccgcaggctcagggagcggcggcatgaagagctgggatgtgatcgtcatcggcagcggcgcggccggttttgccgccgcggtcaccgcctgctgtaaagggctgtcggtgctgatgctggagaaagccgaccagttcggcggcacctcggccatctccggcggcgccgtgtggctgcacgataccgaccaggcgcgcgccgagggcaaaagcggtagcgccgaggcgatgaaaacctacctgcgaaccattatcggcgagggccagtaccgcgaagatcttgccgaagcgtttgtcagcgccgggcgggaagcgctggcctttctcgagcgtgagggggcagtaaagtacagcctgcgtccgctctcgcccgattactatccggatgaacccggcgcagtcgacgtaggtcgtgcgctggaggtggtggagtatgacggccgtgaactgggggacgcgtttcgcgacctgcgttcaccgccgccggggatgctgctgtttggcgggatgatggtcaaccgcgtcgatattcaacattttctcgacatgcgccgctcgctgcgctccctggcccattgcacccgactgctgctgcgctatgcccgcgaccgggtgaagtaccctcgcggcacccgcctggcgatgggcaatgcgctgattgcccgcatggcgactacggcgctgcgtaaaggcatgagcctgcggctgaatgtcaatgttctgacgctgtgcgaagcgcaaggcgcggtccgcggggtggagattgagtatcaggggcaaaaagagacgctgcacgcccggcgcggggtggtgctggccgcaggcggcttcgccgcgggcgcgctggcggcgcgctatcggccacatacccgcgagcatttcaccatgtcgccgccggccaacgatggcgccgcgctgcatctcgcggcggcgcttaacgctcgcgagggagccgatcgggcctccaactttttctgggcgccggtatcggtgctgacccgggccgacggcagcgaggagcgcttcccccatctggtaaccgatcgcgcaaaaccgggcgtgattgccgtcaatcagcgggcggtacgcttcgtcaacgagtccagttcctatcaccatttcgccagcgcaatgcaggatgcagcggaaaatgccccctgttttttactctgcgacgcccaggcgatgaagcgttatggcctcggactggcgcgcccggcgccggtcaataatgacgccctggtcgccgctggctatctgcacaaagccgataccctggccgcgctggcgcaacagcttggtctggatgcccaaaccctgagcaaaacggtagcccgctacaaccgcgacgccgcgcagggcgtggatcgggaatttgctaaaggcggcaacagctataaccgggcgatgggcgatccgggccatcagcctgacgcctgtaatgcccccctgctcagcgcgccgttctatgccatcaaactttataccggcgatctggggacctcacgcggcctggtcaccaccgccgatgcccaggtcgtcaataccgaaggacaccccatcccggggctgtacgcggtgggaaacgacatggattcgctgatggccggcacctatccgggccccggcatcaccctcggcccggggctgacgtttggctatctcgccgcctgccatctggcacaacactccacccactaatcaggaaaacatcatgatctacgaaaaacgcacgtacaccatcaatccgctgaaaatggccgactggctggcgctgtaccaaagcgatgccctggcggtgcaaaccgaccatctcggccagctaatcggcttcttttttaccgagatcggcgtggtcaatcaggtagtgcacatctgggcttatgaaagcctggacgatcgtctggtgcgccgcgcgcggatggcccaggacgaacgctggcagaccttctcgcgtaaaaatcgcgaactggccgccgtggaacgcctcgagtcggtgctgatgcgccccaccgctttttcacctctgcagtaaggagtccaacatgagcgggcctgtgaaggtggatgtgctggtggtcggctccggcgccgcggggctctctgccgcggtgactgcggcgatgcacggcgccagcgtcatggtggcggagaaagcgtcagtgctcggcggaaccagcgcctggtccggcggctggctgtggatcccccgcaacccgctggcgcgggcggagggcatcgacgaagcagccgacgcgccgctgacctatctgcagcatgagatggggggcgaagccgccgatattcgtctgcaaaccttcctgcgttacgggccggagatggtggaatttttccatcagcggacggcggtgcagtttctctcgggcagcgccatgccggactttcacccgtcgccgggtgcggcgaacggtgggcggtcggtcaccgcgcaaccctacgatggccgcctgctcggcgactggctccatcgcctgcgtccgccactggaaaccattagcctgggcgggatgggcatcgccggcggcgcggatatggcgcattttttcaatgccacccgctcgccgcgctccgcgctgtatgctgcccgccgcctgctgcgccacggctggcagcggctacgcgccggacgggggcagcatctggtcaatggcaatgcgctggtcgcccgtctgctgcgatccgccctcgacgccggcgtgcgttttcagctcaatgccccggtggtccggctgctgcagggtccgccgggcgtgtccggcgcggtgttgcgcagcgacggcggggagattcacgtcgaagctggcgccgtggtgctggcctgcggcggttttccccacgatcgccagcggctggcgcaggtggtgccccacgcggcggagggttacggccatttctccgccgcaccgccggacaatcagggcgaggggatcaggcttggcgaatccgtcggcggccagttcgacacttccctgcgccacccgctggcctgggcgccggtgtcccgcgtcactctggccagcggccagcagctaatgtttcctcatctggtggagcgcgccaaacccggggtgatcgccgtcctgcccaacggcaaacgttttgttaacgaggccgactcttatcatgactttatcgccgccctgctggcggccacacccgcgggcgacacgccgcaggcctggctgctggccgatcgtcgcgcgctgcgtcgctacggcctgggccacgccagaccgttcccgttcactcccaccgcctggctgcgtaccggctatctgcagcgaggaaacaccctggcggagctggcgaagcagtgcgctatcgacgccaatgcgctggcggaaaccgttgaacgctttaaccacttcgccagcgctggcgaagacgtcgattttcaccgcggggcatcagcctataaccgcgcccagggtgaccatcaggtgacgctcggaccgctgcgcgaagggccgttctacgcggtgcgcattctgcccggctcgctgggcaccttcagcggattgcaaaccgacgaacacgcccgggtgctggatgaacagcagcagccgataccgggtctgtacgccatcggcaacgacatgtcgagcgtgatgcgcggctattaccccagcggagggatcaccctcgggcccgccatgaccttcggctatctggtgggtaaaaacctggcaaaaaaaacaaatataaacaataacataacttgatttccacgaatggatgcaccctaactctcttcacctgcaactgtaccggagccctttatgaacaagcgtaccctatcgctcgccgcgctgaccctgctcgatgtccctccccccgaacaggtgcggattgcggccagaaccggttttacccacgttgggctgcgactgctccccgccacaccgaccgacccggactacgacatgctgggcgataccccggccgtccgggcgacgctcgccgcgttgatggaaactggcatccgcgtgtcggacgtggagatcgtccgcctgacccccgggtttaccctcgacgatcggctgcagcgttttatggagaccgccgcgcgtcttggcgccggacaggtgttagtcgccggcaatgatgacaaccttcagcgcagcgctgacaacctcgccatcctcgccgcggccggtcgtccatttgggctgaccatgaatcttgagccgatgccctggactcagttgcgcaacatcgccgcagcgcaagcactaatcgccgccagcgggcgggaagacatcggcattctggtggacgctctccatttctggcgcgcgggagaatcgctcgccgccctctccagcctgcccgcgcatcatctcaactatatgcaactctgcgatggcgcggcgcagaggccggagagcgagcaggaacttatccgccaggcccgctcggcgcgcaacgtgccgggggaaggcggtctggatctgcatggtctgatgtcggccctgccggcgacgctgccggtctctctcgaagtgccgcttgacggcgagcaaggcgccctgccgcctcttcagcgggcgcagttactgtttgatgccgcgcagccctacctgcgcgcctgcgcataaggaatacgctatgacacagactcaacgcctggatgtcagagagttaataaatcgtaacccgctgagccgatttcagaagctgattatatttctcggcttttgcgtcatcgctctcgatggttttgatatcgcgatcatgggctttatcgccccgacgctaaagctggaatggggggtaagcaaccaccagctgggtctggtgatcagcgccgcgctgatcggcctcgcgctgggggcgattttctccggcccgctcgccgactggctgggacgtaagaaaatcatcatcaacagcgttttcttcttcggtttctggaccatcgccaccgccttctcgcacaacgtagaacagatgatgttctttcgctttatgactggcctcgggctgggcgccgcgatgccgaatatcgggacgctggtgtcggaatacgccccggaacgccagcgttcatttattatcaccgtcatcttttgcggcttcaccttcggcgcggcggcgggaggattttcggcatcgtggctgatcccccagtttggctggcactcgctgatggcgctcggcggtattctgccgctgctgtttgcccccctgctcatctggctgctgccggaatcggttcgttttctggtgatcaaacaagcgcccgcggcgcgcatacgcgccattcttaaccgtctctatcccggacaaatcagcgacaacgtgaggtttatcctgccggcgcagccggcggccggcaacgcgatgcgcattgtcctctcccgccagtacggtttcggctcgctgatgctatggctggtctactttatggggctgttcctggtctatatcctcggcagctggctgccaacgctggttaaagcggtaggaatgaccgttagccaggcggccatcatgacggcgatctaccaggcgggcggcaccctcggctcgttgtttgccggctggctgatggacaggatcaacccccatcgcgcgctgggtataatctacgccgttggcggcctgttcaccatggcgatgggctacgccgcgggcagctttgccttgctctgtatgctggcgtttatcagcggcgcctgcctgaacggcgcgaataccggcatgaacgccctctccgcccgctactaccctacacaggcgcgggcgacgggatccagctggatgcacggcgtcgggcgcatcggcgccattctcagcgcctttgccggcgccgagatgatggcgctcaacctgccctttgaaagcgtctttttgatcctcggtatcccggcagccctcaccgtcgcaggcctggcggcgaagggcatctttgcggccggtcatcctcccgtcgcttcaacttcccccgcgtctgtgcgcggagcgtcatagcggcatctggtccccggtgcaatcggcggattgcaccgccttcagcagctaataaagaaaatttatttcatattttgttgaaacgaaaaaacgcccgcaacaatctggacgactccggcaggcgatatcccgccctcaccttttcaaccaagcgcaaaagaaactatcgctaattcgatccccctcgcatatatggataataaattccacaacacaattgaaacagaacaaacatttccttaagttgaagtcagtctatccggatgcgcgttgccgcaggcgtcggcattgagcgcctcagagtgcaaatgatttcaaaaaggagagcaccatgttaaacggcctgaaacccttatcccgttccctgcgctggggcatggtcggcggcgggggaaccagtcagatcggctacagccaccgctgtgcggcgctgcgtgacaatgtttataccctgctggccggcgcgcttgacgtcgatgccgagcgcgggcgcgcgttcggtgagcaactgggcatcgcgccggagcgctgctacgccgactaccagaccctgtttcgcgaagaggcgcagcgccctgacgggatcgaggtcgtctcggtcaccaccccgaacaatacccatttcgccattaccaaagcggcgctggaggcgggactccacgttatctgcgaaaagcccctctgctttaccgccgaagaggcgcgcgagctggtggatctgagcaaaaaacagaacaaaatcgtcggcgtcacctacggctatgccggctatcagatgatccagcaggcgcggcagatgattgccgatggactgctcggcgagatccgcatcgttaacatgcaattcgcccacggcttccataaccaggccgtcgagctgcaggcagaatccacccgctggcgagtaacgccgaagtttgccgggcccagctatgtgcttggggatctggccacccatccgctgtttgtcgccgagaccatggcgccgcagctcaatatcaaacggctgatgtgctcccgtcagagctttgtttcctcccgcgcgccgctggaagataacgcctttgtcctgatggaatatgacaacggcgcggttggatccatgtggaccagcgcggtcaacagcggcgccatgcactcgcaaaaagtgcgcatcgtcggcgaaaaagcaagcatcgaatggtgggatgagcatcctaaccagctcagctatgaggtgcagggcgagccggcgcgcattctggaacgtggaatgccctacctgtcgccgaacgcgctggcggatgaccgcattggcggcggccatccggaagggctgttcgaagcctgggccaacctctatcgccgctatgcgcaggcgattgacgccacggaccgcgacgatcgcgccttcctgcaagacttctggtatccggacgtcgaagccgggctgcacggcgtctattgggtagagcagtgcgtcaaatcggctgacgctggcagccagtgggttgactttactttaccttaattttccccctcgccagtggagtccccctccactggtttattgatttttaccaacttgtcgcatcgcgcaacagccccgtaatatctgttaaacaaacatttatttacgcttcttaccccccgccgctacactaggcgcagtttttatattgaggtggtaatgaacgataacaaaatgacgccaggggaactgcgcgcgacctggggtttggggactgtattctccctgcgcatgcttggcatgtttatggtcctgccggttctgaccacgtatggcatggcgttgcagggtgccagtgaagcgctgattggcctggcgatcggtatctacggcctggcgcaggcggtgttccagatccccttcggactgttatctgaccgtattggccgtaagccattgatcgtcggcggcctgcttatcttcgtgctcggcagcgtcatcgccgcgctcaccgactccatctggggcatcattcttggccgcgccctgcagggctccggcgccatcgccgccgcggttatggccctgctgtccgatctcacccgcgaacagaaccgcaccaaagcgatggcctttatcggcgtcagcttcggcgtcaccttcgccatcgctatggtgctggggccgattgtcacccaccagctgggtctgcacgcgctgttctggatgatcgccatcctggcgaccgtcggcatcctgctcaccctgtgggtggtgcccaacagccataaccatgtccttaaccgcgaatccgggatggtgaagggctgctttagcaaggtgctggcggagccgcgcctgctgaagcttaactttggcatcatgtgcctgcacattatgctgatgtccacttttgtcgccctgcccggacaactggaggccgccggcttcccggccgccgagcactggaagatttacctggtcaccatggttatctcgttcatctcggtggtgccgtttatcatctacgccgaagtgaagcgcaagatgaagcgcgtcttcctgctctgcgtcgccatcctgctgattgcggaaattgtcctctggggcgccggaggctacttctgggagctggtggcgggcgttcagctcttcttcctggcgtttaacctgctggaagcgctgctgccgtcgctaattagcaaggagtctccggcgggctacaaaggcaccgcgatgggcgtctactccaccagccagtttctcggcgtggcgattggcggcgcgcttggcggctgggtcgatggtttctttgattcgcaaaccgtgtttctgctgggcgccctgctggcgatgctgtggctgctggtggccagcaccatgagcgagccgccgtacgtcagcagcctgcgggtggaggtgccggacggcgtggtggtcgacagcgcgctgcaggcgcgtctgctgagcgccagcggggttcatcaggcgctggtggtacccgaggagcgttcggtgtatatcaaaatcgacagcaaggtcaccaaccgcttcgagatagagcagctcatcaaaggggtataaaaaaagcggggaattccccgctttttgctgtctgcccgccgccttagtcgcggaagtttttgaactggaacggctgtcccagatcgccaccgcgcaccagcgccatcaccgactgcagatcgtcgcgggacttaccggtcacgcggatctcttcgccctgaatctgggcctgcactttcagcttgctgtctttgatcagtttaacgatcttcttctgcaccgcgctttcaatgccctgcttcagcttcgcttcaacaaaccaggttttaccgctgtgcacgatatcttccggtacgtcgagggaggtgccttcaatgccgcgcttgagcagcttggcgcgcaggatatccagcagctggttcacctggaagtcagactcgctcagcactttaatggtcttgttggcgtcgtttaattcaaaagtggcttcaacgccacgaaaatcaaaacgcgactcgacttcgcggctcgcgttgtccaccgcgttacgggcttcctgaagatcaacttcagagacaatatcgaaagatggcatcttttcctctccttccgtttcttttgcgttgcataatacctgcaacgcggcataactcaacttgttatcccggaagcttagctgattacgcaacgctcgcgctattttccccgtgatgtccgacgatgcgaaaagcgacgagatagactttagccatcagcgcctgggatagcggcagatgaggaggaacaatgaaagtaaccgtactgggatgcggtgcgctgggacaactatggctgaccgcgttgtacaaacagggacatgaagtccagggctggctgcgcgtaccgcagccattctgtagcgtcaacgtcattgaaaccgatggctcagtgttcaacgaatcgctgacggccaacgaccccgattttctcgccagcagcgagctgctgatcgtcaccttaaaggcctggcaggtgtcgaatgcggtaaagcacctggccgggatcctgccggacaccacgccaattgtgctgattcataacggcatgggcaccgtcgaggagctgcgcggcgtgaaacagccattgctgctggcctccacgacccaggcggcgcggcgcgatgggaatgtcatcatccacgttgcccagggcaccacgcatatcggaccggcaaaaagctacgagggggactacagctatctcgcagaagttctgcagagcgtgctgccggatgtcgcctggcataacaatatccactcggccatctggcgcaagctggcggttaactgcgtgattaaccctctgaccgcgctcaaagggtgtaaaaacggcgatctgcgcgactatacgcaggaagttgcggccatttgtcgcgaggtggcggcggtgatggagcgcgaaggtattcatacctcggcggaaaacctgctattttatgtcgaacaggtaattgaaagtacggcagaaaatatctcttccatgctgcaggacgttcgcgcccagcggcatacagagatcgactacatcaccggttttctgctcaaccgcgcccgcgcccacggcgtcgccgtaccggaaaacgcccgcttatttgaattgatcaagcgtaaggagaatgaatatgagcgcgtcggcactgatttgcctcgcccctggtagcgaagagaccgaagcggtcaccactatcgacctgctggtccgcggcggagtaaaggtgaccaccgccagcgtcgccagcgacggcagcctgaccatcgtctgttcgcgcggcgtcaaactgctagcggatgcgccgctggtcgaggtggccgatggtgatttcgatatcatcgtcctcccgggcggtatcaagggcgcagagtgcttccgcgacagcccgctactagtggaaaccgtccgccagtttcatctctctgggcgcattgtggccgccatctgcgccgccccggcgaccgtgctggtaccccataatctgttcccgatcggcaacatgaccggttttccggcgctgaaggaacatatccccgccgagcagtggcaggataaaagagtggtctgggatccgcgggtgaatctgttaaccagccagggtccggggacttcgattgatttcgccctgaaaatgatcgatctgctggtggggcgcgagaaagcgtatgaggtcgcctcacagctggtgatggccgctggcatctataattactacgaagcctgatagccggtccgcgccgcgggctggcaccccttttcctgaggagtcgcagcatgtcccggagcgcaaccgattctcgcgatcttgttatcagccgcctgctcagcgcgcccgcccaagccctgtggcgcgcgtgggccgacccggcattactccgaacctggtggtgccctaagccctagcaaaccgaggttctggcctttgattttcgcgccggcggggcctttcacaccgtgatgcacgggcctgacggtgaacgcagcgataaccccggctgttttcttgaggttatcccgcaacaaaaaatcgtcatgacctcgatgctgacggcggattatcgccccgccgtttcccccttcgcgatgacggccatcatcacctttgccgatgaacaggtcgggtgtcgctatacggctacggtgctgcatgccgatgatgaaacccgcgagcagcatgagcagatgggatttttcgagggctggaatatcgtcatcgatcagctcaatgacctggcgctgaccctgcgctaatacactcccctgccaatagtaaaaaggccttccatcagggaaggccttttgcatcataacaatctgttacgggcgataaactttcacgttgctgaagccctgctcgcgcaaataaagcgcctgcagacggctcatcaccccgcgctcgcaccacagcagccaggttttgctctgatcgagatcgccaaatttggtgcttagcttgtagaacggcagggaaacaacttcaaccccctcgaccttcagcggcttgtcttcctgctcgtcgatggagcgaatgtcgaggatcgcgtcattggcgccaaagccggtcacggtttccacttccaccaccgtctcttccgtctgctgggcgatctcgcggatatcgatattgctcgcctcttcaaccactttatcaaggatgctgaaatcgaagtgttcttcttccgcttcaatcttcgccttcaccgccttcacggtcggactcttggagatcacgccgcaatattccggcatggtgcgggcgaaatcttccgtgccgatctcacgcgccaggtcgatgatgtgctctttatcgtgcgaaatcagcgggcgcaggatcagagtatcggagacattatcgatcaggcgcaggttagtgagggtctgactggagacctggccgagcgcttcgccggtgaccagcgcctgcacgccatagcgttccgcgacttttgacgcggcgcggaccatcatgcgcttgagcacgacgcccatctggccgtcgtccactttttcaaggatttcgccgactactggctcaaagttaatcgccacaaagcgaacgcggtgtgagctgccgaagcggttccacagataatgcgcaacctggcggacgccaatctcatgggcggcgccgccaaggttaaagaagcagtaatgaacgcggcagccgcggcgcatcagcatgtagctggagacgccggagtcaaagccgccggagatcagcgacagcacatcttcctgggtgccgatcgggaaaccgccgatgccttcatagcggcctttcaccagaagcaggcgatcgttttcaatctcgagattgacagtgacgtccgggtcggtcagcttcacgcgcgccgtttcaatatgctgattcagaccgccgccgacgtagcgttccacttcaattgaggtgaattcatgtttgccgcgacgcttcactcgcacgcagaaggttttgccttccagcgcctcgcgccacagcggcagcgtctgctcgaaaatatcgtgcagcgaggtgaacggcacgtcttcgacttccagaatatggtggatgccggggatacgggtcagcgcatcgcgaatagccgggcgttgattttcatctttcgcgcgaacttcgatatgatcccaatgacggacgacggccagcgtctcatcatagtttttgagaacgttacgaatgttcccggttaagattttaatgaagcgcaaccgcacagattggcttttgatggtgatttccgggaacaatttaatgataaacttcatagcgacaatagttcgttggcaagcccgacggggctataagcaaaagttgtaaagcagcgcacaccggtgcctgcatcctgggcgcggagtatatcaccattgcgcgttatttgcttacacgcgtgacttcgttaccatacccggtattgccgtcgcgacataacaagagtctacattcactatgccaaagaaaaatgaggccccggccagctttgaaactgctctgggcgaactggagcagatcgttaaccgtctggaaagcggcgatttgccgttagaggaagcgctaagcgaatttgagcgcggcgtacagctggcgcgccaggggcaaagtcagctgcagaaggccgaacagcgcgtgcagatcctgctggcggatagtgaagattccccgaccacgccttttacgccggacgctgaataaatggatttcccgcaacaattgcaggcctgtgtggaacaggcaaacgaagcgctgcgccgtttcatcgccccgcagccctttcagaacactccgctggtggaagcgatgcattatggcgcattgttaggcggtaaacgcctgcgtcccttccttgtctacgccaccggcgagatgttcggcgtgtgccgtaccacgctggatgctcctgccgcggcggtcgaatgcattcatgcctactccctgatgcatgatgatttgccggcgatggatgatgacgatctgcgccgcggcctgccgacctgccatattaaatttggcgaagccaacgcaattcttgcgggagatgccctgcaaacgctggcgttctctatactgagtgatgcgccgatggtcgacgttcctgaccgggaccggctggcgatggtttccgaactggcgcaggccagcggcgtggcgggcatgtgcggcggccaggcgctggatctgcaggccgagggacagcaggttgatttacaggcgctggagcgtatccatcgccataaaacgggcgccctgatccgcgccgccgtccggatgggagccctgagcgccggcgaacgcggccgcgctgccctgcccgcgctggatcgctatgcggaaaatatcggtcttgccttccaggtccaggatgacattctcgacgtggtaggggatactgcgacccttggcaaacgtcagggtgccgaccagcaattgggtaaaagcacctatcccgccctcctgggtcttgagcaagcccggaagaaagcgcacgacctgatcgctgatgcccgccggtcgttagatgagctggccgcacaatctctggatacttcggcactggaagcgctcgcgaattacattattcagcgcgataaataaacaaaaaatgagtctctgatgagttttgatattgccaaatacccgaccctggcgctggtagattccacccaggagttgcgcctgttgccaaaagagagcctgccgaagctatgtgatgagctgcggcgctatctactggacagcgtcagccgttccagcggtcactttgcctctggcctcggcacggtggaactgaccgtggcgctgcactacgtgtataacacgccgttcgatcgcctgatctgggacgtcggccatcaggcctacccgcataaaattctgaccggtcgccgggacaaaatcggcaccattcgtcagaaaggcggcctgcatcccttcccgtggcgcggtgaaagcgagtatgacgtgctgagcgtcggtcactcctccacttccatttccgcgggtatcggggtggctatcgccgccgcgaaagaggataagcagcggcgcgcggtgtgcgtcattggcgacggggcgatcaccgccggcatggcgtttgaggcgatgaaccacgccggggatatcaaacccgacctgctggtggtgctgaatgacaatgaaatgtcgatttccgagaacgtcggcgcgctgaacaatcatctggcgcagctgctctccggtaagctctactccaccctgcgcgaagggggcaaaaaggtcttctccggggtgccgccgattaaagagctgcttaagcgtaccgaagagcatatcaaagggatggtggtgccgggcacgctgtttgaagagctgggctttaactacattggcccggtggatggccatgacgtgctcggtctggtcagcacgctgaagaacatgcgcgacctgaaaggcccgcagttcctgcatattatgaccaaaaaaggccgcggctatgagcccgccgagaaagacccgatcaccttccatgcggtgccaaaattcgaccataccagcggcgtactgcccaaaagcagcggcggcctcccttcctactcgaaaatcttcggcgactggctgtgtgaaacggcggccaaagacaacaagctgatggcgatcacgccggcgatgcgcgaaggttcagggatggtggagttttcgaagaaattccccgatcggtactttgacgtcgccattgccgagcagcatgcggtcaccttcgccgccgggctggcgattggcgactacaagccggtggtggcgatctactccaccttcctgcagcgagcctacgatcaggtgatccacgatgtggctatccagaagctgccggtgctgtttgctatcgaccgcgccgggatcgtcggcgcagacggccagacgcatcagggagcgttcgatctctccttcctgcgctgtattccggatatggtggtaatgaccccgagcgatgaaaatgaatgtcgccagatgctgtacaccggctaccactacagcgacggcccctgcgcggtgcgctatccgcgcggtagcggcaccggcgcgacgctcgagccgctggcatcgctgccgatcggcaaaggggtggtgaaacgtcagggcgagaaaatagcgatcctcaactttggcaccctgctgccggaagccgcggcggtagcggacaaactcaacgccaccctggtggatatgcgctttgtgaagccgctggataccgcgctgatcctccagctggccggcgagcacgacgcgctggtgacgctggaagagaacgccatcatgggcggcgccggcagcggcgtgaacgaagtgctgatggcccaccgccgggcggtaccggtgctcaatattggcctgccggattattttattcctcagggcactcaggaagagatccgcgccgacctcggccttgatgccgccggtattgaagccaaaatccgcgactggctggcataattgccccttccgctcctgctatgcttaagggatacccttgatgaatagcaggagcgcactatgcactatatccccctcggtgatactgccttacgtgtttcccgactctgcctcggctgcatgaccttcggcgagccggaccgcggcagacacgcctggacgcttccggaagagagcagccgcccgcttatccagcacgccattgaaggcggcatcaacttcttcgataccgcaaatagctactccgacggcagcagcgaagagatcgttggccgcgccctgcgcgactttgcccgccgcgacgaggtggttgtcgccaccaaggtgtatcaccaggtcggcgatctggcggaaggactttcccgggcgcagatcctgcgctccatcgacgacagcctgcgccgtctcgggatggactatgtcgacctgctgcagatccaccgctgggactataccaccccgattgaagagacgctcgaagcgctggacgaggtggtgaaagccggcaaagcgcgctatatcggcgcctcgtccatgcatgcccgacagtttgcccaggcgctggcgctccagcagcagaacggctgggcgcgcttcgtcaccatgcaggatcactacaacctgatttaccgggaagaagagaatgagatgctgcccctgtgccaacgtaacggcgtagcggtgatcccatggagtccgctggcgcgcggcaggctaacccgcccctggggtgagaccaccgcccggctggtctcagatgagttcggcaaatcgctgtacagcaccagtgaagaaaacgatgcgcagatcgccgggaagctcgcggacgtggcggaagaactcgacgccagccgcgcccaggtcgccctcgcctggctgttaagcaaacccggcgtcgccgcgccgattatcggcccgtcgcgtcaggaacagctcgatgatctgctgcaggcggtggatttgacgctctccccggaacagatcgacaagctggaggcgccgtatcagccgcatccggtggtgggatttaagtgaaaggcgtggtttccccggcagcgtagcgttgccggggagaggcggttaaagcagaccgatgggccagtgatggccaatgacgtacagcacgccagcggagatcacgccggcgacgatgtcgtcgaccataatccccattccgccgtggatattgcgatcaaaccagcgaattggccacggcttccacatatcgaagatacggaaaatcacgaagccggcggccacccactgccagtccatggtcggcagcgccatcagggtgatccacatcccgacgaactcgtcccagacgatgctgccgtggtcatgggtgcccatatctttggccgtgcgatggcacagatagacgccgatacagatgctcatcatcaccaccagcgagtaaagctgccaggggagaaaggtcatcagataccagaacgggatcgccgccagcgagcccatcgtccccggcaccaccgggcttaagccgctgccaaagccagtcgccagcagatgccacggattacgcatactcaggcggctaagcgcctcgtctcgactacgcaaagtgatcgtatccctttaaatcaagcgcaaccggcttaccgtcgcggataaactgcagcccttcgctctccggcgcaatctgtccgatacaggtaaaacgcgcgccaagatggccaagagccacgtccagcgccccgcggttcagctccggtacggtaaagcacagctcgtaatcttccccgccggcgagcgcccagcgcagcgcctgctcagaatcaacctggcgcagcatcgcatcggagtacggcatggcatcgagatcgatacgtgcgccgcagccgctggctttgagaatatggcccagatcggagatcaggccgtcggagagatcgatagccgatgtcgccaggtcacgcagcgcctggccctgcagcacgcgcggcatcggccgcagatgacgggccagcaggtagtcggcgtcagacggttcatccaccgttagacgattctgcagtaccgccagaccggcggcgctgtctcccggagtgccggtaacatagatccagtcccccggcttcgcgccagcgcgtttcatggcgcgtcccggcggcacaaagccgtggatacccagcgtcatggagagcgggccacgggtagtgtcgccgccaatcagttgcatatcgtaatagtccagctggacaaacaggctgtcgctgaaggcttccagccagacttcatccacctccggcaaggtcagcgccagcgtgagccacgccggttccgcgcccatcgccgcgaggtcgctcaggttcaccgccagcgctttataggcgaggtcggcagggtcgatatcgggtaagaagtgattgcccgccaccagggtgtcggtgctgattgccagcgtttttttctcgggaatatgcaggagcgcgcagtcatcgccgatgccggtttcaacatcaaggcgggcgcttttaacgcgatcaaaataacgggcaatcagggagaattcgccgcatgccatacgttatgcctcagcaaaataataaataaggccgggctgcgaggcgaccctcgcaaaacccggcctgcagtttacttcttgtggggacgaattaccggagccgctttgtccagcacgccgttaacgaacttgtggctatcttcagcgccgaaggttttcgccagttcgatagcttcattgatggcaactttatacggtacgtcatcacgtttggacagctcaaacagcgcgatacgcagcaccgctttttcaacctggcccagctcttccagctggcgggacaggtagggcttcatcaggccgtcgaggtacgcgctgttagtcgccactccggacagcagttcgcggaaatacagaacatcaacatcttttacgtcctgttccgccaggaactggtattcgacatcagcgatgtcgttgtgggataactgccaggagtagagcgcctgaacggcacactcacgggcgcggcgacgagcagcaggtttcacggaattccccttacaaaaatcaggccttgatggctttcaatacgttaatcatttccagcgcggtcagcgcagcttctgcacctttgttaccggctttggtgccagcgcgctcaatggcttgttcaatactttcagtggtcagaacaccaaaggctaccgggatttcgctgtcctgagcgacatgcgccaggccattgctggcaccgcctgccacatattcaaagtgggcggtaccgccgcgaatcaccgtccccagcgcgatcaccgcgtcatatttaccggttttcgccagtgcgccagccgccagcggcagctcatacgcgcctggaacccaaacgacggtgatgttttcatcttttacctgaccaatgcgtttcagggcgtcaatcgcgccttccagcaggctgtcattgataaagttgttgaaacgcgcaatggtgatggcgacgcgagcgtccggggtagcaacgttagcttcaataatgttcatactcttccttcgggttcatgtgccccgcaaggggggcggattttatcatattattctgagcgctgcttcctaataatcaggaaagcctcacgcagtggttaaatgcaggcagacatccgggccaacctgacgtatctcattgaatttaaaatggggggcctggctcagctcttcaagccccggcagcgcgcataatccacgcgccgcattgcctaacagtttaggcgcaatatagacgataagctcgtcgaccaggcccgcctgcagcagcgccccggcaagcgtagcccctgcctcaacccagacgctgttgatctgctgtttgccgagcagcatcatcagcagcaccagatcgagatggccgttatgctccggaaccagcagcgtgcgggcactttccggccactgccgttcatcggcgcgcaggcgggcaaacagcgtttcccccgcctgctgcacaatacgatgctcaggcgtgacgcggttctggctgtcgatgacgacgcgcagcggctggcgcaaattctcttcgggataaagcgcctgggtatcggcgctcagctcctgccagcgcacggtcagcgccggatcgtccgccagcacggtggcgctgctggtcaggatggcatggctctgggcgcgcagacgctgcacgtcgcgtcgcgcctgcggggaggtgatccactggctttcgccgctggccatcgccgtgcggccgtccagcgaggcgcccagcttcagctgcacccagggaaaaccggtgcgcatccgcttcagaaagcccttattcagcgcttccgcttcgttcatcatcagcccatggctgacctcaatgccggcctgctgcaggcgatacaaaccgcgccccgccacctgcgggttcggatcctgcatcgcggcgaccacgcggctgacgccggcggcaatcagcgcatcgcagcatggcggcgtacggccatggtggctgcagggctcaagagtgacgtaggcggtggcgccgcgcgccttttcgccagccatgcgcagggcgtgcacttcagcatgcggctcgccggcgcgatagtgaaacccctcgccgacgatctcaccgtctttcacaatgacgcagccgacgttagggttaggatgggtagtaaagcgaccgcgcgcggcaagcttcagcgcacgcgccatgtacatttcgtcctgcatggcttagtcctgtaagcgggcgatctcttcgccgaattctttaatatcttcgaagctgcgatagaccgacgcgaagcgaatataggcgactttatccagctttttcagctgctccatcaccaggttgccgatcattttgctggccacttcgcgctcgccggtgccgcgcagatgagtcttgatatggttgaccgccatttccacgtcgtcggcgctaaccggacgtttctccagcgctttcagcatcccgctgcgcagcttgtcttcgttgaagggttcgcgcacatcgttactcttcaccacccgcggcatcaccagctccgccacttcgaaggtggtaaagcgttcgttacagaccaggcactgccgacggcgacgcacggaagagccttcccccaccagacgagagtcgatcactttggtatccacggcgaaacagaaagggcaatgcatagcgcgtcctgacaggtagttaaactgaagagtagtttaccgcgaagtgaccggactacaaagaaagagcttttgagacaaaggatctatgggagatgaggccggtttggctaccattaagcatcctctgtaaacggaatcctgaccatgacaagacgttacctgaagctcgccatcgcgggctgcctgttcaccctgaccgcctgcgcccagcaaagcgaaatccgccagatgcaccagagcgtgagtacgctgagccaggagatgacccagctcaaccagcaaacgatcaaaatcacccagcaaaacgcgctgaacgccaaatccacccgcggcgtctatctgctgccggaggccaagaccccggcgcggctggagagccagatcggcaccctgcgcatgtcggtgggcagtattaccccggatggcgatgggtcacgcctgaccttacgcattcagggcgaatccaacgatccgctgccggcctttaccgccaccgtcgcttccggacagatcaccggcaccacccatagctatcaggaagtcaatgttcaggatcagctgattagcgcgccggccagcaccctcgcccccagcgatgtcgatatcccgttgcgcctcaatgtaacgccagataaagtcggttttattcgcgtacacgatatccagcccgccgccgcccagtaagccttcagccgggccagccccgcccggctacgtcctgccccgtcgttcttatccacttacaacttttcgcaagagttcattagaaatcgttctgcagcgcgattttcagtagcattttgtcaagaaatgcatagaatcgtgaacgcaatcgattacgcatgttctggttatgtgaaacaacacgtatttttgtgagcaatgattcctataatagacccccacagaaagacgaaatatttagaaacgcttcggcacttcttttaacgccttcaggctcaatttaaacagtggcattactatgaaaaaaacattactggcagcgggtgcggttgtggcgctctccactacttttgccgcgggcgcggcagaaaacgacaaaccgcagtatctgtctgactggtggcaccagagtgttaacgtggtgggcagctaccacacccgttttggaccgcagatccgtaacgatacctacctggaatacgaagcgttcgccaaaaaagactggtttgatttctacggctatattgatgccccggtattcttcggcggcaacagcacggcaaaaggtatctggaacaaaggttccccgctgtttatggagatcgaaccgcgtttctctatcgataagctgaccaataccgacctgagcttcgggccgttcaaagaatggtatttcgccaacaactatatctacgatatgggccgcaacgactcccaggagcagagcacctggtatatgggtctgggtaccgatatcgataccggcctgccaatgagcctgtcgctgaacgtctacgccaagtaccagtggcagaactacggcgcctccaacgaaaacgaatgggacggctatcgcttcaaagtgaaatactttgtgccgctgaccgacctgtggggcggttcgctgagctacatcggcttcaccaacttcgactggggttctgacctcggcgatgacaacttctacgatctgaacgggaagcacgcgcgcaccagcaactctatcgcctccagccacatcctggcgctgaactacgcgcactggcactactctatcgtcgcccgttacttccataacggcggccagtgggctgatgatgcgaagctgaacttcggcgatggtccgttcagcgttcgctcgaccggctggggtggttacttcgtggttggctacaacttctgattgctgatacagcaagacagcgcccgggccgcagctcctgctgcccgggcttttttatttctcccgcacctcgcaccggaccttgcgcagaaaatcgcttaacgagcggtcggcgcactcgctgaatcgacgttcggtccttctgacctccagacaacggtcgaggcgaaaattgcggtaatcattgcgcagttcgcaccaggccaccagcagccagcgctccccccagaaaaacagccccagcggcagcacttcacgccacgtcacctgaccggattcatcctggtagtgaagctgtaatacctgctgattggatacggcctggtggataacgtcaaaatgggttttagcatagcgatgcgcgccaaggtcaggggcaaacaggcgagtctgctccgcctggcgccgacgcgcctccggcaggatcgccagcattttttcctgggcggactccagcgactgcgacagcgcctcaccgccccaggtttttagcagccgaatcgcagcgatcagcgcctcggattctttggtggtcagcatcagcggcggcagatcgtagcccgccagcagccggtagccgctgcccgcttcgccctccaccggtacgccggagagggagagatcgcgaatatcgcgatagacggtacgctccgacacgcccagccgctccgccagcagcgcggcggtagtgagccgcctgccgcgcaggatctgcacaatctgaaataaacggtcggcgcgtcgggtcatgtctcacttcacaaaagttaaggttaagccggctggtgcaggccgacgcggttgccctcgctgtcggtaaacagggcgatggtgccaatatcattcggcagcgtcagcgggccgaagacacaggccccacccgccgaggcaacgcgctccagcgtggcggcaagatgatcagtatgcagataaataatagcgccctgcgccgagggcgcgataccttcaaatttggccagcgcgccgccgggggccggatcctgatgcgggaacaccgccagctcggcgcagtccatggtttcgcgacgcagcgacacttgcatcaccggctcataaaacgcgacggcgcgatccatatcggcgaccggaatttcaaaccagttaatcacgttgttcatacttcctcctgctcgttagtgagttcagaggcagtgtatgggagggctcctgacagcatactgtcagcaggttttgtcgcgggcaaaaaaatcccggccgcaagggccgggatagctttatctcaactgaaccggattacggcagaatagacggctgatccgccccttctttctcaaccttctgctggatcagatgctcgcgcttcatgcccagcttcaacgccagcgcggaggcgacgtagatagaggaagccgtaccgatggaaacaccgatcagcatggtcagcgagaagccttccagaatcgggccgccgaacaggaacagcatcaggatcaccatcaaagtggtaccagaggtgatcaaggtacggtgcagcgtctgggtcaacgacacgttaaagatctcatacggcgtaccgcggcggatcttacggaagttttcacggatacggtccgataccacgatactgtcgttcagcgagtagccgataaccgacatcaacgaggccacgatggtcaggtcgatctcgatatggaacagcgacagcacgcccatggtgatcaccacgtcgtgcgccagggcgataaccaccccggcggccagacgccattcgaagcggaagccgacgtagatcaggatacagaccagcgccgcaatcagcgccagggcgccggtttgcgcgaggtccgcgccgacgctcgggccgacaaactcaatacgcttcactgccgcattctggctggtcgattcgttaatcaccgtcacgaccttgctgcccagctcctggctgccgttggcgtcatgcaccggcggcatacgtaccatgatgtcgcggctgctgccaaagttctgcacctgcggctcttcaaagcccgctttctgcagggaatcgcgcatctggtccagatcgaccggtttctcaagggtaatttcaatcaccgtaccgccggtgaaatcgagcccccagttaaacccgcgaacgccgatgatggcgatcgacacaatcagcagaaaacctgaaatgccgaaggcccagtagtcccagcgcataaagtcccagactttacggccgtggttcaattgttcaacagtatattcctgtgccacaacgcactcctcagatagacagctttttaacgcgcttgccgccgtacagcaggttcacgatggcacgggtgccgacgatagcggtaaacattgaggtcgcgataccgataccggtggtaatcgcaaaccctttaatggcaccggtaccgaccgcgtacaggatgatcactttgataagcgtcgtcacgttggcgtcgaagatcgagctgaacgcgccgcgataaccttcgtcaatcgcctgctgaacggtacgcccgttgctcagctcttctttgatacgctcgttgatcagaacgttagcatcgaccgccaccgccagggttaacacgatacccgcgatgcccggcatggtcagcgtcgcccccgggatcagggacataatgccgacaatcagtatcaggttggcaatcagcgccgaggtcgcaatcaggccgaacttcttatagaagaggatcatgaacaggatagagaccaccagaccggccagacaggcttccagaccctgcttgatgttctgcattcccagggttgggccgatagtccgctcttcgacgatctgaatcggcgcaatcagcgcgccggcacgcagcagcagcgacagctgacgcgcttcgttcggattgctgataccggtgatacggaagctgttacccagacgcgactggatgttggcgatgttaatcacctcttcctctttcgccaggatagcgcgaccgttagcgtctttcttaccgctgtctttatactccacgaacagggtcgccatcggcttgccgatgttgtccttagtgaagttagacatgatgttaccgcccgcgctgtccagcgagatgttaacctgcggctggttgtactcatccatgctggaggtcgagtcggtgatatggtccccggtcaggatcacccgcttgtacagcactaccggctggccttcacgcgtctgcttcacttccgagtcgcccggcacgcggccagaggcggcggcggactggtccacgttagtattgaccagacggaactcgagggtcgcggtcgcgccaaggatttccttcgcacgcgcggtatcctggatacccggcagctcaaccacgatgcggtcagcgccctgacgctgaaccagcggctcggcgacgcccagctggttcacacggttacgcaggatattaatgttctgctgaaccgcgtactcacgggcttctttcaggcgctcatcggtcatcaccgctttcaggctgttgtcaccctgagaggaaataaccagatcgcgatggcgagggctgagataagagatagcctggtcgcgcgccgcgctgtcgcggaagacgatgctcagaccgtagttgtcttctttacgcacggtcgcgtaaggaatgcctttgtcgcgcagctcgctgcgcaggctatcgatgttctgttcctgcagtttgcctaacgcggtgtccatgtcgacttccatcaggaagtgcacgccgccgcgcagatcaagacccagcttcatcggctcggcatagagcgccgccagccagcgtggggttgccggagcaaggttcagcgccacgacgtatttgtcacccagcacgtgaagcagcgcttcgcgcgcgcgcagctgggtatcagtggtgtcgaagcgcgcaagaatagcgccctcttccagtgccacagacttcgcggttattttttcttcttgtaaagttttctggacctggatcagcgtttgctcactggcggcgacgccgcgcgcgccagtgatttgaacagccggatcctcaccatacaggttgggaagcgcatagatcaggccgacgacaatgacgacgaccagcatgacgtacttccacaaaggataacggtttaacacggcagttccctttgggaaaagttagattacagcgccttcatggtgcctttcggcagaacggcagcaacgaagtcacgtttgataaccacttcagtggtatcgttcagcgcgatagcaatgtagccagtttccgctactttggtcacgcgaccgaccagaccgccgttggtcagcacttcatcacctttggcgatggagttcatcaggttcttatgttccttggtgcgcttctgctgtggacgcaggatcatgaagtaaaaaatcagaccgaacaccaccagcatcagaatcagagacatcgtgctgccctgcgccggtgcacccgttgccgctaccgcatcagaaataaaaaagctcattgaaattccctcattattaaaattaatcaacgttcaaaggaggcacggtgcgcccctgacgttggtaaaaatcggtcacgaagctctctaatttaccctcttcgatagccttgcgtaaaccagccattaaacgctgatagtagcgcaggttatgaatggtattgagacgcgcgcccaatatttcgttgcaacggtcgaggtgatgcaagtaagcgcgtgaataattgcgacatgtatagcaatcacactcggcgtccagcggcgcggtatcgcttttgtgcttcgcgttgcggattttcaccacgccgtcggtgacgaacaggtggccgttacgcgcgttgcgcgtcggcatgacgcagtcgaacatatcgataccgcgacgtaccccttccaccagatcttccggcttcccgacgcccatcaggtatcgtggtttatcggccgggatctgcgggcagacgtgctccagaatacggtgcatgtcttccttcggctcaccaaccgccaaaccgccgacagcgtagccatcaaagccaatctctaccagacctttcaccgagatatcgcgtaaatcttcgtaaacgctaccctgaataatgccgaacagcgcatttttattgccaaggctatcgaaacggtcgcggctgcgcttcgcccagcgcagagacatctccattgagcgcttggcgtaatcccagtccgccgggtacggcgtacattcgtcgaagatcatcacgatgtcagagccgagatcgtactgaatctccatcgatttttccggatcgaggaaaatcggatcgccgttgatcggattgcggaagtggacgccctgctcggtgatcttacggatatcgccaaggctgaacacctggaaaccgccggagtcggtcaggatcggtcctttccactgcataaaatcgtgcagatcgccgtgcagcttcatgatctcctgacccgggcgcagccacaggtggaaggtgttgccgagaataatctgcgcgccggtggcttccacctcttccggcgtcatccctttgacggtgccgtaggtgccaacgggcataaaggccggtgtttccaccacgccgcgctcaaacaccaggcgaccgcggcgggcgcgaccgtcggtggtatccagttcaaatttcatgcttgctcctgcgtcagaaaaacagtccgacgttttcatactcgccacggaatgattccgtagctaaaaaatgcgttatggcgtctacaagccggcgtaccggccttttcagggacgctcagaaatagcctgcggattgtacgtgataaacatcgcatccccgtagctaaaaaagcgatatttctgctcaaccgccaccttataggcgttcatggtgtgctgataacccgcaaacgccgacaccagcataatcagtgtggattcagggagatggaagttagtcaccagcgcatcgatcacctggtactgataacccgggtagatgaaaatctgcgtatcgtcgaagaacggcgcgatcagcgcgtctttcgccgcctgcgccgcgctctccagcgaacgtaccgaggtggtgcccaccgcgatcacgcggttgccgcgcgctttcgccgccagcaccgcatcgaccacctcctgcggcacttcggcatattcggagtgcatggtgtgctcttcaatgctgtcgacgcgcaccggctggaaggtgcccgcgcccacatgcagggtgacaaacgccatctcaacgcctttggcgcgcagtttgtccagcagcggttcgtcgaaatgcaaaccggcggtcggggcggctaccgcgcccggcctggtgccatagacggtttgatagagctcgcggtcggcgtcttcgtccgggcggtcaatatagggcggcagcggcatatggccgatcccgttaaggatctccagcaccgggcgctcgtcgttaaactccacttcaaacagcgcgccatgacgcgccagcatcgtggccttaatgctctcgtcatcgcccagcagcagctcggcgcccggcttcggcgcttttgaggcgcgaatatgggccaggatgcgcttatcatccagcatccgctccaccagcacttcaatcttgccgccgctggccttgcggccgaacagacgcgccgggatcacccgggtgttgttaaacaccagcagatcgcctggattaagcttatcgagaatgtcggtgaaggtgccatgcgtcagcgcgcccgtcggcccgtccagggagagcaagcgacagctactgcgctcaggcatcggatagtgggcgatcagagattcgggtagttcaaaagcaaaatcggtaacgcgcatgacggtaactcagactgaataaagaggcgggtagtctagtgccggggcggtctggctgcaacctttacccctccggatgaatgacataatctatattccaaatcattccgaatgccgccatgcggcaaccgaatgccttaccggtggcaaaggtgccgcgcgcggccagacagcatgccattcggccaccgaggcgccgttcagcgcaacatcggtgtttccacctgcccgctcgtatttaaaggatgtcgttttatgaattttctcgcccacctgcacctggcccatctcgccgacagttcgttgcccggcaacctgatggccgacttcgtgcgcggcaacccgcagggcgactatccggcggagatcatcgacggcatctttatgcatcggcggattgacgtgatgactgacaacctggcggaagtcaaagaggcgcgggagtggtttcgcccgcagacccgccgcgtcgcccccatcaccctcgacgtcatgtgggatcatttcctgtcccagcactgggcgcagctctcccctgacctgccgctggacgagttcgtacgctacgccgagcggcagatcgtccccatcctgcccgactcgccgccccgcttcgtcaatctcaatcaatatctgtggtcggagcgctggctggagcgctatcgggaaatggattttattcagcgcgtgctgaacggcatggccagccgccgtccacgtctcgaggcgctacgcgactcctggcaggatctggatacccattacgaccgtctggagacacagttctggcgcttttatccgcagatgatgcgccaggcagaaaacaaacagctgtaatagccacgtcattgataggtaaaagctggctgaacgattgttagcgcctctttgtgttattgccgggcaggctctatacttgcccgcgttgcgttccaaataaccttagtaattacaggagaatcaaatggttctggtcactcgtcaagcgccggattttactgcagccgctgtgctgggtaatggtgagatcgttgagaaattcaatttcaaacagcacaccaacggtaaacctaccgttctgttcttctggccgatggacttcaccttcgtgtgcccgtctgagctgatcgcgttcgacaaacgttacgaagaattccagaaacgcggcgtggaagtggttggcgtttccttcgactccgagttcgtgcacaacgcatggcgtaacaccccggtagaccagggcggtatcggcccggttaaatacgcgatggttgctgacatcaaacgtgaaatccagaaagcttacggtatcgagcatccggacgaaggcgtagcgctgcgcggctctttcctgatcgacgctaacggcgtggtacgccaccaggtggttaacgacctgccgctgggccgtaacatcgacgaaatgctgcgtatggttgacgccctgcagttccacgaagagcacggcgaagtctgcccggcgcagtgggaaaaaggaaaagaaggtatggccgcctctccggaaggcgttgcaaaatacctgaccgaaaacgtctccagcctgtaatcggcacgcgttttaataaaaggctcgctcaggcgggccttttttgttagcggcgtcaaaatttaagaaaatgacccgccgatatttgtgaccagcgatacacttctgccgaaaaaattcgccctacctctcactttttctctggcaaatttcagcgtcaaaatacaaagccttcataacagcctgaaaaacatataaattatttatatcgttttctgccggtactttgccgtcgatgtgatccccatcaatatttaaaaccgcggatgtgatctcatccatcattttcatcaatgtatttggtcatgatttaactcaggaacaggaatacgttcaggagctgaggatggaaattatttttgacccgtcgttaatcgcccttaagcagaatatttcccgtgcggaagaggccatcgaactggcgggttcattacttgccaggcgccagatttgcagcgccgaatatgtcaacgagatgctgacggtatatgaagattttggcgccgccatcgtgatagatgacgggattgccatgccgcatgcccggccggaaaaaggggcattacagaccgggttctcacttgtcaccaccgccacgccaatctccttcggccacgatgagttcgatccggtttccgtggtcatcgcgatcgccggcgccgatgctgacagtcatatcaaaatgatccaactgatagcctcgctgatcgagtcagatattgtgacctttcttcagcaggaaaatgacgttaattcagtcttacatttcattcaaaaacaaatggagtagtcattatgttagttatcagaacggtttgtggtaacggtattggcagctcattgatggctgcgaataatgtgaaaaagatctgtgacgaattaggcatcaaagcggacgtcgcctcggtcgattttgctaacgccgtcggggaaaaagccgacctttacgtcacgatcaaagaactggcaaatcaatttccggcccactgtcatgtcgccatcattcgcagctacgtccataaagcgaagatcgccgaggatattaccgacgcgctgatgaaaattgctgcgactcactcttaatcagcatagagggaacgaccatgcaggctattcttagtttcttaacggaaatattcagtcaacccgcctttttaatggggcttatcgcctttgttggtttagtggcgctgcgctcccctggcaataaactgcttaccggcacattgaagccgattttaggctatttgatgttgagcgctggggcaggcgttatcgttgccaatctcaatccgctgggcggtattatcgaggccggatttaatatccgcggcgttattccgaacaatgaagccattgtctccgtcgcccagaagatgctgggcgtggaaaccatgagtattttactgttaggctttattttcaacctgattatcgcccgctgtaccaagtataaatatatctttctgaccggccatcattcgttctttctcgcctgcctgttctccgccgttctgcaggcggcggagttccagggctggatgttgatcctgatcggtggattcctgttgggctcatggtcggccatctccccggccatcggtcagcgttacaccaggcaggtaaccgaagacggcgggatcgccatgggccatttcggctctctcggctactacctctcggcatggatcgccagccggaccggcaatccggcaaattccttcgccgataccgaaatttcagaaaagtggggctttctgcgcgataccacggtcaccaccggtatcgtgatgtttgttatctactttgtctgcagcgctgtcgccgggtcggcgtacctgagcaccatcaccgaccaaaacatgctgatcttctcggtgctgaccggtctgcagttcgccgttggcgtagccattgtctataacggcgtgcggctgatcctcggcgatctggtgccggcgttccagggcatcagccagaagctgatcccggactccatcccggccgttgactgcgcggtgttcttcacctttagccccaccgcggtggtggtgggattcatcagctcctttgtgggcgggctggtcgggatgctcttgctcggcgggctgggcatggcgctgattattcccggcatggtgccgcacttcttctgcggcggcacgtccggcgtcttcgccgacaaactgggcggtaagcgcggatgtatcatcgcctcctttatcggcgggatcttcctcgccttcctgccggcgatgctgctgccggcgctcggcaacctcgggtttgaaaacagcaccttcgccgatttcgacttcgcggtatggggcatcattatcgggaatgcgttcacccagtttggtcagatcactatctatctgatttgtctggcgctgctcgtcgcgctgctggcgcctttctgcttccgtcacgtccaggtggtgggcaacacgctcagctatgaggagctgacggcgaagcagaaaaatgaataagcgaggtcatttttcccggcgggagggccacgctttccgccgctgacaaataatcaggagtggttatggctattttgtccattggatttgcttgtttcgatcagtttttctttctcaatgaatggccccaggagaataccaaaaacttttgtcatgattttattgaaagcggcggcggtccggcggccaatgcggcctggctgctgggattatggggcgaggaggtttattacattggtcatctgcagcaggacctttacggtcagcgcattatcgatgagtttgccgaggcgggggtggataccagccaggtggttttctccgatgacatgatcaccccgctggcctcggtgctggtcaatcgcttaacgggttcgcggacgattattacccgcaagatgcaaacgccgccttccctgacctacgagcaaaagctcaaactggacgacctcgccgagcgactgattgccagcgaggagccggtcaccattttaattgacggccatgaggcggaaatcagtgaatatttaattaagaaactgcccaacgccagggtcgtgatggacggcgggtcactgcgcgccagcaatattaaactggcggcctggactgactattttgtagtgagcgaacatttcgcccgcgattatatgagctatcgctcgctgagcaccgaagcagaaattaaagcggccctgattgagttgaataaaatttgccgcggtgaagcatttattacccttggcgaaaaaggctgcgcttttttaaaaagcggtatgctgcagatcgtcccgtcctggctgtgcaatgctgttgataccaccggcgccggggatgtatttcacggcgccttcacctatggcgtccattactcatggcatatcgataacattattttatttgccagcctgaccgccgccatttctattgagaaaaaaggggttcgggaatcgatgccggacctggcggtcgtccaccactcgttaaatagctacgagagaaacttaacgcaatattttgaagaataactgcatttaataaatatcaagaggtgaatatgttagtgtcgatgaaggacatgcttcagcatgccctgcgggacggctacgccgtcggtcagttcaacattaataatctggaatgggtcggcgccgtattaagcaccgcccagcagtgccgctcaccggttattttgggggtgtccggcggcacggttaagcatatgctcgggttaaaatgtattcatgacattgtggttaacgccatggagtatttgcatattgatgttccggtggcgctgcatctggatcatggcacctcccgggaggcctgcgaagcggcgatcgccgccggcttcagttccattatgtttgatggctcgcatctgccgttcagggaaaacctggccattactcgccacctggtgacgctggcccacagcaaaggtatctctgtggaggccgaactggggaccatcgccggcagtgaagacggcattgtcaattccgaagtcatctacgccgatccgcaggagtgctacaccctggtgacagaaacccaggtggattgcctcgccgccgcgctgggctccacccatggtctgtataaaggtaaagcccggctgggatttaccgagatgaaagccattgccgagcaggtgaaggttccgctggtgctgcatggcggcaccggtattgccgatgaggatatgcgccgggcgattgcctgcggcaccgccaagattaacgttaataccgaaaatatgtacgcctggtgccaacaggtgaaagcaattttcgccgccgacaccggacacgatgtgaacgatccgcggaaagtcatcgcccagggactgcagccggtacgcgagatgattgcccgccgcatggcgctctttggctcagagcagcgctattgacgccgggcctgcggctgaaaccaccgccccgacgctgccggggcggtggcgtcaggtatcaaaaggcaaagcaggaacagcccagcacgccccagaaggcctgctcgtcagagaccggaatcgacgacttacgcgcaatatcatgctgatggccgtggacgccacagctaccgcagcactggtgcatctgcaccatggcgccgattttagccgtcgccggcggagcggaacggtaatggcctgggaccttcaccaccggcgaccactccggcagcaccggaataggcggcggcgccagcggcgagaagtgaccggcggcgtacaccactttgccgtcaaccaccgtcagcaccgactcaatgcctttgatctcctcttccgcgacgctgaagtagtctttcgacagcaccaccagatcggcaagctgaccggcggccagacggcctttcttgccctgctcgctggagaaccaggcgctgcccgccgtccacagctccagcgcgacatcgcgcggcaggcggttggcgtcgtcatacatcgccatcccgccaacggtgcgcccggagaccagccagtacagcgcggtccacgggttatagctggcgacgcgggtcgcatcggtgcccagccccaccggcacgtccagcgccagcatctttgctaccggcggggtatgtttcaccgcctctttgccgtagcgatcgacaaaatattcgccctggaaggccatccgatgctgcaccgcaataccgccccccagcgccttcacccgctcaatgttacgctcggtaatggtctcggcatgatcgaagaaccagtgcaggccattaaacgggatatcgcggttcaccttctcaaacacgtccagcatccggctgatggactcatcgtaggtggcatgcaggcggaacggccagcgatgctccaccagatggcgtaccacccgctccagctcatcctccatgccttgcggcagatccggccgcggctgcaggaaatcttcaaaatccgccgccgaaaataccagcatctcgccggcgccgttggcgcgatagaagtcagtcccctgccccggcttcagcatgtcggtccagcgttcaaaatcctccagctcctgcttcggccgctgagtaaacaggttgtaggcgatgcgcacggtcatctgatctttcgcgtgcagctgttcgataatttcgtaatcttccggatagttctggaagccgccgccggcgtcgatggcgctggtcagccccagtcgattcagctcgcgcataaattgacgggtggagttcagctgcagatccagcggcagcttcggccccttggccagcgtagcgtaaaggatcatggcgttcggtttagcgatcagcatcccggtcgggttgccgtggctatcgcggacgatctcgccgcccgccggatccggcgtctctttgctataccccacggctttcagcgccgcacggttcaacagcgcgcgatcgtagagatggagcacaaacaccggcgtatcaggcgccgcctcgttcagctcttccagggtcggcatccgccgctcggcgaactgaaattcgctccagccgccgaccacccgcacccactgcggggacggcgtgcgatccgcctgatccttcagcattcgcagggcatccgccagcgaggggacgccctcccagcggagctcaaggttgtagttcaacccaccgcggatcaggtgcaggtgagaatcgttgaggcccgggatcaccgtatgccctttgagatcgacgatttgcgtcccctcggcggcaaagctcatgatccgatcgtgacttccggtggcaacaatttttccgtcggcgatggccacggcttccgccaggggattcgcacgatcgagggtatgaatctgaccgtgggtcagaatcagtgtggcagtttgcgacataacgcactccttgaggaggctgactcagtttttcttcaaccagccagcaaacaggcgggtcacgatgggcatccagaaccagaccaccagcgcaaccacgcaggcatcattgatgaggtgcagcagcaggctccccttaagcgacggcagcagcatgccggtcaccgcaggcaccaggttggtgctggggaaaatcaccagcagggtgatcagaaactgtttccagcgccgcggctggcgtacgttcaccgtcggcggggtaaaccagaaggccggttcagtccgcacctcagtccgatcgccttccgtcagcagtggggcaatctcagccaccagttgccgacgggtttccgactgcgtccaggcgtagaggtgctccagggtatcgaagcggattatgacgctccacagattctgccctgcggcgggccggatcacattcgccccaagatggccgggaaattctgccgcaatgggcataattttaccgagccactcttcgtagcgctggctgtgttgcggatcgagcagatggctgataaccagggtcaccgatttttgctgcgccatgacgagttccttgcttcagggaaatggccggttttctcctgccactctccataaatgatctgacacaacatccttcatgctgcgttgaagcggcaggcgggcacgtccccgtgaacttgaataaattcagtagctggggacggacaaacgcagccaacaacgcagcagcctgaaggatggagtgatttacgctttacgctccggcgcgccatgcaccatggtataagcgtaatccacgcccatcccgtaggcgccgctgtgttcgcgcaccaggtccattaccgcatcgtaggtcgctttgcgcgaccagtcgcgctggtactccagcagcacctgctgccaggtcaccggcaccgcccccgcctgcaccatccggtcaatagaccgctcatgggcgtcgacagaggtgccggcggaggtatccgtcactacatagacctcgtagcccgcctccagcgccatcaacgccgggaaagtcaggcagacttcggtccacagagcggagatcaccagctttttacggccggtcgctttcaccgctgccacaaacgcatcgtcttcccaggagttcatggaggtacgttcaatcggcttgacgtcaggatgcacggccaataattccggccagatatagccgctaaagcttttggtctctacggaggtataaatcaccggcacattaaaaattttgcccgctttcgccagcgccacggtgttatttttcagggtctggcgatcgatattcgccacgccaaaggacatttgcggctgatggtcaataaagataagcgcggaattagtgggatcgagcagttcacgaatagacattaaataccttcttaatcaattagttaaaaagatgacatgatgattaatgcgtcgtgtggatcctgactgataaagcatggtgagtatagccagttatttctaacaagttattaaggattttttatggtttatattttttgccgcgaccaggatttattcacgcctgttttaatcaaatttttacgccaaactgttctgatttattcactggctttgattattgcgcttaggtacaacagagaaaacaaattaatggatagcttcatatgcgcgtaaactttgatgttttgatgatccttgatgcccttgaccgccacggatccttcgccaccgccgcggagtcgctgtataaaacccccgccgctctgagctatatgatccagaaactggagagcgatctgaacatcgtgctgttggatcgttccggccatcgggcaaaatttaccgataccgggcggctgatgctggagaaggggcgacagcttttaagtgccgccagagatctggaaaagcaggcccagcagctgagcgcgggctgggagcgagagctagccatcgcccttgacgcctcatttcccttttcggccctgctgccgctgatcgccgagttttacgcgcaaaacccacagacgcgactgaacttcagccatcacaccctcgccggttcgtgggaagagctgacccatcatggggcggatattatcctcggcgccatcaatgagccgcccacctccgcggagtggtcatggcaaaccctcggcgcgttggataacatcttcgtcgtcgccccccatcacccgctggctcaggcgaaggagccactggccaataaacagctcagccagcatcgggccatcgtgatccgcgacagcgcccgctattgccatccgctcaacagcaatctcctcgacgagcagccgcaaatcggcgtcgatgatttcgccagtaaagtcgaactattgtgcgccgggctgggctgcggctttctgccgcgccatatcgctcgcccgtggctggtaaaaggcagtctggtggagaaaagcgtcgcctgctggcgggaaaaggatattacctatatggcctggcgcagcgggaatgatgggctggctcagcgctggtggcgggaggcgctcctccgcggcgacctgctgagccagctctaccattaacggccggaccagacgttggcggagatggccgggagggtcagcaccccgtcctggaaggcgccggcgccctcctgcagcgtccacccggccacgttcagcagcggggaatcttcgataaccacctcgcaggcttccccgcggttaatcgccaccagcacccgctgctgtttgtagacgcggacaaacaccaccacgttatcctcggcgtaaatcacctgacagccgccgtagcgcagcgcctggtgggccttacgcagtttcgccatccgctgatacagcgccagcagctgggtatcctgcagcgccggatcccacgggaacggtttgcggcagaacggatcgttattgccatccacgcccacctcgtcgccatagtagatgcacggtacccccggccagctgaacagccacaccaccgccagcggcaggcgcgctacgtctttgccaagaagagatttaaaacgcgccgtatcatggctgtcgagctggttgaacatccgcagctgctgctgatgcgacagcccggcgcgataattatccatccacaccatacaggtctgggcgtctattttctgcggatcgtaagagatatcggtattggcgaggaatccccagatcgggaaggtgaagccgcgatagttcatcgccgcgtcttcggcatccgcctgcagccactggcgcgcgtcgccaaaatgttcgccaaagacaaaagcttccggctgcgcttgcttcgctgcctgggtaatgccggcgatatgctgcaggttattccgcgccccgccgccttcgcccagcatatgcaccacgtcaagacgccagccgtccatgctccatggcgccttcagccagtggcgtacgatactgtcttcaccggcatagatctcgttgaccaggctggtcgaccgatagtcgagcttcggcagactggcatagcccagccagttgtgcgcctgcccctcctctgagaaggtaaaccagtcgcgccacggggagtccggatcgtggccagcgccgccgctgccctgctggtgacggtcgaaccagggatgggaatcgccggtatggttgaacacgccgtcgaggatcatgcgcattcccgcccgctgggtgttgtggcgcagccggagcagcgccgcgtcgccgccaaactgcggatcgacgcgccgataatcctcggtatcgtatttatgcacgcggggggcggcgaaaaccgggttcagatacagagcggttacgccgagctgcttcaggtagggaagtttttcgctgatgccgtcgagatccccgccgtagaacgtcgacccgcccgcctcgccggtaagcgggtcgtcccacgccttgcgcacaatctcccgtcccgccgcgtgatggtaatagaccgcatcctggtcggcgtcacgcgcggcgctgcgggcaaagcgatcggggaaaatttgatagaacacctgatcggccacccactgcgggccggcgtccggcaggtcaatggcgaactgctccagtcgggccggcgggaatcgggtgaagccttgtggcgtaaaccagcgctgatggtcggcccacagcagcttaaagctgtagcggcggcgcggctggccgctggcgagagagatttcgccgcgccatgccaccacgcctggctgcggcgcctggcggagccgctgcatcggcagcgacagctcttcgttatcctcttccgcgcgcagcgtgatccgctgcggcagcgactcaccgcttaaccacagagtaataaacagtcggtcctgttgcaccttgataaagggtgcaaccggaaggtgccatgccttcaacatcgtgaatcctcattgtgcagaatgggcacaccttgccatagccgccgggcgcagaactcatcatctcagaactttttgggggaggataacgggggaggacgcgggaccgcaagccgccccggccgcgcgatgctgaccggggcgatgtcgattactgagcctgcgccaggcggcgctcacggcgggtcttaaagacccagccgagcagcaacagcgcaatccacgccataccgacgtacagcgagatgcgggtgtccggatgatagccgataagggcgataataaaggccaggaacagcaggccgatcaccgtggtcaccaccccgccagggactttgaatttcagcgccttaacctcttcgggcgacagacggcggcggaaggctatctgtgacagcaggatcataatccacacccacaccgtggcgaaggtggccagggaggcgatcaccaggaaaacgttctccggcatgatgtaatttaggtataccgcaaacagcagcgcaatggtcatcaccatcaccgtcacccacggaataccgcgacgcgacgttttagcgaacaccttcggcgcgctgccctgctcagccatgccgtgcagcatacggcccacgccgaacacgtcggagttaatcgccgacagcgaagccgtcaggaccacgaagttaagaatactggccgcgaaggtaatgcccagatgctggaaggtcaggacgaaggggctgccgtcggttcccacctgattccacgggtagatggacataatgacgaacagcgtgccgacgtagaacaccagaatgcgcatcggcaccgagttgatggcgcgcggaatggatttctccgggtccttcgcctcaccggcggtaatgccgatgatttcgatgccgccgtaagcgaacatcaccatctgcagcgacatcaccattcccagccagccgttgctgaagaagccgccgttgctccacaggttatgaatccccgtcggctggccgccgttgccgatcccccagataatgatgccgaacccggcgaggatcatgatgataatggtggccactttgaagaacgagaaccagaactccagctcgccaaacaccttgacgctcatcaggttgacggcgcagatgatcagcaccacgctgagcacccagatccagtgcggcaccgtcgggaaccagacgcccatgtagatgccgaaggcggtaacgtcggcgatggcgacgatcaggatttcaaagcagtaggtccagccggtgatatagcccgccagtccgccgaggttttcctgggcatagcgggagaatgagctggcggcagggttatgcaccgacatctcaccgagcgcccgcataatgatatatgccgcgacgccgccgataatgtaggccaacagtacgctgggtccggccattttaatggcgtcggccgagccgtaaaaaagcccggtgccgatggcggaacccagagccataaagcgaatgtgccgggtgcttagcccgcgcttaagcttgttactactttccatcgtggtttttcaatgccgtttaacacaaaaaataaaaaaccacggaacccgaagtcccgtggttaaacgcttgtcctcaccgccggttaatgcgcgctggaagtcacctgacgtccggctgcgcgatcccagatcaccgcgagaatggtcatcacggcggtgggcatcagccaggccaggccctgctccgccagaggcagacgcgcggtccagtccggcagaatcgcggcaaatgccgatgacttaatcccgtcaatgataccaaacatcaggctgataaacatggccggcgcgataacgcgggacgaattatgccaccaactgcgggtaaagcttaatacaaccagtgcgatacacggcggatagatagcggtcagcaccggaatcgatacctggatcagatggctaaggcccaaattggagaccgccatggagaacaggccgagaacaaagaccagcgtgcgataggagaacggcagatactgggcaaagaactcagcgcaggcgcaggtcaggcccaccgccgtcaccaggcaagcgatgaagatcagcgccgccagcaggaaactgcccgccccgccgaaggtgtgctgcacgtaggcatggaggatcgccgcgccgttggcggactgatccacgagagtagcgctgtcagagcccagacggaacagcgccagatacagcagggtcaggccgacgcccgccatcaggccagcccagacggtatagcgggtcaacagacgcgcttcgctgacgccgcgtgagcgagcggcattaacaatcacgatgccgaacaccatcgcgccgagggtatccatggtcaggtagccgttgacgaagccattggagaatggcgccgtacgatacgcttccagcgcgtcgctgatcgggcccgctggccagatgatggcggcgaccgccagcacaatcagggcgataattttcagcggcgcaaggaaattgcccacggtgtccagcagtttgcccggatagagggagaccagaatcaccagcgcgaagtaaataacgctgtagatcagcagcggcagcgggccgtcgccggtcagcggcgcaataccgacctcaaaggagacggtcgcggtacgcggcgtcgcgaacagcggtcctaccgcgagatagcacaccaccgccagcaggataccggccactttaccaatcggggtgctcaggctttcaacgccgccgccgactttcgccagcgccaccaccgtcagcaccggcagacccaccgcagtgatcaggaagccgatcgccgccgtccagacgtgctcgcccgcctgtaagccaaccatcggagggaaaataatgttgcctgcgccaacgaacaacgcgaaggtcataaagcccaacgctatgatgtcgcgagattttaactgatgggtcataaattcattactgcctgtggatgtggtgttgtaaaaaaaatggaaaaataccgcgctcccctctcagggacgatacagcggccattgccggtaaactcagcgagatatgctcccgaagcggcgtgggaaagaattgtttttggtattaccacgcaaaagcagtctgtcatcgactgcgcaggcgcaatttaaacgcttataacgttttaaagcaaggcacgatcgcaaaagcagatgattatgctggttatgtctttcacaccagaatcatttaccatattgatagaaaacccgtggcttatcatgcgaacaaaaaagcagcgcacgctcattaaataggcgagaaaaaacgactgccaatgaaaatgaccagctgaagctggtcattggcaagataaactgacagcgcgtcgatcaggcgtcatttttggcaattaatcgttccgggagcaggaagctaaagcgggttcccttgcccaccgtgctgtcgatttccagccggctgtcatgatggttaaccgcgtgtttgacgatcgccagtcccaggccactgccccccgtttgccgggaacgggctttatccacccgataaaaacgctcggtcagacggggaatatgctccggcgcaatgcctggcccgttatcctcgacgctgaacagcgctccctgcggggttcgctgccagctgacgcgaatttcggtccccggcggggtgtggttcaccgcgttatagaccaggttggagatggcgctgcgcagctgctcctcattacccagcaccttgagctgctcatcgacggtgaagatcagcgtctgtttctcctggctgagagtttgcgcctcgcgctccaccacccgcagcatcatcggcacgtcgatgcgatcattcatcgccagcgccggcgcggcttcaatacgcgacagcgtcagcagctgcttcaccagaccttccatacgttgagtttgctcccgcatggtgtgcagggctttttctcgggtcgccccctccagcacctgctcctgcatcatctccagatagccctgcagcaccgtcagtggggtgcgcaactcatggctgacgttggcgaaaaagttccgccgcgccccttccagctgatgcatctgcgtcacgtcgcgcgccaccatcagccactgcttgtcgctgtagggcatcacgcgaatttccagatgacgggcgttattcagcaccagattgagcggctttgaaaaatcgcgctgtttcagatagttggcgaactcaggatagcgcagaaggttaagaatgttttggccactgtcgtccggccagcgcaggtttagaatctgctgcgccaggccattacaccagaaaatagccccctcttccgtggtcaggacgaccgcatccggcagcgattccgccccgctgcgaaagcgtttaatcaggcttcccagctcgcgccgacgctttttattacgcatctgcatctggtgcagaccatacagcagcggctcccaactgccgcggccaggcggaggagtcatgctccggtccacccacagccaccacgacaggcgcatcaaattccagaaatgccagatcagcaaaccggtcactgccgccagtaaaaaccacggcagatgacccacaaacgcccccagaatcagggccggaatacacgctaaaaagagctccagcgccagccttttccatgacagccgttccagcacgggtcacactcctgtcaaaattcagaaacgggcggagaaacgataccccgtgccgcgaaccgtttgcaccatacgatcatggccactgtgttccagcgctttgcgcaggcggcgaatatggacgtccaccgtgcggtcttccacataaacgttggtcccccagacgtggttcagcagctgttcacggctgtacacccgctccggatgggtcataaagaagtgcaataatttaaattccgtcggtcccatatccagcggactgtcgccggtcattacccggtgcgatgaagggtcgaggctcagcccctgcatttcgatcacctcttccaccgccatcggtgaaatacggcgcatcaccgctttgattcgcgccaccagctctttcggagagaaaggcttggtgatgtagtcatccgcgccggtctccaggccgcgaacgcgatcctcttcttctccacgcgcggtcagcatcactaccggaatatcccgcgtcatcgcctcgcgcttgagcagtttaataaactgcagccccgaaccgcccggcagcatccagtccaggagaatcaaatcaggccagggttcattgagttgattcaccgcgctgtcataatcttccgcttcgacaggctgaaagccattttgctccagaacaaagcagaccatttcgcggattggagcttcatcttcaacgaccagaattcttctcgccattatttaccctgtgttttttagccatcagtatagaagtgcggcgtcattatgcgtcacttttgtgacagatttatgaaaaaaatgaccgtctgatgatcgggtattttgaagcacgacgcggacttacccctcactaacaagtggtatactgccgcccatgcttttttcgctagggaagatttatgcgcctccttcacacctccgactggcacctgggccagaatttttacagcaaaagccgcgcggccgaacacgacgcttttcttacctggctactggaccgcgcgcaggagcatgaagtcgacgccattatcgtggctggcgatatttttgataccggctcgccgccgagctacgcccgcgaactgtataaccgtttcgtcgtccagttgcagcagaccggctgtcgcctggtggtgctggcgggcaaccacgactcggtggcgatgctcaatgaatcccgcgatatcctcgccttcttacacaccaccgtggtggcgaacgccggctacgcgccgattgagctgccgctgcgcgacggcacgccgggcgccatcttctgtccggtgccgtttttacgcccgcgcgagctggtgaccagccaggccggtcactccggtcgggaaaaacagcagctgctgctgcacgccatcagcgactattatcaggagcagtatcagcaggcctgcgcgctgcgcggcgatcggccgctgcccatcattgccagcggccatctgaccaccgtcggcgccagcaaaagcgatgccgtccgcgacatttacatcggcacactggatgcctttccggcgcaacacttcccccctgccgactacattgcgctgggccatattcaccgggcgcagatggtcggcggctgcgagcatatccgctacagcggctcgccgctgccgctgagcttcgatgaaaccggcaaagcgaaatcggtgcatctggtgagctttagcgaggggcgacttagcgccgtggaaaccctggaggtgcccgtgacccagcctctggcggtaatcaaaggcgatctggccgccatcaccgcccagctggagcagtggcgcggcgtcgagcaggacccgccggtgtggctggatatcgaaatcaccaccgaggactatctgcacgatattcagcggcatattcaggcgctgacggaggatctgccggtggaagtgctgctggtgcgccgcagccgcgagcagcgcgagaaaatactgctcaacgcccagcgggagacgctcagtgaactgaaggtggaggaggtattcgagcgccggctggcgctgaccgaaattgacgatatgaagcgcgcccggctgcatgagctgttcgcccatacggtgcatacgctcaccgcggagaacgaaaacgcatgaaaatcctcagtctgcgtctgaaaaacctcaactccctgaaaggggaatggaagatagactttaccgccgagccgttcgccagcaatggcctgttcgccattaccggcgccaccggggccgggaaaaccacgctgctcgatgccatttgcctggcgctctatcatgagacgccgcgcctgaacaaggtctcccagtcgcaaaacgacctgatgacccgcgataccgccgagtgtctggcggaagtcgaatttgaagtaaaaggcatcgcctaccgcgctttctggagccagaaccgggcccgtaaccagccggatggcaatctgcaggcgccccgcgtcgagctggcgcgctgcgctgacggcaaaatcctcgccgataaagtctcggacaagctggagcaaaccgcgacgcttaccggcctcgactatggccgcttcacccgctcgatgctgctttcccaggggcaatttgccgccttcctgaacgcgaagccgagcgatcgcgcggagctgctggaggagctgaccggcacggaaatctacggccagatttctgccatggtctacgaacagcacaaagccgctcgccatgcgctggagaagttcgaagcccaggcggcgggcatcgtcctgttgacggaggcccagcagcaggcgctgcaggaacgtttgcaggtacttactgacgaagaaaaagccctgctggcccagcagcagagccagcagcagcagctccagtggctgacccgccgcgacgagctggcgcagcagcagcagcaggccgccacccggcagcagcaggcccgccaggcgctggcggacgccgccccggcgctggcgaagcttgagctggcccagcccgccgcccaactgcgtcccctgtgggagcgccagcaggagcagacggcaggcctggcgcaaacccggcagcggatcagtgaagtaaatgctcgcttacttgccagcacggtgctgcgcgcgcgcatccgccagggcgccttgcgtgctcagcagcagcgtcaggctgaactggccgatctggcgcagtggctggccgcccatgagcgtttccgcttatggggtcaggagatcgccggctggcgagcgcaattctcgcaactgacgcgggataaacaacagctaacggctcagagcacccgcctggccgcgctacgccagaagctggccacgctgccagccagccctctcaccctgagcgcggatgacgttgccgcagcgatagaacagcaaacccaatcgcggccgctgcgccagcgcctgatctccctgcatgagcagcaccagctgctgcgcaagcgtctgcgccagaacgccgagagcgtccagcaggcgcaggcggagcaggtaaaacttaacgctaccctgacgctgcgccgggaacaatataaagacaaaaaccagcactatctcgacctgaaggcgctctgccagcgggaagaaacgattaaagacctggaaagctaccgcgaccggctcgaggcgggaaagccctgtccgctgtgcggcgcctgtgaacacccggcgattgaacaatacgcctcgttgacgctcacggataatcagcgccgccgcgatgcgctggaaaaggaggtcgccgcgctgaaagaagaaggcctgctgatcctcgggcaggtcaaggccctgacgcaacagctccagcgtgacaccgaagcggccgggcggctcgcagaggaagagcaagcgcttactaaagcgtggcaggagacctgcgcctctctgcacatcacgcgggatattgcgcaagagataaacgactggatgcaggagcaggagcgctacgagcagcagctctatcagctcagccagcgcctgatgttgcagaatcagcttaacgatcagcaggcgctggagcgccatgccgagcagcagctggcggccacgcgccagggactggagagcgccctgcaggccctggccctgagcctgccggcagaagggacagaagccgcctggctgcacgctcgcgaaagcgaatttgcccagtggcaggcgcaacagacccaacatgatgccattcagcagcaaatcgctgctctgcggccactgctggagacgctgccgaccagcgacgagacagaggttgaagctgagtcggccatcccggacaactggcgcgaaatccacgaggaatgcctgtcgctgcacagccagcttgtcgcccagcagcagcaggaaacccaggaaaaggcgcgtctggaccagtcgcaggcgcaattcacctccgccctggccgccagccgctttagcgatcgggaggcgttcctcgccgccctgctggatgacgagaccgcccagcggctgacgcagctaaaacagacgctggagcagcagcttcagcaggcggccgcgctctgcgagcaggcgacccggcaacatgaggcgcacctggcgctgcgtccgcaaggggtggacgctgacgtccccacactgcaaacccagctgcacgccctggcccagcggctgcgggataacactacccgccagggtgagatccgccagcagctcaggcaggacgcagagagccgtcaacagcagcaggcgctggggcagcagattgcagaggcggcgcagctggcggacgactggggctatctcaattcgctgatcggctccagcaccggcgaccggttccgcaaattcgcccaggggctgacgctggataatctggtctggctggcaaaccagcagctcaaccgcctgcatggccgctatctgctacagcgcaaggccagcgaggcgctggagctggaggttgtcgatacctggcaggccgacgccgtgcgcgacacccgcaccctctccggcggcgaaagtttcctcgtcagcctggcgctggccctggcgctgtcagacctggtgagccataagacgcggattgactccctgtttcttgatgaaggcttcggcaccctcgacagcgaaacgctggacacggcgctggacgccctggatgcccttaacgctagcggtaagattatcggggtgatcagccacgtggaggcgatgaaagaccgcattccggtgcagatcaaagtgaagaagattaacggcctgggctatagccggctggacaaagcgtttgcggtggagtgaggtctgaattatggcgatgtcccctcaccctaaccctctcccgagggagagggttagggggcggggaagcggttcaggtcccctggagcggccacagccaggccgcgccgcgtaccccgctggagtcgccgtgcatcgctttgcggatcggcgtttcacactcgccgccgaagacccactgcttcaccaggtccggcaccgtctgatacagtcgttcgacgttgctcatcccgccgcccagcacgataacgtccgggtcgaggatattcaccacgtgggccagcgatttcgccagccgctgttcatagcggctcagcgccagttcagccttttcgtcaccttctcccaccaggcgcataatctcgctgccggttaacccttggccgctcagccgctgatagtcggtggcgaaaccggtgccggagataaaggtttcgatacacccctgtttgccgcagtagcaagggacttccgcacggtagcgcagctcatcgtcgttcatccacggcaatgggttatgtccccattcgccagcgttaccattgccgccgatatgcgcccgcccgttgagcgccaccccggcgccgcagccggtgccgataatcaccgcgaataccgtttgcgcccccgccgccgcgccgtccaccgcttccgacaccgccagacagttggcatcgttagccagccggacttcccgctcaaggcgcaggctgaggtccttatcaaagggctggccgttgagccaggtcgagttggcgtttttcaccaccccggtataaggcgaaattgagccaggaatgcccatccccacggtaccctgctgtccggtcgcctgctcggccatcgccaccagagtggcgatggtctcgatggtttgccggtagtcctcccgcggcgtgggtaaccggtggcgaaacagctgctctccctgatcgctcagggctatcacttcggtttttgttccacctaaatcaataccaatacgcacgctcagctcctcaccccgattaacaatgcaagcatagcgacaattcgctatcatgcccgcctgatttaacgacaaagccgtggaaattatcatgctgtggttcaaaaatttaatggtttaccgtctcagccgcgatatcgaattgcgcgccgaggagatggaaaaacagctggccgagctgacatttaccccttgtggcagccaggatatggcgaaaaccggttgggtgtcgccgatgggatcgcacagcgacgcgctgacgcatacggcaaacggccagatcattatctgcgcgcgtaaagaagagaagatcctgccgtcgccggtgattaagcaggcgctggaggcaaagatccagaagctggaagccgatcaggggcgcaagctgaagaagaccgagaaagattccctgaaagatgaagtgctgcactcgctactgccgcgcgccttcagccgcttcagccagacaatgatgtggatcgacaccgtcaacggcctgatcatggtcgactgcgccagcgcgaagaaagcggaagatactctggccctgttgcgtaaaaccctcggctcgctgccggtggtgccgctgaccctggagaatccgattgagctaacgctgaccgagtgggtccgctccggcaccgtggcgcagggcttccagctgctggacgaagccgagctgaaagcgatgctggaagatggcggcgtgatccgcgccaagaagcaggatctggttagcgacgaaatcgctgtacacattgaggccgggaaggtcgtcaccaagctggcgctggactggcagcagcgtattcagtttgtgatctgcgacgacgcgtcaattaagcgcctcaagttctgcgatgaactgcgcgaccaaaacgaagatatcgatcgggaagatttcgcccagcgctttgacgccgactttatcttaatgaccggcgagctggctgccctgatccaaagcctggtggaagggctcggcggcgaagcgcagcgctaagcgccgctttccttcctgccgggcaggaaggaaaaaacaacccggcggcaggcgccgggcgtcacgctggcttacagatagcggcacagataagaggttggctcagccacctgcagatgaaattcgctgttgcctggcacattgaaaacttcgccggcagcgtaaactttccactcagtctcacccggcagcaggacattcagcgccccgctgactaccgtcatctcttccggctgcgccgtaccaaaggtgtattccccttccgccatcacgccaacgctggcgcgaccggtactgctgctggtgaagccaatggatttcacttttccgtcaaagtattcattgctttgaagcataaacaagcccttctgatcgtcggttaaaggctcaatatagggggcgctccttgcccctgtcacgtgaaattaacacattagaccaatagttctgccgccagtcgggaaaccagcacattcgacagcaaaaccggaacatcgagggctttttgtaacacatcgcgatgatgctgatagtaaccgagacagtcgaggaccagcacgtcggcgccctgctccagcagcgttttgccggcggttaatagctcgctgtcgctgccggtaaacggattggccagcgcgtagtatggcgacttttccagcgagagccacttttgccgctgcatgggcatgatctcttccaccggcacgatcacccctacctggtgcccatcgacgatcgatgccaccagcggcgggatgatccgctgcggctcgaggaggatcgcgtggtgggtggtaaaaccggtcagctgttcggaactgagcagcaggatcacatcataatgttgtcgatccagcatcgcgatcgcgctgcggacatcgcgttcaattttctgtcgcgacaccatcaccaactggttattactgagcaaggtcaggagtcctttctcgccgtcacctacggcgtactcggccattacctcgtcaggcgtcatctcgcccagcaggctgatgtgggcgatctgttcttccctgatatgttcggtcaggagcggcaatactcccgccagcggcacaacgccgatggtcaaaattgccatcgttgcactactcatatcatgtaccttttcacaaccactgcttcaacacaggctttccacacacagcatccgcccccctggtgagtaaaaatcaaccgtcgagaagcgtagcagctccacgccgcggttgaatgtaaagattgccgggcggcggcgccgtgcctgaaaaatccgtgtgttagatattcattagtacgactgataaataaaaaatgtgagatacgcccgatattgccagcatggcgggcaattcgggctcagggggttacgacttgtcaggatcttcataacgccgtttggcatccacggcttcctgctcggtaggatgttcgctgataagcgaatcaggctcaggataatccgcacggagctgataccaggtcaccgtctgaccctgaggacctttctctaccgcaaccacgcgcgcttctctcggatatgggggcctgtttggcatagttcttccttcttctggtagcagaactattaagtataggcgcccctcgccgccttaatgtaagtaaattcttaacttaccggggttgccgtcgcgctgcacagcatggacataatctgctccaccacccgatccggcgaggccgtggcatccacaatatggtgggcagcgtcccggtataacgcttcgcgctgcgccagcacctcgcccacttcctcgcgcaccggttttccggtcagcgtcggccgctgttcggctttcgggtaggcttccagacggtcaatcagcgccgacaccgaggcctgcagataaatcaccacgccattctcccgcataaactgacggttaccttccgccagcacaataccgccgccggtggcgattaccgtattcggcagggtcacggccttcagcgacagggtctccagttcgcgaaaacgcgcccacccttccgcctgcacgatctcagccaccgtccgctgctcatgggcctgtagccgatgatcggtatcggagaactgaaaatgccgcgctcgcgccagcgcatggccgacggtggttttaccgcagccgcgtggcccaataagaaagataggctgtgtcataaccgaagaccccctggttccgtctgtcgcaaaaaaatgaaaacgaaagcacgtattatcgctgtctgtcccgcaatgcatacgtaaagaaaaaattacacaacttctttacaccccattaccacggtgagaagaggggctattaatgtaaacttatcattgcatttagtgtttaaccagctttactttccgcttggcgttattttttatccaccgctggcgtaaacggtaacacatttatgcatagctttacgaagcaacatatttacaacatcatgtttcagaagcaccctgatgcctattcgacagtgtgacagaggaatgtaacatgcaatctgaagaacaacgccttattgatggactgttttcccggctgaaagaggctgaggcgcacagcgcatcgcgcgatgccagcgccgaggagcggattgcccaacacgtgagcgcgcagccggcggccccctactatatggcgcaaaccattcttatccaggaagccgcgattaaacagcttaacgatcgcatccaggcgctggagagtcaggtcagccaactgcaggcggcaaagcccagcagcggcggcttcctctccggcctgtttggcggtggcggctcgtcacgcggttctgaccctatcccgggcgcggagcaatatggtcgcccgcaggccagcgctcagccgcagtatacgccaccaccgcagcagaactatgccccgcaggctgccgcacgcggcggcggctttatggcgggcgcgctgcaaacggccgctggcgtggcaggcggcgtggtgctgggcaatatgctgaccaatatgttcagcggctcgcacccgcaggagatcgtcaatatcatcgaagagaagccgcagcctgatgccgcctccgcgcaggacagcatcgcgcaggacaccaccgcaggtgacgatccgttccgccagggagacgatcagttccttgccgacaatacctggaacgacgacttcgacgccggctttggcgacgatgattttggcagcgatgacgatagctgggtttaaccctggcgacgcttaaccgccagcaaccacttctccagctcggcggcaaactgttgccgatcgcgctgcgataaactatccgggccgccggtctgaacgccgctggcccgtaatgtctccataaaatcccgcattgtcagccgctcgcggatcgtcgcctcgctgtaacgttccccgcgcggattcagcgccgctccgcccttcgccagcacctccgccgccagcgggatgtcggcggtgatcactaaatctcccgccgcgcactggcgaacgatttcattatccgccacgtcaaaaccctgctcaacccgcagggtgcggatgaaacgcgacggcggcacgcgcagcggctggttcgccaccagcgtcagcggagtctgggtccgctctgccgcgcggaacaaaatctctttaatcacgttcggacacgcgtccgcatccacccaaatggccatgccagctcctgttacctgcaataagtgacgccaatgttacctgcttttctcccccaggaaagcgccaggatggtaagctaatcagatcgtaacgaaaaaagcagaggggaatggtgatggataagaaaattggctttatcggctgcggcaatatgggtaaggccattctgggcgggctgatcgccagcggtcaggtacagccgggacaaatctgggtctacaccccgtcgccggacaaggttgcagctctgcgcgaccagtatggcatcaacgccgccgacagcgcccaggaagtggcgcagattgccgatatcgtcttcggcgcggttaaaccggggatcatgaccaaagtgctgggcgatatcgcctccagcctgaataaagagtcgctggtggtctctatcgccgccggcgttacgcttgagcagctggcgcgcgcccttggccacgatcgcaaaatcattcgcgcgatgccgaatacgccgtcgctggttaacgccggtatgacctccgtcacgcctaacgccctggtgagcagcgaagatgttgccgaagtgctgactattttccgttgctttggccaggcggagcaaattgccgagccgatgatccatccggtggtgggggtaagcggttcggcgccggcctatgtctttatgtttatcgaagcgatggccgatgccgccgtcctcggcggaatgccgcgcgctcaggcctataaattcgccgcccaggcggtgatgggctccgccaaaatggtgctggagagcggagaacacccaggggcgctgaaagatatggtctgttcccctggcgggaccaccatcgaagccgtgcgcgtgctggaagagaaagggttccgctcggcggtaatcgaagccatcacccagtgtatggaaaaatcagagaaactgagccgctcctgaagctgagccggcgggcttcaagccctgagaggttaaagaacaagggagcgcgagcgctccctttttttcaggctttcttcaggcagctactcatgaaggtactgcgttcatcgcccttcagtgatttcgccgtggccgctttgctgcagtcgctcattttctgctgctgaggggtgagcgcctttccctgcgaggtcgtggtctcttttttcagacactggctcataaaggttttgcgctcctcacctttcagcattttggctgacgcttgctgattgcagtccgtcatcctttgctgctgaggagtgggcgttttttctgccgcgccaaccgcgctgataaagatcaagccaaacagtagggtcatcaataaagttattttcatcgcaccatccttctgtgagtggaacgttgtaagtctggacgcagatagaaaaaaaaccagccggtgacgcaatttcgccaccggcagcgacttatttgagactcagggcagctttcatggtcgtgaacaggtcggtctgatcggtcaggccgacgacgttagccgcatgcggaccgtaggccgcaatgcgcagttgggtgccggtgtgctccatcgactcttcctcagagttgccgtaactcatcaccatcaccgcgccatcgtgcgtgttcagagcctgggtcagccccggggctttgctatccgccgggatgatctggctggcatgcgcatggtcggcggtgacgatcaccagggtattaccgtcttttcgcgcgaattccagcgccttctgcaccgcttcgtcaagatcaaccgtttcgccgatctggccgcacggattggccgcatggtcctgcttatcgatggacgcgccttcgacttgcaggaagaaacctttctcgttgcgactcagcaggtcaatcgctttctcggtcatctgcgccagcgtcggcaccgaggcgtcacgcttcgggtttggcgtacaggtcaccggcggcttatcgatattaccgtgataagacgccttcggcccttcccagcgtaccggcatattgccatcggcaaagagtcccagcagcggtttatcctgactggcttccgtcgcggcggcaagagaagccgcgtcggtcacaatctggtagccgcgcgcttgcgcctgctcgcgcagggttttgccctgccactcgcccgccgtcgccgtttcggcaaaggtcttcgcgccgccgcccagggtgacatccggtcgggcgttcagcagctgttcggtaatggagcctttgccccctttttccagcgcattgctggggcatttttcgctggtgaccgtcgggccatagcatttacgcgatgtcacatgcgccaccaacgccgcgggggtggcgtcctgcagctcggcggtggaaacgttgccggtggccagccccgccgctttcgccagctcaaggatggtctgatgcgcattctcatgaatatcgacgcccagcgcgccgttataagtcttcacgccggtggtccaggcggtggcggaggccgccgagtcggtcacgtagtccggtttcccggtttttttatccagcgaataatgcgtgtactgcccggttaacggcagagcatcaattcctttaaagaaaccgcccgccccctcggcatagtttcgcgcagcggtaatttccgaatcacccatgccatcgccaatcagcagaataacgtttttagctggcttattgattagcgaggcgcgcagcgcttcggtttgatcgcctgttaaacgacgcgcgccgccaggagtggtgatatctacctgcgcagcgcgattttccagaaccggcgcagcagtagtttctgcatgaataaccggcgagcccagtagaggaatcagggcaataaacagggcgcttaatttcacttttgtcatctccatgtaaaaaatacttaaaaaaacaaaacgagggagactttataaaagggagatgacagaaaaatgacggcatccttgtcgtgtcacaaagactagctacgaggatgccgcaacagcttctttagatattgctgcagcagcatcgcatcatggtcgttgaccggcggacagggcgtcacctggtcaatcgcctgttcaatatcctgaatcaatgcctgctgggcatcatgctccatatggcgcaataatgcggtgaccacgatctccagcgcttcaacctgcaccgtcagttcctttgcttcttcttccttttgcgccagtttaaccagtaactcagcaatgagattcttcatagcaccagttccttatgcgaggcctgttttgattgggatgtcatacgcgatgacggacctcagaattacttaaattaagaatcatcgcaacacccaatatacagcgaaacgttttaccacaataaaataccactataaatagtattgtttaatcatgaccggagttgcttataaccagattgcctggaaaataataaaatggaatagcgttcacgccataacgataacaaaaagtaatagtaaatccgctgacggcgaataatgctgacggtatcgcaataaataccgtcagcagaggttcaggcgttagcccgacgggtttggcgcagcatccacgccagctgccagaggttaatgaaaacgataatggcggtggcaataaacacccagcggaagccggccatggctgacacagaggcgccaattagcggcccggcgacgttgcccaaatacataaacgactggttatagccaaagatacgcccggtgacgctgtcgctgctgtacttcagcaataaggtctgcaccgccgggagcatcgcgccatcggcaaagccgagcagaaaacgcagcgtacccaattgcagcggggtggtgacaaaggacatggcgaagaacatcaccaccgcgcagcagagcgtcgccagcaggatccgcgaggtgccgatacggtcgccaagcttacccaaccgtggcgcagaaatcagtgccgacacgccgggcaccgcggcgatcatcccggccagaaaagcgatattgttgctgtccggcgccatcgacttaataaacagcgccagaatcgggccgattgagccgttgcacaattggatcaccagggtggtgaagaacaggctgatcaccagccccggatagggcaaagaggcaaagacttgtttcccggtgagacgctcgcttttgctgacctgcgggcgaacgccctctttaatcagaaacagggtcaccagaaaactgatggtcagcaggatcgccgtaataaaaaagaccatccgcagcccgacgtggtccgccaggaaaccgcccagcagcggaccgccgatcaccccgctaatttgcgccgtcgacagcgtgcttagcgcccagccgctgcgctcgcgcggcacctgggaggccaccagcgccatggcgttgggaatataaccggaggttaagcccatgatcgcccgcaggataaacagctgccagacgttggtggcgaaggcctgcagtaaaatggcaatcgccatccccaacgaggcgcgcagcagcatgagcttgcggcctttacggtccgccaggcttccccacattggcgagacgatcgccgagacaagaaaagtgacgctgaaggtcagccccgaccacatcgatagcgcttcatgcgaggtgacgccgagctgggagacgtagaggggtaaaaaggggagaatttgactgatcgccaggccggtaaaaaagcaaccaaaccagacggagatgagattaaccttccaggattccataactacgcgtattcattaatgatttgccaattattatctagcttagcaatttcatcccactggtgtactaccatagatgcgctggcggtgagtttggtgttttatggctgcggatgagagcctgacgaagcattttctggtcatttaggctgctcatagcgctttatgctcaaaagcagaagccctgcccgcgcatgccgaaatgaaaatggttggcgtgagccgcgttgtactctggccccagcgcgttaccgaagtaatggcaactgctgctcaacagcgccgccagccaggggcgcgaagtctcgctccgccagccctgcaggacgctaacgcgtctaccgtccgccagacggaaaccgctgacgtccagcgcgtccgccgtggcgtgttcactgcgccgcgcctgttgacgatggtaaatattgcggcaggcaaagctgccgagatgatcgatctgacgcagatcgctcgccatcagctgccgggtcagcggcttcgcctgctgctcgatgtacagcgcactgctcagcgccagcgggcaactggcgagaaaactactgctcagctgcaccgagccaaaattcgccacccgcaccacgttacgcagagggcagcttccctcgctgtcggccaccggccggctggcgataagccgccggcgattggcttccgccagcagggaggcgcactggtctgccgtcagcctgcgcagcttaaacgacgtcagccagcccgggggatcgtccagcgccagcggcgccagcggattcaggtgcggcggcagattgcggtatcccaacaggcccgcgccgagcagcccggccagcaccagcagcgtctttcctctcacgcccactcccgtcaattgatcaggtaaatattatggcagccaggcagcggtttcacatggtatgttatgccctttgatgttatctggatggaagttgaaatggcaaagatgagggttgggatcgtttttggcggcaagtcggcggagcatgaagtgtcgctgcagtcagcgaagaatatcgtggaagcgattgataaatcgcgcttcgatgtggttctgttgggtattgataaacaggggctgtggcatatcaacgacgccggcaactacctgctcaacgcacaggatcctgcccgcattgccctgcgcccttccacggtgactctggcgcagatcccgggccgcgaagcgcagcagctgattaacgccgaaagcggccaaccgctggcggccatcgatgtgattttcccgatcgtccacggcacgctgggtgaagatggctccctgcaggggatgctgcgcatggcgaatctgccgttcgtcggctccgatgtgctgggctctgcggcctgtatggacaaagacgtgaccaaacgtctgctgcgcgacgccgggctcgccgtcgccccgtttatcacactcacccgcgccaaccgcgcgcagttcagctttgccgatgtcgaagcgaagctgggcctgccgctgttcgttaagccggctaatcagggatcgtcggttggcgtcagcaaagttaaaaacgaagagcagtaccatcaggcggtggccctggccttcgaatttgaccataaagtggtggtggagcaaggcattaaagggcgggaaattgagtgtgcggtgctgggtaacgaccacccgcaggccagcacctgcggtgaaatcgtcctcaacagcgagttttacgcctacgacaccaagtatatcgacgatcagggcgcgcaggtggtagtcccggccgctatcgcccctgagatcaacgacaaaattcgtgctatcgcggtgcaggcctaccagaccctgggctgcagcggcatggctcgtgtcgacgtgttcctcaccgccgacaacgaggtggtgatcaacgagatcaacaccctgccgggctttaccaacatcagcatgtatccgaagctgtggcaggccagcggtctcgactacaccagcctgatcacccgcctgattgagctggcgctggagcgccatgccgcggaccgggcgctgaaaacctccatgaactaaaacgcgttttaccccgcctggcagcggcggcctcaggcctcttctgccgggcggcggcggatcacaaagcccgcaatccagaagctaatgacccaggtgatcagaccgacggcgtaggattgccacccctgagtttcaaaccccatcagccccaccactccattaagaataaaaatcaaccccagcgccacggcgtagtagtgccaatcgcggcgaattttatcagtgagcttcatgcggcctccaacagcaaaaaacgcatcttcgcatagcagcccgcggcggtctgtagcgatatggagaatgttgctggattgcgacgccgctctcccttttgtgctcctgtggcgcggttaacacaacggcgaaaacaggattattcctggacggcaattaccagcaatctgatactgatgatggcccctgactgccagaatacctgacatagagctggagaaaaaaccagcagcgcagatgtgggagggcctatggctgaattcagtttttcaaaatcgcttttgggaaataaaaaaaggggcgcgctgaccggcagccatgtcgcctacgggctgttcgtgttgatttgctgctgggccggcgcgcagatgctcagcatgctgatccacgccccgggggtatttgaacgcctgatgcaagcccaggacgccagccgtccgcaagtcgacatcagcctcgccgtgggtaccctctttggtctgatccctttcctgatcggctgcacgttcatcggggtactggcgcttatcgtgcgctggcgtcagcgccgttaacgccgcgccatacagtttgcccgccgctcatcaacccgtttcgcaaaccacgccgtcgtcagatttcgggtgatttttggactctccagctggatccctggtaacatctcccgcggcagggttttgcccgcctttttctcggcgagacggaaaacctgctgataaagatcggtcttctcaaacgccaggctgtcgccctttttcaactgacgatggatctcgctgtcgctcatccccagctggctcgccaggcgacgcaccgccagctcggtgctgcccggctcctcgctgtcgtagcggataaggtcgccgtcgagcgccagttttaccccgctggctttcaccaccgcgttctggaaggcggcgttacggctggcgtaccagccggcgttgaagtcggcaaagcggtacaatggcgcactataactggccggatagttcagcagatgataggtgccaaaccacaggccaccgcgcagactgaagatctcctggcgcaccgtgccgttcattttccacgggtagccgaaggtgtgctgctcggcaaaagcaatgctgacctgcatcggccccccggtgtgcaccgggttaagggaaccgaacagcttctgccccatcggcaccatcccgataaagtcatcaaaaatggcgctcaactgcttttccgtcttcacattgtccagacggtcgctatagcttttaccgtttggcgaggtgatcttcagcgcggtatggaccagaaacggcggaatgtgcattttttccgcccggcggtcaatttcctgccaggcgattttattcagccccggcaccaccggatcggactgatagttagactcttgctgcgcgaccgccagcaccgagcagacgttttcttccgtcggcgccagcttctggctgtcaaacgcggtggcgatggcttgcgcccaggcctcccgatccttgacgctggccggcattttctgccgcaccaccgacgccacgtcaacaggcttctcgccctctttcagcgccggagcctgctggctggtacaggcgctcagcgccatggccgccagcagcgtcaatgaaacgggaataatgcgcgataaacgtgcggccattatgcttccttgtcttgattaacgtaatgtcgggatcgcttcctgcagcggtttgccgtccagctcgcgttcaaaactgcgcagacgtttgtagatggacatcagttccaccagcgttgtccacgagctgatcaggtactggaacgagccgcgcacctggccgaagacgttggtaatttgcgtcatcagcccgagggtaatcgtaccggcaacgatcgacggaaacagcaggaaaaggccgaaaacgttatccacctgcagatagaggatgcgggcgatattgaaatacatatagtggaaatagagacggaaatagttgcgacgcaccgcgcggaatagctcgcgcaccgtcggcggcgtggcgcgagtttcatcgtcctcgccgtaaaccagctctttacgataggccgcttccacgcgctggtttttaaactccaggcccggcagcttaatccccaccaccgccagcaggccggtacccatcagcgaccagacgatagcggcaatcaccaggccatacggcagatggccgacgataggcaggtcgggaacatgttcggagagcgtcaccagcaccggcaggaaggcgatcagggtcatcaccgcgttgataaagctcacgcccatatcttcgagggtggaagcaaaacgcatggtatcttcctgcacacgctgcgcggcgccttcgatatggcgcagatgctgccagtgggccatatagtgctcgttcatcgccgtgcgccagcggaagacgtagtggctgacgaagaagttgttcatcacgccaataatcaccgcgatgatcgcgatgccgagaaagacgccgatttcctgataaaactggttgatgctgaccttatgcggggtggccagcgcgctctggatcaggtcgtagaacggcgcataccaggcgttgatcgccaccccgacttccaccagaaaccaggtgacgaagatgatgagcgaggtgccgagaatcgaccagtactgccagcggtgcgggcagtagacaaaccagaacagcgcgaacacgccgacgcaaaacagatagtaagcgtagaacaccagatagttgagcgaccagaagcgcgccgcgctgatcgccacattttgcgatgccccggtgacccgcagcagccagtcgccgccgcccgcctgccaaaagatcacggccagcagcgaccagataaaggcagaaataaaaaacggccccggtttggggaaaaaagatttaaacatcattgtctcctgctaacttcttatcgttctgctattgctgtgtacgacgcatacgtcggccgccgcgtggatgagccctcgcgggacagacgaatgataagaccggatatcaacagcttagttctgctgccatgcgtgcagaattgtttctgtgggtttcacctgtaaaggattgccaggaatggtcagcgtacgccacacctcattgtagtgggcgataagcgtcgcggcctgcgcggcggggcggtcggcggtggtgtgggcatcttccgcgataacaataccgtacccgcggctggcgccatttttaatggtggtatcgaggcagtagtcggtggcgcagccgcagatgacgaactgctgaatgtcgtgttcgtccagcacctgcgccagcgaggtgtgatagaaggcatcgcaggcggttttggtgacatacagcgcgccagccggctgctccagctcaggaagcagggcgaagccttcgctgccggcttcgaggccgccggcttcatcatgctgaatgaaaataaccttgtccgccgcgcgcaccagacgattaatttgcgcgacgcagcgctcgcgcgccagacgcggcgtggcgaacacgccgttttgcatatccacgaccatcactacccgttgagccgtcattgttctctcccacgaaccttcagccaaacggtcatcatacgcgccggcgaaaaaagccggtatccgaaagcgtaaaaaagtcttttttacgcaccgttacctttttcctgcaggaatgtcgtgaatcccgctttgttctgcgccacttcgtagtataaataccctcttctttttatttatttaatggatgatctccgttgaaacgtagtttgctcatttttgctgcgctgtgcgcggcgtcgtggacctcggtgcaggccgcacagcctaccgttgacccggttttcgcctcggatgtggtcgatcgttacgccaatcatatctactacggcagcggcgccaccggcatggcgctggtggttatcgatggcaatcagcgtgtttttcgcagctttggcgaaacccgcccggggaataatcagcacccgcagctcgactcggtgatccgtatcgcctccctcagcaaactgatgaccagcgagatgctggtgaagctgctcgaccagggggtggtgaaactcaacgatccgctgagcaaatacgccccgccgggcgcccgggtgcctgactggcagggaaaaccaatcaccctggttaacctcgcgacccataccagcgccctgccgcgcgagcagcctggcggcgccgctcatcgtccggtgtttgtctggccgacccgccagcagcgctggaactggctctctaccgcgaccctgaaagccgcgccgggctcgcaggcggcctactccaatctggccttcgatttactggcggacgcgctcgccaccgctgccggcaaaccgtatccgcagctgtttgaagagcagatcacccggccgctggggatgaaggacaccacctttaccccgtcaccggatcagtgccagcggctgatgatcccggaaaaaggcgccagcccatgcaacaacaccctggcggcgatcggcagcggcggagtctactcgacgccgggggatatgatgcgctggatgcagcagttcctgtcatccgatttctatacccgcagccagcaggccgaccggatgcagacgctgatttatcagcgtaaccagctgacccgggtgattggtatggacgtgccgggccgcgcagacgcgctgggcctcggctgggtgtatatgaagccgaagaacggccatccggggattattcagaaaaccggcggcggcggtgggtttatcacctatatggcgatgaatccgcaggctaacgttggcgcctttgtggtggtaacccgctcgccgttaacccgcttcaacaatatgagcgatggcatcaacgacctggtcagcgagctgagcggcgcacagcccaacatgcagacggccagccagtaagcccggggaaggtttcgccgatgcgccataacgatcgttttggcgaaacatcccgctgccatttcagttacactatcgtctttcatttcacaaaatcaggcaaaccatgacagatttaatcactcgcccccgccgcctgcgtcaatccgctgcgctgcgcgccctgtttgaagagacaacactgagtttgaacgacctggtgttgccgatctttgttgaagaagaaattgatgattacaaagcgatcgaggccatgcccggcgtgatgcgcattccggaaaaatatctggcgcgcgagatcgaacgcatcgccaacgccgggatccgctcggtgatgacctttggtatttctcatcacaccgatgccaccggcagcgatacctggaatgaaaatggtctggtggcgcgtatgtcgcggatttgtaagtccacggtgccggagatgatcgtcatgtccgatacctgcttctgcgaatatacctcccacggccactgcggcgtgctgtgcgaccacggggtggataacgacgcgaccctggaaaacctcggcaaacaggccgttgtcgcagccgccgcgggggcggatttcatcgctccttccgccgcgatggacggtcaggtgcaggcgattcgccgctcgctggacgccgccggcttcaccaatacggcgatcatgtcctactcgacgaagttcgcttcttccttctacggtccgttccgcgaagcggccggtaccgcgctgaagggcgatcggaaaacctatcagatgagcccgatgaaccgccgggaggccattcgcgagtcgctgctcgatgaagcccagggcgccgactgcctgatggtgaaaccggctggcgcctacctggatattctgcgcgatatccgcgaacgcagcgatctgccgctcggcgcctatcaggtcagcggggagtacgcgatgatcaaattcgctgcccaggcgggcgctatcgatgaagagaaagtggttctggaaagcctcggcgctatcaaacgcgcaggcgccgacctgatcttcagctatttcgccctcgatctggccgagaaaaagatcctccgttaaacccgcccctccccggtggcgctgcgcttaccggggcccgcaggcctatcccgcatgtaggccgggtcaggcgcagccgccacccggcgcaaaaacgtctccctacccgttgccattgcccggcagcgctgacgcttgcgcgggcctacgagattgccgggcccgcagtcccatcccgcatgtaggccgggtcaggcgcagccgccacccggcacaaaaacgtctccctacccgttgtcattgcccggcggcgctgacgcttgcgcgggcctacgaacttgccgggcccgcagccccatccgcatgtaggccgggtcaggcgcagccgccacccggcgcaaaaacggctccctatgcgtcgtctcccccgctgcgaccgaaacttcacccaactgtaatctgaacgacatctccaccttctactgtctgggcaggacggaggaggagccactatgtttagtctcgacaacgtactcgatgacctgtggcctcaggcgaggcccgccccctggcaaaagaaactgttaaaaaagctattttatgaggaagagtttcaacaatttgccgaccgtcaccgccacctgaaggggcttgatacggtcgaacaggtgctggaatacctcaatatccgctgcgccatcccggcgcacgatctcgaacaaatccccgaatatggcccgctggtcattatcgccaaccaccccaccggcaccctcgacggcctggcgctcctgtatgcggtatcccgcgtgcgccgcgatgtcaaagtggtcaccaaccgcatgctcacccaccttgagcccctgagctcgctgtttatcccggtagataatattcatggccgcaccgctaaagcggcgctgcagcagatggaccagcagctgcaggccggcggggtgctgatcttcttcccggcgggggaagtctcccgcctcacccctcgcggcatccgcgataaaaaatggcactccggctttattaagctggcggcaaaatatcgcgccccgctgctgccggcgtggattaacgcccgcaacagcgccctgttttacgccagcacgctgatatcagacaacctgccgctgctcctgctgatgcagcagatgtttcgccggcgcaacagcagcctgccggtgcgtatcggccagcagatcccctggtcgaactggttcgatgtgcagtccagcgctcgcgagcttaccggcagctgctatcagcaccttgaacagctgcgcaaagggctgccggggcggtttaaaaccgaaagcgctatcgcccgtccggaagaccgggcgctgctcaaacgcgaactgcacaaggccgaatgcctgggccgcaccgccgatggcaaagtgatttacctctggcagcgcaacggccaggaggacgcgccgctgctgcgcgagctgggacgcctgcgggaaatcgccttccgcgcggtcggggaaggcagcggcaaacggcgggatatcgacgggtatgacgacgactatctgcatctgatcctgtgggatgaagaagacctcgagatcgtcggcgcttaccgctttatgccgacggctatccagttggcaaagcgcggcctggaggggatctacagttacagtctgttccattacgacgggcggatggacgatgtcctgcagcacggcattgagctggggcgcagctttatccagccgcgctactgggggcgtcgcgggctggactacctgtggtccggcatcggcgcttatctggcgcgctatccgcactatcgctatctgtttggtccggtgtcgatttctggcggattgccgcccgccgcccgcgatctgctggtggcattctaccggatgtggttcccggcgacgcatccgctggcggagtcgcgtcgaccttatccggcgtcgctgcccgacgtgctggcgcagtttggcggggaggattacaacgacgacctggcccggctgaagtccctgctcggcaacctcggctgcgcgatccccccgctgtataagcagtactcggaagtgtgcgagccgggcggcgtgcagtttatcgatttcggcagcgacccggatttcaacaactgcgtggatggtctggtgctggtggatctcacctacctgaaggccaatcgctaccagcgctatattggcgcgcatctgggtgcgcaaaaatcggcataaacgctttttcccggcttgcggcgcgttgcgccttagccgggctaccgtttccgacggatcggtagcccggaaaaggcgcgtcaggcgacgcctccgggaagcagcgggcaatgcagcatccgcttttctccgcggctcgcggctgatgccttaaccggctacaagccttaccccgcccggtaatacggcttatcgccgaggatcgtcgcccggtgcatgatccgccgctgcggcagatagtcggcgttggcgtaatgctgggtcacccggttatcccagatagcgacatcgttcggctgccagcgccagcgcacctgaaactccggtttagtgacatgagcaaacaggaagttcagcagcgctgcgctctctttctcactcacctcgacaattcgcgtggtaaacccttcattaacgaacagcgcctgcttgccggtcaccgggtgggtacgtaccaccggatgcagcagcggcggatgcttcgccaccgcttcctgccagcgccgatgctcggcttcggtcttgttgtacttatactcctggaacgatttgcggaaatcgtgttcggcatgcaggccgctcagcagctgccggaagggttctgacagcgcttcccaggcggcgatgccgctggtccacagggtgtccccgccggtcgtcggcagctctttcgccgccagaatggcgccggcgggcggcgtgtcgataaaggtgacatcggtatgccagttgtcattatccggcggattatcgttgtgggtatcgaggacgataatctcctccacccctggggcgtgagggtagaccggatgaatatgcaggtcgccaaaacgcagcgccagatcgcgctgttgcgccggggtgatattctgctcgcgcaggaataccacctgatgacgcagcaccgcgtgatacagctgttcaaactggttgtcgctcagcggacgggttaaatctgccccgctcacctgcgcgccaatatagggccccagcggggtaatgctcagacgttcactcattgtacttctccatgccagggcgtcaggcgccgctgcagcgcgcgcagacccagttccagtaaaaaggcgataatggcaatcaccgcgatccccgccagcaccacatcggtggcgagaaactcgccggcagactgcaccataaatcctaatccgcgggtggcggcgatcagctcagcggccaccagcgttgaccagcccaccccgagaccaatgcgcagcccggtgaggatctccggcagcgcgccgggcaggatcaccagccacagcacctgcgcccggctggcgccaagcgaacgggcagcgcgaatccgcacctgctgcgcgctttttacccctgccagcgccgacatggctaccggcgcgaaaatcgccaggtagatcagcaggatcttcgaggtttcaccgatgccaaaccagatcaccatcagcggtaggtaggccagcggcggcaccggacgatagagttcgatcagcgggtcgaggatcccgcgcaccgtcgagttgagccccatggcgatccccaccggtacgccaataagcactgccgccagcagggcgataacgatccgcgtcaggctcgccgccaggtgctgccagagcgtcgcatccataaagccctgcggcccggcgatggtgataagcttctgcagcacctggcccggcggcggcagaaacagcgggctaatcagctgcagcgccgcgaccgcccaccagacggccagcaataccgccagggtcgccacgctgagggtgagctggcgggagagcggccagcgccacttcagcgtcgactgacgcggtttgtcgttcagtaccacgctcatgagaaagcctcccgttggtcaaacacccggctcagaatgtattcccgctgttcaataaagcgcgggtcggatttaatgctgcggcaggattcgcccgcgacaaagcgacggctgaaatcaagcggcagcctctccaccacccgtcccggccccggcgacagcagcaccagctcggtcgccatgaagatggcctcttcaatatcatgggtgatcagcagcacctgtttgccggtctcatgccacagtttcagcagcagcgtctgcatctgctcgcgggtaaaggcgtcaagcgcgccgaagggctcgtccagcagcaacagctgcggattcgccgccagcgcccgggcgatgcccacccgctggcgttgaccgccggacagttgccagataaagcgcttttccgccccttcgagccccaccttcttcagcatctgcgccgccgcttgccggcgctgcgctttatccacgcccgccagctggaggcccagcgccacgttatcctgcacattgcgccacggcagcaagccttcgttctggaagaccaccccgcgctctgcgcccggcccggtcacccgctgaccttcgagggtgatgctgccgtgctgatagggcacgaatccggcaatcaggttcagcagggtagttttaccgcagcccgaaggccccagcaccaccaacagctccccactctccagcgtcaggttgatatccgccagcgccggtttaccgccgtagtcagcggaaagatgcgagatttgcagcatcgccgcctcctttacttcacaaagcggtcagtaacgtactgacgataatcggttcccgccgcaggcactttgccctgctctttcaggaagcgcgcggtatcgacgatggcctgattgaccggcccgttcagcgcctgcgcctgctcagcggcggtgagataggtattgcccttcaccagcccggggacatcggcttccggcacgccgctcaggcgcgccagcttgctgatgttgtccggctgtttcagccatgcctccgggttggcgatgtagggctgctgggcgtcgatggcgcttttagcaaacgctttgacgatctccggatgctgctcggcgaagtccttacggaccacccagacgtcaagggtcggcgcgccccactccccaacctgagaagaatcggtcagcaccttgccctccttttccagttcgttaaccgctggcgcccagacgtaagcgccatcgatatccccgcgctgccaggcggcgataatcgccggcggctgcaggttaataatctgtacctggcccggcttgatgccccagtgtttgagcgccgacagcaggctgtagtgggtggtggagataaacggcacggcaatgcgcttgccgatcagatcttccggtttggtaatgcttttcttcaccaccagcgcttcggagttgccgagctttgaggcaagcaggaacacttcaatcggcacctgctggctggcggccaccgccagcgggctggagccgatattaccgatctgcacatcgccggaggccagggcgcgtaccacgctggcgccgctgtcaaatttccgccagtcgacggtcgccccgctggttttggcgaaggtgttgtccgcctgggcgactttcgccggctcagcggaggtttgatacgccacggtaacgttgaccgcctgcgcctggaaggcggcgacagccagcgccgccagaagagtaattcgcgatgtgaatgccataatgtctgcttcccctgagttgttataggtgcagtatttccggcatcaggatggagatgaagtaattaaaaattctggctaatagcgaatcgtttttagaacaaaagcgggaaaggatagttggttttgtgcggtgagttagtggcagatggttggcgccgggcggcggctacgccttacccagcatccggttcgcgcaatatgtaggccgggtaagcgcagcgccacccggcaaaaatttagcgcttcgcgttaagcgcggcgatgtccttcggcgtggtgcggcagcagccgccgatcagcttcgccccggcggccagccactgcggcagataatccgccaggctggcgcaggcttcgccatgacggtgccaggtcttgctcaccgcatcataatgttcgccggagttaggatagaccaccagcggcagggccgtcaggctgtgcaaatgcgccagcgccgcgggcgtattttccagggcgatacagttgatccccaccgcccccacctgcgggttatccgccagggcggccatcacctcgcgcagcggcgtgccgtcgctgagatgttcggcgtcgcgcagcgtgaaggagtaccaggcgcgggcgcggggatactcctgcagcagggccgccagggcctggatctcagcgaatgacggcagggtttcacaggccagcaggtcggcgccggcatccagcagcgcttcgacgcgcgggcggtggaaggcctggaactctgccgcgctgcgctgataatcgccgcgatactccgagccgtcggcgagaaacgcgccatacggccccaccgaaccggccaccagcagcgtaccggcctgcgggttctcggcgaggtacgcctcgcgcgctttgcgcgccagctcgacgcttttgccgattagcgcccgggactgcgcctcatccagcccgcgcgcggcaaagcccgccggagtggcctgatagctggcggtgatcgccacctgcgccccggcgcgaaagtagtcgagatgcacatcgcggatcagctgcgggttctccagcagcactttcgccgaccacaggctgtcggccagatcgcagccgcgggcctccagctcggtggccatggcgccgtccagcagcacgaaaggctgggcggcaagcagggcggtaaacggattagtctgcgacatgttggggctcctgagtcatattccgtgaacgagtaagataccaggcaccatagcacagggccacaaaggggatcccgcaccacagcgcaattctctggctcgggtcaaaagcgaggcccacgcaggccaccaggcacagcacaaagcccagaacgggcactaccggataccagggagcgcgatactgcagatcgctcagcgccttaccctgctgcagatggcggcggcggaacataaagtgcgaggcgcagatgctcaaccacaccgccaccaccgcaaaaccggagatcgccgacagcgcgacaaacaccgtatcgggcgccaccacgctggagaacagcgccagcacgccgcccagcatactcaccgacagggcggtcaccggcacgccccgtttattgactttggcaaagcaggccggcagcgtcttctcgttcgacagcgaccacagcatccgcccggaagcgtacaggccggagttagccgccgacaggatcgccgtcaggatcacgaagttgaacatgtccgccgcataagggatgcccaccttctcaaacaccagcacgaaggggcttttctccacccccgcctgctgcattgggatcagcgccgccagcacaaacacggtgccgataaagaaaataatcagccgggcgatggtggtgcggatggcaaccggaataaccttatgcgggttttccgtctctccggcggcaatgccgataagctccgtcccggagaaggcgaagttcaccgccaccatggtcatcaggatcggcaggccgccgtgcgggaaccagccttcggcggtgatattgcgcaggcccggcgccggggagccatcctgcatcggaatgatgccgaaaatggccgcgccgccgagaataataaacgcgacgatggtgatcactttcaccagcgagaaccagaactcgccttcggcgaagaagcgcgtcgaaatgatgttaaggccgaagatcactgcgcagaacaccacgcaccagatccagaccggcacctgcgggaaccagtactgcatgcagaatcccgccgcggtgaagctcgaccccagcgccaccgtccacgttagccagtagagccacgccacggtatagcccgtcgccgggccaagatagcgcgccgcgtaaacgtggaaggcgccggtctctggcatcgccaccgacagttcgccaaggcactgcatcaccagccagaccaccagggcgccaatcagatacgccagcagcgtcccggccgcgccggtggtggagatgatatagccggtattgaagaataagccggtgccaatcacgccgccgagcgacagcatgatcagatggcgcgttttcatggtgcgcttcagctgcccaccttgttgttgtgttgtgctttgcattttattttctcacgccagcccgcttgcccgggtcatgatgcgtataaacgtatagacatctaaacatccaaaagaagaagtgttataccgtgccgccgttgaaaaagcaaagccgctgcaccagggcgcgcgccgacagcgtgcagcctgccccatttttgcgcagcgccagcgggcgcgccacggactgacgccttatcgcggcaggcaacgttctggcactctctttgcagcctgtcgttcagcacctttctatctggcgaggcaatacgtatgacagagcaaaccaccaccttaaaaagaacgctcggcagttttcgtttatgggggatcgccatcggactggtgatatccggggagtacttcggctggagctacggctggtcgcaggcgggcacgatggggtttatggtcgtcgccctggcggtcgccgccatgtactgcgcctttattttcagctttaccgagctgaccaccgccatcccgcacgctggcggccctttcgcctacgcctaccgcgccttcgggcccaccggcggctttatcgctggttttgccaccctgattgaattcgtcttcgccccgccggccatcgccatggccatcggggcctacctcaacgtgcagtttccggcgctggatccgaaatgggtcgcctgcggcgcctacgtgatctttatgacgctcaatattctcggcgtcggcatcgccgccaccttcgagctgatcgtcaccctgctggccatcttcgagctgctggtgtttatgggcgtggtcgcccccggcttctcctggagccacttcaccactaacggctgggcgggcgcggacagcttcagcggcctggcgctgccggggatgttcgccgccattccgttcgccatctggttcttcctcgccattgagggggcctccatggcggccgaagaggccaaagatccgcagcgcaccattccccgcgccctgggcggcggcattctgacgctgacggtgctggcgatcggcgtgatggtcttcgccggcggcgtcggcgactggcgcgcgctgtccaatattaacgatccgctgccccaggcgatgaagacggtggtgggcaacggcagcggctggctgcatatgctggtgtggctggggctgtttggcctcgtcgcctccttccacggcatcattatgggctactcgcggcagatctactccctcgcccgcgccggctatctgcccgccgggctggcctccctcaaccgccgcacccgcaccccgcatctggcgatcctcgccgggggcgtggtggggatcgccgcgatcttctccgactcgctgatcaccatcagcggcatgccgctgaccgcctgcatcgtcaccatgtcggtatttggggctattgttatgtatatcacttccatggcggcgctgttcaaactgcgccgtagcgagccgaagctgatccgtccgttccgcgccccgctctacccgctggcgccggcctttgccctcggcatggcggtgctctgcctggtggcgatggtctggtataacctgctgttggcgctgattttcgcggcgatgatgctcggcggctacctgtggttccgcaaaaccgcagcggcccgtgaacgggcgccagtggatcctcaactgcgcacggtctcctgaggaggcggcatgtataaaaccacgctatcgggccaggtatggcgctttgatagtctgaaaacgctgatggcgaaagcgtcgccggcccgctccggcgacgccctcgcagggattatcgccacctcagccgaagagcggatggcggcgaaaatggccctcgccgaggtgccgctgaccgacattctcgacaacccgcttatcccttacgagcaggacgaagtgactcgcctgatcctcgacacccatgatgcgcagggctttgccgccctgcgtcacctgacggtcggcgattttcgcgactggctgctggatgatgctaccgataccgccacgctgcagcgggtcgcccgcgccatcaccccggagatggcggcggcggtcagtaagctgatgcgcaatcaggatctgatccttgccgccagcaaatgccaggtggtgacgcgctttcgcaacaccatcggcctgcccggccacctcagcgtacgcctgcagcccaaccatcctaccgacgacctgaaaggcatcgccgccagtatgctcgacgggctgctgtacggcgccggggacgcggtgatcggcatcaacccggccagcgacagcttaccggtgctggcgcagctgaacgtgatgctggacgatattatccagcgcttcgccattcccacccagtcctgcattctgacccatgtcaccaatacgctgcagctgattgagcgcggcgcgccggtggatctggtgtttcagtcggtggcgggaaccgaagcggccaacagcggcttcggcatcaatcttgccatgctgcaggaggcccgcgaggcggccctgagcctcaggcgcggtaccctcggcaacaatgtgatgtattttgagaccggccagggaagctgcctgtcggccaacgcccaccacggcgtcgatcagcaaacctgtgaggcgcgggcctacgccgtcgcccgccactttgaaccgctgctggtcaataccgtggtcggttttatcggtccggagtatctctacgacggcaagcagattattcgcgccgggctggaggatcatttctgcggcaagctgatgggcctgccgatcggctgcgacgtctgctataccaaccacgcggaagcggatcaggatgatatggacaccctgctgaccttgctgtgcgccgccgggctcaccttcctgatcggtgtgcccggagcggacgatatcatgctcaattaccagagcacctcgttccatgacgcgctgtacgcccgtcgcctgctgggcttaaagcatgccccggagttcgccgactggctggcgaaaatgcaaattatcgatccgcatggcgcgctgcggctcaccgacgcccgtcatccactgctgtccgtcctgccgcaaggagcctccgtatgaaccgtcccgatgcctggaacccgctgcgtgaatttaccgatgcgcggatcgccctggggcgcagcggcgccagtctgccgacccgcgaagtcctcaactttggtctggcccatgccagagcgcgggatgccattcatcagccgttcgccagccaacaattggtggcgccgctggcggcgctcggcctcgaggccctgacggtgcacagcgccgcgccggaccgtcatacctatctgcggcgcccggatctcgggcggcagctcgccgatgagagtcgcgccgacctcgccgccagcggcgtccgccccgccgacctgctgctggtgatcggcgacggcctctcttcctgggcggtagagcgccaggcggtgccgttgatccgcgccctgctgccctatctgcggacgctgggtatcggcctggcgccggtggtgctggcgcatcagtcgcgggtggcgctgggagatgatattggcgaaaccctgaaagcccgcgcggtggcgatcctgattggcgaacgaccgggtctctcctcgccggacagcctcggcgtctacctcacctggcagcctcatcgtcagcgtctggagtctgagcgcaactgtatctccaatattcggccggagggattaagccatgacgccgccgcctttaaactggcctggctgctggagcaggcttttttgcgtcggcttaccggggtgggtctgaaagatgaaagcgataatccggcgctgcatggtaaaataaaaccgttgccccctttaaaataataagtcacgcgagcagcagaatagatttttaatattatcttgtgcacctgactttatattccgccgcgtgctgaaattgcccggcggcgcttcgctggtacgggtctacggaagccgtgccagcggtttatatggcgtatttttcaggccgggtaaggcgccagtcgccccccggcaaaatgctttcaccgtaccaaaaaccgtgttgtcgccagccttatgcccttccctgcaggtaataagaatattgcatgagtaaaaacgaaacggacgttgtaaggtaaatcagcgcattaaaaatacccgtcatacttcaagttgcatgtgcgttggctgcattctctcccccagtcacttacttctgtaagcgtctggggactcgcttacttgccgccttcatgcgactcgaattatttagggtatatatctcgttatctattcaacataacagccaataattcgccggatacgctggcgcattattcctcaatgttatgcagtcattgatggttaaagataaataatcgaccgacggagaaatacccatgaaatcgttttccgggaaagcgtctttaatggccacgctggttgccgcgctggtcggcgccagcagcgcgcaggcagcggaaattaaaatcggggtggtattacccctgagcggcgccctcagcggctatggccagccgtcgcagaaagggctggacattattcaggccatcaccccaacgttaaaaaatggcgataccatcaagcttatcgttatcgatgataaaagcgacaaagtcgaagcggccaacgccatgcagcgcctggtctccagcgataaagtggatgccgtgatcggggaagtcacctcctccaacaccctggcgatgaccaaaatcgccgacgacagcaaaacgccgctggtctcctccaccgccaccaacgaccgcgtcacccgcaaccatccctacgtcagccgggtctgcttctcggacagcttccagggggtggtcggggccaatctggcctcccgcgatctgaaagccaaaaccgccgccatcgtgtttgacagcagcaacgactactccgtcggcctggcgaaagcgttccgcacccagttcctgaaaaacggcggcaccattcccatcgaggtccaggctccgggcggcagcaaggactttaaagcccagttggcgagcgtcaaggcgaagaatgtcgacatgatttacatgccgatctactacaccgaaggggcgctgattgccgtgcagtctaaacaactggggctcaacaaaccggtggtgggcggcgacggtctggccgcggatcaggtcttcttcgatgtcggtaaagacgcggtcaacggctatatgaccaccgattactactcgccgaacgccaaagagcagaccccggcgggggaaaccttcatcaaagcctgggaagccaaataccagcagccgacccatacctggggcgcaatggcggcggacgcctataacgtcatcgtcaacgccatgaaccagtgcagcgatccccacgatcgggtctgcgtgaatgaaaaaatccgcgccaccaaagatttccagggggtgaccggcacgctgacgttacagaacggcgacgccattcgcagcgcggtcatcaacgaagtgaaagatggcaagctggcgtttcgtaccgtggttaacccttaagttgtgacgaggctacaaaatggacggcgccatttttctccagcaagtggtcaatggaatgagtcttgggggcatgtacgccctgattgccatcggttatacgatggtttatggcgtgctgcggctgatcaacttcgcccatgcggacgtgatgatggtcggcgcgtttagtacgctgtttttattttcttcggttgggctacccttcggggtagccgttttcctgaccctcgggctgtgcggcctgtttggtatgctgattgaccgggtcgcctatcgtccgctgcgtcaggcctcgaaaatctccatgctgatcactgccatcggcgtcagcttttttctcgaaaacctgtttaacgtactgtttggcggcagctcgcgcttcttctccgcccctgactttttcaaccagacccgggccttcggcagcgtcatcattaccaacgtggcgtggattgtgccgctgatcaccgtcctgctgctgctggcgatcctctggctgctgtaccgcacccgctatgggatggcgatccgcgcggtggcctttgacgtcaacaccgtgcgcctgatgggcattgacgccaaccggatcatctccctggtcttcgccctcggcagtagtctcgcggcgctcggcggcgtgttctactccatcagctacccgacgatcgatcccctgatgggcgtgcttatcggcctgaaggccttcgccgccgccgtgctgggcgggatcggcagcgtcaccggcgcggtgctgggcggctttatcctcggttttaccgaggtggtcgccgtggcgatcttccccgaactgggcggctataaagacgctttcgccttcctgttcttgattctggtcctcttgttccgcccggtcggcattatgggcgacgaacgtctggaaaggagccgtttctgatgctcaacgcgacgacgaccgccggggcgcagctgcgcaacctggccattattgtcatctgtatcgcgctgctggccggaatcaacgtggttttcaatgactacattgttcgtgtcatcagcaccatttttatctttatgatcctcgcggtcagctacaacctgatcaacggcgtgaccggccagctgtcgctggagccgaacggcttcgtggcggtgggcgcctacgtgaccgccctgctgatcctctccagcgacagcaaggtagacatgtttgaaatggccgcccccagcccgtggatcctcagcctgcacgcgggcttcctccccgccctgctgataagcggcctgtgcgcggcggcgctggcggtgtgcctcgccgtgccggtcttccgggtacgtggcgactacctggccattgtcaccctcggctttgggtttatcatcaagatcctcgccattaacaacccgcaaatcaccaacggcgccatcgggctgaacgatattccgcagcagccgcatctcctgttctggtgcgggctgttcgccctgctggccaccggcatgatcctccagctggtgtggtcgaagtatggccggatgatgaaagctattcgcgacgatgaagatgcggcgatcgccatgggggtcaacaccttccgcattaaaacctgcgccttcgccaccagcgccttcttcgaagggatcggcggcggtctgctggcttccctgctgaccaccatttccccggggctgttcgactttatgctcaccttccagctgctgattattatcgtcctcggcgggctcggcagcaccaccggcgccctgctcggcaccgtgctggtggtcggcagcggcgagtggctgcgcttcctcgatcagccgctgcagttcttcggtcacgatctcggcgcgtacccgggcctgcgaatggtggtcttctccctgctgttgctgatcatcatgctcttcgcccgcgaggggctgttggggaaaaaagagatttggcagaccggaagaaggagcggcggctatggcggaaaataacgttatcctgcaggtgcaggacgtcaccatgcaattcggcggcctgcgggccatcgacaacgtcagcttccatgttgacgaggcggagatctttggccttatcggccctaacggcgcgggcaaaacaaccctgtttaacgtcattaccgccaactataaacccaccagcggcagcgtcaccctggcgggcacgtcgctgaaggggctgaagcccaaccaggtggtgaacgccgggatcgcccgcaccttccagaatatccgcctgtttaactccatgacggtgctggagaacgtgatggtcggactcgaccgcgccagccgctattcgctgctggaggcggccctgcatattggtcgctactttccggccgagcgggcggcgaaagccaaagcgatggccatcctggaggatatcggcatcgcccacttcgcccatatgcaggccacaaacctaagctatggcaaccagcgcaaagtggagatcgcccgcgcgctggccaccgcgccgaagctgctcctgctcgatgagccggccgccgggatgaacccgaaggagaccgaggatctggcggagctgatcttccgcatgcgccatgactatcagctcagcgtcctgttaatcgagcacgatatgcccttcgtcaaccgcctgtgcgagcgggtgatggttctggagtacggtaagccgttgttcagcggcctgatggccgaggcgatccagcatccggacgtcatttccgcttatctgggagaagccaattatgcttaacgcccgggaactgaaggtcttttacggcgtgatccagggtctgaagggcgtcgatatcgacgtctatgaccgggaaatcgtcaccctgatcggcagcaatggcgccggtaaaacctccaccctgaacgggatcgtcaacctggtgcgctccagtgggcgcgtcagcttcctcaacgacgatatctcacgcagccagacccaccagatcgtgcgtcgcgggctggcgctggtgccggagggacggcgcgtctttaccaacctgaccatcgaagagaacctgcgcatgggcgcttacaataatctcgccggctacgcccgcctgcgcgatcgcatgtacgccctctttccgcggctcaaggagcggcgccatcagatggcgggcaccatgagcggcggcgagcagcagatgctggccatcgcccgggcgctgatgagcgagccggtgttattgatgctggatgaaccgagcctcgggctggcgccgaaaattgtcggcgagctgttcggcatcattaagcaactgcgcgaagagaatatgacggtgctgctggtggagcagaatgcgacggccgcgctggcgatcgccgatcgggcgtatgtcctggagaatggccggatcaccttgtcaggcgcggcgcgggagatgctgactaatccggaaattaagcggatgtatctggggggataggcatggtcaaaactgcctgggctgcggcggcgcctcctgcaaggccgcaacctcaggcagtctcttgctacacaaagcacacctcgttccagtaggcttctcgcgtcctgcgtcgctcagtatgtcttatcatgacggaaccaccgggtttccacgttgccaatgtccacgccgtagaggctggctaccggcaggatcgcctccatgacgcgctgggtatcctgctgtccggcttcaccgttggacaaaaaagccagccagcccgttaaccgttgccacaatgccactttcgttttctcctctgtcgggaagcgaatcgcctgggtctatttcaaccacagttggccgggcgcgggaaatattaattccgaatttgcaatcctggctggcgcatattacccccggtcctatcaccctctccctggccctctccctgagggagaggggaccgcccggcagtcgttgccgtcctggtaaaacgccagcggcgcataaagaatacccataggtttgttaagttctttttggttatagataagaattttttcttctttgccgccgacgggcaatttgtgggagcgtgatgtccacaaaacaaaacagggattcaggggaaaaactatgcgcaataaaaccacaaaaatcgcactggcgctgggtatgctgctgctcgcctcgcaggcacaggcggaccagctggctgacatcaaagccgccggcgtcgtaaaagtcgccaccttcgacgccaacccgccgttcggctccgtggacgccaaaacccaccatatcgtcggctacgacgtcgactttgcccaggcgctggcgaaagcgctcggcgtcaaactcgagctggtggccaccaacccggccaaccgtattccgctgctgcagtccggtaaagccgacctgatcgtcgccgacattaccatcaccccggagcgggcccaggttattgatttctcaacgccgtatttcgtcaccggccagcagttcctcgtgccggccggctctccggataagctcgatgagtacagcaaagcgcgcatcggcgcggtgaaaggcaccaccggcgaacaggccctgcaccagcgtttcccgcaggctcgcgtcctctcctatgacgatattccgctggccctgaccgccctgcgcaacggcaacgtccaggccatcacccaggacagcaccatcctcgccggtctgctggcggaagcgccggataaagccaagtttaaaattctgcccgacctgctcagcaaagaagagattggcgtgggcgtgaagaaaggcgaaccggccctgctgaaggccgtcaacgatgagctggtgaagctggagaaaaccggcgaagccgcgaaaatttacgatgtctggtttggccctgccactaaaacgccgcagccgcgcgcctttaccatagaagcgaaataatatgttctcgggtttactctcccactccgcggctccggccgcggatttttcacgtctgcagcgcgccagcattacgttccgtgatgtggccaagcgctacggcgatcatcaggtacttaacgccatcaacctacaggtccagcccggcgaagtagtggcgatcctcggcccttccggatcgggaaaatcgacgctgatccgcttgatcaaccagctcgaatccttaagcggcggcgagatcctgatcgacggcaaacccaccagccggctgagcggcagcgccttgcgccagctgcgcagccgcgtcggctttgtcttccagcagttcaacctttacgcccacctgacggcgcaggagaacatcactctggcgctggagcgcgttcatggctgggaaaaaagcgcggctcaggcgcgggcgctggcgctgctgcgtcaggtcggactggaagaaaaagcgcagcagatgccggcgcagctctccggcggccagcagcagcgggtggccatcgcccgcgccctggcctcctcgccgcagattatcctgttcgatgagcccacctcggcgctcgacccggagatgatcggcgaagtgctgcaggtgatgaaaaccctcgcccacagcgggatcaccatgctggtggtgacccacgagatgcagtttgcccgcgaaattgccgaccgggtggtgtttatcgacggcggcgacatcctcgaagtcgccccgccggctgagtttttcgcccatccgcagcatgcccgcgcgcggcgttttctgcagaaggtgctggatccgctgcaccaggagagcctcgagtgacgccgatgcttgactggcacggcgtcctgagcgggcagccgttgcaatggattatctctggttttctcaccaccgtctgggtcagcgtcgccgggatcctgctcgccaccctgctggcggtcctgctgctggccctgcgcctcggcggcggacgcgcggggcgcggactggtggccgcgtgggtctcgttgtttcgcaacactccgctgctggtccagctgctgttctggtactttgccgcctggaacctgctgccgctggcggtgaaggaggtggtgaacgacgaacacgcctggtccattttgccgggtaacgtctggtggctgacgccggagttcctctgctcgatgtgggggctgggggtctttacctccgcctttctggtggaagagatcgcctccggactgcgcgccgtcagccacgggcagcgggaagccgcgctgtcgcagggctttacgccgtggcaggagctgcgctttatcctcctgccgcaggggctggccaacgcctggcagccgattgtcggccagtatcttaacctgatgaaactctcatcgctggccagcggcatcggctttgcggaactgacctatcaggtgcggcagattgagagctataacgcgcacgccctggaggcgtttgccgtcggcaccgcgctgtacctggcgctgggggtggcgatgggcgtggcgctcacgcgtctcggcccgggaagaaaactgcaacggagcgcccgacatgaacgctaatctggcggtgatcgccgataacctcgattacctgctgtggggccgactggcggagggccagcccggcggcgtggcgctgaccctgctgatggccatcggcgccaccctgctggcgctgccgggaggcattgcgctggcgggcctggcctggcgctacggcgggctggtgcggcgtctgctgtttctgtgggcggaaattatccgcggcatcccgctgatatttgtcatcttctggctgtggtatctgctgccgatgctgaccggcggcgatctgcccggcgcggtgaccgtgaccctggcgctggcgtggtttaccgccgcctcggtgatgcactcggtgctggccgggctgcagtcgctgccgaaaggacagtatgaggcggcgctgacccaggggttcgctcccgggcaaacgctgcgcctggtgctgctcccgcaggcgctgcgcaacgttcagccgtcgctggtggggatctttatcggcctgctgaaggacacttcgctggcgtttatcgtcaacgtcccggagctgaccaccgtggccggccaggtcaacaaccgggtgcagatctatcccctggcgatcttcgtcttcaccggcgcggtgtactacctgctgtgctgcggtctgagcctgctggccagccggcgctttacccgccgcgcgaccaccagataaggctcactccgcgggacggggcttcagcggacaggtatcgctgatcttaataaatttgtcgttatagaccagatagtggttccccggctggcgcagcgccggctggcgaaccacgtccccgggacgcagataccacgcgtcgccctcctcttcggtcgaatcgcacccgggtttaatcagcagcttaaaccaggtattgccggtgttgctcaccgtcccggccgccttatcgaaagaccatttaaactgtacctgccgcgggcgcaccaccaggatggtatccatcaccaccactggctccatgctgacttcgccgccggtcgggctgcgcctcgtcaggttacgggtgggaatttcacgaaacgagacccgatagtagcgctcgcggttatcccgcggcccatgataataaaatttgaaatattcgctctccccggcctgcagcgccagctggcggggggcgaacagcagttcgccatccaccggccgggagcgcacttcgctgccgccagggcggtcgatggcgctgacagtgatccggtacagccgcgcgcttttattgttattgaccacccgtttgctggcgaaatccgcttcagccggcagggaaaaggtcagattgccgaccgagatcgcctgcgccagcggcgccgccagcaggcagctcagcgtcagcagggccttagttaatgttgcgccacgtcgcctggacatgaatctctcctgaagcgctgacttcgccaaaccagccgttatcgtctaccgtccgcagcgaaatggcgttatccatcggaatcgaaaatttcaccgtggtcttatccatctgccccacttcgccggagatatcggtccacggcgtggtcagccacagcgcatcggtcatatcccgccagctgtcatcgcacccggcgtcgtaggtctgcgtcgcgccgctgcgggtgataaaagagagcgtcgccgggaacggcactttcgccgtaccgtcatcggagctgaagagacagtaggagcgcccaccaatcacctgcgccggtccggtcactttgatcagcacttcgtcggcggccgttttaccgctggtggtgacgatgtagccgaaatcgagcgccggttcaccactgccgacatacccctcccgcgacggcgccgaggtatattcgtcagagataatgctgatgctgaaatcacggggcttgataatcagcgtattggaggtggaaaactcataccagcctgactccggcgaggtggtgttctggaagcgaaagttgaacaaatccttggtattgatatcgctgatcccgagattcaccatctgcttaaagaagttactggagaagaacacatagatcgcatctgagctcttcatctcattgaaggtgtagtaataggcggtattgctcaccggcttccatgagctgccgttgaggctgaactgcatatcatacgccccgacggccgaggccagcgacgagttggcgatcgccgggaaaatatggatcgacgtattgcttaacccattggtctgcaaggtataatttaccatcttacagcttaatcctgaacggctgccaatggtctgtgtccggcagtcggcgttcccttccccaagggttggcacgccatcgctgttgataaacacctccgccagcgagtgggtgtttatcaaccgcaggttcgcggctttggtgtgggtgacgttgcgcacataccagttgccggaggcctgatccttacagcgcgcgccgctgctggcgtcgtagttcaccgaggtctggcaggcattgatggtcatcgtgaagctgccgccgaccggcatctgttgcagatactgataaaacgcgtccgacatcataccgtgcatccacttcgcgccgccgctggtcaccgtcgcgccatagaacccgctggcgtcggtggtctgcggcaggatcaggctggtggccatatcgcacccggcgtaccagttgatgcagcgcaggccggttaaggggtgcgaaaccggcgagttttccagccacatatcaaacttccagttggcattaagcccggtgttgtagccgttatcgatatagccgagactctgctgatagatggtcccggagccggtgtattttaagccggtccagcggttggcgccggtcatgcgcggatccagcgccccgccgggagtgacgaaaaagttgtcgtcggagttgttttccacaaacacaaactcgcgcgccggcgcatccgaccaggtggtcttggtcaccgccgccctgagcgcggctgccggccagagcagcgcgaggatcgccagcgccatcagtgcattaactttcattctcttctcctgactgctgcaccgccgcccacgacgagaggccgctgcagaccacatccccgacccagacggcgccgcgcgcctggctgagctcgagcgccacttcgcaggttttattgccgccgtagctgaaatcgatagtggggtatttcttatccacgtccatgacaaactcgccgttttcatcggtgcgggtacggccgatatggttgttaatccgcgcattcgccagcagcgtgccgtcttctgcacgaatacggccggagacggtgaccatctgcttcacctctggctcaatcaccgcgacgttgcccggataaagggtcagatgactcttgcgcccgctgacgatgtcgtagctgtcgagcgagtttttgctgttctgcagctccacctcatagcgaccatagggagagagcggcaggtagttacgcttgccgctgagcgggaagatccgcccgttaaccctggcgctaatctgaccatcgtcctccagcccggtgttgaagatcaccccggcgttgccgtcggttcgtccgctggcggcgatatttttaccctgccagccgacgctgccgctggcggtgaggttggtgttgacgtagccgtccgccgcgctgttgacgttcagcgtgccgctggcgtagcgggcgtcgaactgggcatacgcgccgccgctgagggttttgtcatccccggtatcgccggagatggcccgcgacagattggcgccgatggtgcgaatagtgccttcatcaaactgcttgcgcgctgagaggttagccatggtgtagccgttctgatgggtcatcccggcgctgaaccagttgcccagcggcagcgacagatcgagggcgatatatttcccggtgttggcgctgctgtcgccattgttatagcgctggatccccgcccgcaggccgagcgagccaaaggcgccgctgtagaccgtctgatagtaatccgcggtgtagtaatggctgttgtagcgacggtcatcgttgtagctgacgctgaacgtccccagcttcgaccacagcgcgttcaggttgagggtgccgccgatcgcccggttgtcggcatcgctgcgccgcaattgatcgccaatgcgggttctctcctggttaacccacactgaactgaatcccccgggcaacgtggcgctgatgctgccgacgctgctccacgagctgtcgctggccagcatgttttgcaggttaacgttgatcgactcgcccagcggtagcgtcaggcgggtttcccccaccgcctggttgtcgtagccatagcccgtagccgcccagctcagggtgctgagcgacccggaggccgaaaggcctgccagccagctctctttcgccggccgggtctttttcccgctctctgaccagcgatccatatgaaaactgccgccccatacctgccacgccagcggcgcgccggcgccgcgtccccggctgaacagcttattgacccgctgggtgcgtttgctgaccacccgaccattgacgatcacctccacttccacgtcgtaaataccgtacggcaggccgcgggtatccacttcatggttgcccatggcgaagttctggacgctcagcaaccgaccgtcacgggtgagatgcacctcgcccgccgccggcagaaaggcgatcaccggcgtggcggactggctgttgtcgaagacggtggagctggcctggttcccccaggaaaggccgtaaatcttaccggccgaaatagcggtcatcggtcccagggactgcaggttccaggtgtcaagcatcccgccggcaaagcggtggccggcgaaatcgcgctcatacatggccttatataattcactgtcctgctgaccgctgccgatgccgtatagcgagccgtcgagcaccacgtgatgctcacgcagcgccgtgacgttgttcagcgacaggtagctggaggtgttgctcccgccgttacgcatctggttgttatagacgccgaggttatagctcaggttgctgctgagagcgttgacgctggactgaccgatatcttcgctgcgcgagcgcaggacggtgcccagcgcctcgcgcttgaccaccagctgcagcagcagctggcgcaggctgagatccagctgtgcgctgtcggtcaggggaatggtgagcgcctcgctgaacggggcgttggccaggccaatcagctgctggcgggtctgttcgctaacgctggcgttaccttcactctcctccagctggatctgccggacgcgcagctggccgccgtccagccagataaaggcgctgccgatccgctgatcgtcccggctgctctggctgccggcgagatgaatatagagcgggacgctcatgccgtcctgcagcgcctgactgaaggcctgcggaataatcaccccgccaatctgctgcgcgcctgcggcagcagcgctgacgtcgggctgaacgaacaaaaagatcatgccgaaggcaagccgcgttttcagtcctggggtaatccatcgttgaggcatcgtcgttatccatctgcacagctgtctatttcacgggaacaaactgctcaccctgccaaagcgccacccgtccttttttatccgccgtgtccacgcgcgtaaaacggcgcgatttacccggcatcaggtagtaattctctttacattccttaccatcggcggccttcaggcaggggccgtaggcgaggatccgcagcgtcgcattcccggtgttggtcagagagccgttggcgtactgaaagcgatagttcacctgccggggcgccaccaccaggatggtgccgatgcgagcggaagcagtggccaccgcgctgcggttggcattatcgcgttgggcatcgctgagcgcctgatcgaaccagacaatgcggtagtagcgctctttgtcatccgccgggcctttgtagaagaagcggatcacatcgctggcctgggcgggaagcagcaggctggcgggagtgagcaatacctcatccggtttgtccattgggataacctgcccgccgtccagcggggaagagagccgttcgagatggatattgatcagtcgaccgctgtctgtactgttcttgatcgttttgctcagcgtgctgctgccgctgttcataaaggatgaaatatcgccgacatccagcgcctgcgccggcgacaccccggcaagcagcagcccgagggccagaaggtgctttttcataacaattccgtccgtgaaaaaagcagggggagatccccctgctggtgcatcagaaggatcagctggtccaggtggcgtcgaactgtacgctgacgtcgccgctccagatcccttccggcagggtgctgtaatcggtcacggcggtggtgccgttggtggtgccgctgatgatggagaaagtgaaaccatcctgcgcggtggtacggccgctggcgttgtagccattagccaacgcgctgaggttgccgcccataatattgttggcggtatcgatcatcacggtatcgccagttttttccaccgcggcgccgttataatccacgcccacgctcagcgtggagccggaggtatccagctgggttaaggtgttggtgataagacgcgaggtcagcttaaaggcggtcgccgttgtgtccccctcaatcgccacgtcaaacagacctttctgcgagttaaagcctttaatgccttcggcgtactggaacgccaggctgccgagcggggtcacaaccagcttgctggtggtgtcttttttagcggtcgcagaccaggtcgctacagcctgagccgttacgtcagcagcctgcgccacgcccataccggtaaacgccgttaccagagctattgccagaaccttttttttcatcgctttttcatcctgagttgaattaaggacatgatgtcccggtgaaccatttaaaaaacagaattgcctgggtgttactgaactaacttatatattttggaatacagtttggcctcagcattacgccgatgggtatacactgtcttcacgctacaattttcaattctggcgatcgatttcggctgcatgccctgggcggtcatgcggataattttcatttcccgatctgtaattttatctttcttaatatctttgcggagaaacctgccattaattacataggccagttcttttcgaatatcgcgactcagaccaacatataccacgccgcgaatatcgctattgtaataccagtagttcgctaaggcctctgatttcctggccgcaatcaatacgacctgtttcccctttaccgcggatagccattcgctgtcgcgcctgataaattcgtttaatgaagccgtattgagattgataaacacaaaatcttttctgattttctccagtgagagataaattaattcgtcgatgtctacaatcagttcggacagtcctttatagaaataggagtcatcggcagaccaaatatacttatcggaacagcttttatattccatatagtttttaacctcatagtccttgaagtaatcatttttacaacgtcactgcttgccaggcctataaagtttactggcgtattcgtttcctttaataaatcgccattaaataagacacgcattacttatcaatattggataagcgggggattaaactataattattttctgcttggcgttgaatttaagttttttcctatggagtgtcaacatgcggaaaggcaatgaatttcgcgcccaggtcaatatttacaaaaactgaaaatatcaaatttttgagcgccagaaaaagacatttattttcataaggttattggtaatataaccgtcaattcttatctgcgctttatattatccaggatcttcgccctattatgttaggaatattcttaatggaactcttgaatggcttatcaaataaaccggatttagcacaaaagaaaggatataaatctacaaataaacaaaaaccaggatgattcaccaacacataagactcatgaatagattaacctgccgcacaaaatagttatgtatatgttaatacatgcgggatgttgaatgctaaacaaaggcagacgcattatctattcgattaaacggtcttcttcatcaagattaagcgaagattgccgaaggctgcctacgcctacgaaccggtctgtctccgcgccctccaaagcatagcggcttttcggcgcttcgccagccgccagcatgccgcacgcgttgagccgctggccgtcgctctttcacgccagttcacgctttgttcgcaataccgtcatcgaaatttcatataaagacctattaatagtggccagttaatgacgaacctggacactcttatgaacagctctcttgccgcggtggccgaaactgatttccagccgttcaccgatcccgctgccggccggcagcggaaggtcttaagcgtgcgtaatctgagtaaagcttatcaagcccagcacaaggtgctggacggcatcagctttgatctgcacgccggggaaatggtcggggtcattggccgctccggcgccggtaaatcgacgctcctgcatgtcctcaacggcacccacagcgccagcggcggagaaattcttagctacccggaagtcggtaccccgcacgatgtctcacagctgaaaggccgtgcgctcaatgtctggcgtagccactgcggaatgatttttcaggacttctgcctggtgccgcgcctcgacgtgctcaccaacgtcctgctgggccgcctcagccagacttcaaccctgaaatcgctgtttaaaatctttcccgcagccgaccgggcgcgcgccattgcgctgcttgagtggatgaacatgctgccgcacgcgctgcagcgggcggagaacctctccggcgggcagatgcagcgggtggcgatctgccgggcgctaatgcaaaaccccgggatcctgctggccgacgagcctgtcgcctcgctggatccgaaaaacactcagcgcatcatggatgtgctgcgcgaaattagcgagcagggcatcagcgtgatggtaaacctgcattcggtagagctggtcagggcctactgcacccgggttatcggcgtcgccagcggccagcttatttttgacgatcacccctcccggctgacgcaggatgtgctgcagcggctgtacggcgatgaagttagccaattgcattaatttcactcacacgggcaacataatgaaaaaatatatgactggcgcagttcgtttatccgcaatggtcgcgggcatgatgatggcatggcaggcagcggcggcgcagccgaaagagctcaatctgggcattctcggcggccagaacgccacccagcaaatcggcgataaccagtgcgtgaaggccttcctcgataaagagctgaacgtggataccaaactgcgcaactcttccgactattccggggtgatccagggcctgttggggggcaaagtcgacgtggtgctgagcatgtccccctcctcctacgcctcggtttatctcaataatccgaaagcggtggatatcgtcggcatcgccgtggacgacaaagatcagtctcgcggctatcactcggtggtgattgtcaaagccgactccccgtacaaaacgctggacgatttaaaaggcaaagccttcggcttcgccgatccggattccacttccgggtatctgatccctaaccatgcgtttaaagaaaaatttggcggtaacgccgacaacaaatacaacaacaccttctccagcgtcaccttctccggcggccatgagcaggacatcctcggcgtgctgaatggccagttcgcgggcgcggtcacgtgggcctcgatggttggcgattacaacaccggctacactaccggcgcgttcaaccgcctgattcgcatggatcatccggatctgatgaagcagatccgcattatctggcaatcgccgctgatcccgaacggcccgatcctggtgagcaatgcgctgccggcggactttaaggcgaaggtcgtggcggcagtgaaaaagctggacaccgaggatcacgcctgctttatcaaagcgatgggcggtactcagcacatcggcccgggcagcgtggctgacttccagcagattattgatatgaaacgcgagctggtgagcgcgcgttaatcctgcctcaacgccgcctgcttgccccagggtaagcggcggcgctacgttgaagatccccgacgcatgaagacaacccacaccgaatttgaacgctattaccagcaggtacgctcgcggcaaaagcgcgatgccgtctgctggtcgctgctgctgctggcgctctattttgccgccggcagcgccgcggaatttaatctgctgactatctggcactcgctgccccatttctttgactatatggcagagaccatcccgcccctgagcgccggcaacctgttcgccgatgtgcagaccaaagggtcgctggcctggtggggctatcgcctgccgatccagctgccgctgatctgggaaaccctgcagctggcgctggcctcgaccctggtggcagtcgccatcgccacggttttcgcgtttcttgccgccaataacgcctggtccccggcgccggtgcgctttgccattcgcgtgctggtggcgtttttacgcaccatgcccgagctggcgtgggcggtgatctttgtgatggcgttcggcatcggcgcgatcccgggctttctggcgctgatgctgcataccgtcggcagcctgaccaaactgttctacgaggcggtggaaagcgcgcaaaacaaaccggtacgcggcctggcggcctgcggcgcgtccccgctgcagaaaattcgcttcgccctgtggccgcaggtgaaaccgctgtttctctcctatggctttatgcggcttgaaatcaacttccgctcgtcgaccattctcgggctggtgggcgcgggcggcatcggccaggagctgatgaccaacatcaagcttgaccgctacgatcaggtgagcatcaccctgctgctgatcattctggtggtgtcggcgctggacatgctgtccggtcgtctgcgcctgtgggtactggagggtaagaaatgagcgtctggcacatgcaaccggatctcgccgccagccggcggcagcataagcagctctatcaggtccaggggcgctacctgctctacgtcgggctggtggcgctagcctgcgtgctctattacgtctggttttttctgcagttcggcatcagtggcgagcagctgaccatcggcctgcagcagattggccgctacctggcgcggatgttcgtctggcacgacttctggaactggccgttcggctattactttacgcaaatcggcgtcaccctggccatcgtcttcgccgggacgctgaccgccacggtgctggcgctgctgctctccttcttcgccgcccgcaacatcatgcgcggcgtggtgctggggaccctcgccctgctgatgcgccgcctgtttgatgtgctgcgcgggatcgacatggctatctgggggctgattttcgtgcgtgcggtcggcctcgggccgctggcaggggtgctggcgatcatcatgcaggacaccggcctgctgggaaggctgtacgcggaaggacacgaagccgtggaccgatctcccgggcgcgggctgaccgccgtgggcgcgaatggcctgcaaaagcatcgctttggcatttttacccagtcgttcccgaccttcctcgcgctgagcctgtatcagattgaatccaacacccgctccgcggcggtgctgggcttcgtcggcgccggcggtatcgggcttatctatgccgagaatatgcgtctgtggaactgggatgtggtgatgtttatcaccctgctgctggtggcggtggtgatgatcatggacaccctttccgcctggctgcgccgtcgttatatcggcggcgccgcggtgccgctgtatcagggcggacgctagcgcgcctttgcgccggatggcggcttcgccttatccggcctccccgtccggctccgactgtctccaggcccggcaagcaacggcgccgccaggcgatggcatcaggcacggagctgcttttatgccgggtggcggctgcgccttacccggcctactcgtccggctccgactgtctgtaggcccggcaagcaactgcgccgccaggcgatggcatcaggcacggagctgcgtttatgccgggtggcggctgcgccttacccggcctacaaccccaaatcaccgctggcgcaggggctgctgaaactgccggtgctggcggcctcaacatcgctgagacgttcccggaaggccggggcagcccgcatggatgcgggctgagggccgtgttttgcacggacgctgcctcggcccgacccgaagcctgcagggataagtcgaaggcaccgcgcagcggcgatgttgctggccggagcccgggggtacagggggcggcggcgactggccgccccctgtgcgctccctgcgccatgaatgacataacgcagacaattaaccgggagcgcaaactacgctgaagccaccgataacataaacaacaacactgcagtgcttcccctcaccctggccctctcccgaagggagagggaactgtccggctggcgtttaggcccgtgcaagcgcagcgccgccgggcaataatcaggcacggtacccgtgatgttgccgggtggcggctgcgccttacccggcctacaggatccattcacaggctcacaccccgtaggcccggcaagcgcagcgccgccgggcaagatatcaggcacggtatccttgatttcgccgggtggcggctgcgccttacccggcctacaggatccactcgcaggctcacaccccgtaggcccgtgcaagcgcgccgccgggcaacagtatccggcccccgcccctacttcgccaggctggcaaagcgagcaaagaccgcatcaaaaatcgccagcccttgcgccacctgctcagcagtaatggtgcacggcgggaccacatgaatgcggttctccaccacaaaggccagcagcccggcttcggtcagggcccctttgatcgcagccatgtcggcggcggtcagcggcgttttttgttcacggctgctcaccagctccagcgcctggaacaggccgcgaccgcgcacctcgccgataatggcgtgcttctccgccagcgcctcgagaccggggcgcagcacctcgttgccgatagaggccgcgttctcaaccaccttctcctctttcatcgcgtcgatggtggcgacaatcgccgccatcgccagcggatggccggagtaggtcagccccccggcaaagaagtggtcgtcaaagtagcgggcaatcggctcgctaatcagcaccccgcccgccggcacgtagccggcgttaacccccttggcaaaggtcaccagatccggcaccacgccatcctgctcgaaggcgaaccagctgccggtacggccaaagccggccatcacctcatcgaggatcagcacgatgccaaactcgtcggccagggcgcgcacgccctgcatatagcctgccggcggcacgaggatcccggcggtgccggggatggactccagcaggatcgccgcgatggccgtcggcccctcgcattcaatgatccgccgcagatgcgccagcgcgcgctggcactcctcttcctcagtcgcggcgttgaactcgctgcggtaaaggtaggggttgaagaagtgaacgtggccgcgggagaactcattcggcacccggcgccagtcgccggtagcggcgatcgcgctgccggtgttgccatgataggaacgataggccgacagcaccttgtcgcgcccggtatagagacgcgccatgcgaatcgcgttctcattggcatccgccccggcgttagtgaagaacaccttactgaagcccgccggcgccaggtcgacgatgcgcttcgctgcttcgccgcgggcaaggttggcggtggcgggcgcgatggtgaccaaggtttccagctgcgccttcatggccgccagtacccgggggtgctgatagccaatgttgacgttcaccagctggctgctgaaatcgagccaggtgttcccctcataatcccatagctcgcagccttgcgccccggcgatgaccagcgggttgagattgccctgcatcgaccatgaatgaaacacataggcgcgatctaattgccgaacttcgtcattgcttaccgcgacctcgttgtgaattgccagcttcataccctgccctctctcatgtcgtagtggttggcttcatcattggccttggccgcgcaaatcggatagagccagtgcgcgcataacgatgtgacacggtgtcacatccccgcccgtcgtctggctctgtgccttgtcgtccggcgtttttatagtgaagggacaaccgcacaggagaatgagatggcaacgagcaacgtagtgtttatcaccggggcgacctcgggttttggcgaagcggcagcgcaggtgtttgccgacgcgggctggtcgctggtgctgagcgggcgccgctatccgcgactgaaggccttgcaggacagactcgccgccagggtgccggtgcatattattgagcttgacgttcgtgacagcgaggcggtggctgccgccgtggcgtcgctgcccgccgatttcgccgatatcaccaccctgatcaacaacgccgggctggcgctgtcgccactgccggcgcaggaggtggcgctggaggactggaaaacgatgatcgacaccaacgtcactggtctggtgacgatgacccacgccctgctgccgacgctgatccgccatggcgccggggcgagcattatcaatatcggctcgatcgccgggcagtggccctatcccggcagccatgtgtatggcgccagcaaggcgtttgtgaagcagttcagctataacctgcgctgcgatctgcttggcaccggcgtgcgggtcaccgatctggcgccggggattgccgagaccgaatttaccctggtgcgaaccaaaggcgaccaggcggcatcggataagctctatcgcggcaccacgccgctgagcgcgcgcgatatcgccgagcagatgttttatatcgccacgctgccggcgcatatgaacattaaccgggtggaggtgatgccggtgcgtcaggcgtggcagccgttcgctatcgaccgggattaagcgaaacccgacgcatcccctgtcggcgataccggcaggggatgcaggccggactaacggctgctttgcagaaactgcctgacgcgttcggagtcaggctgagtgaagaacttctccggcggcgccttctcaatcagcagtcccttctccagaaacaccacctcattggacacctggcgggcaaaatccatctcgtgggtcaccaccaccatggtgtagccctcggcggcaagggctttcattacccccaacacctcattaaccagctccgggtccagcgccgacgtcggttcatcgaagagaataacttccggcgacatcgccagcgaacgggcgatcgctacccgctgcttctgtccgccggagagagtgatcgggtagacatcggctttgtgcgccatgccgactttctccagctgctgcatggccatggcgttcgcctcgtctcgtttcatgcccttaacgcgcagcagcgcctcgctgacgttctgctgcacggtcaggtgcggccacaggttaaaactctgaaagaccatccccacccgctcgcggattttggccagctggcggtgcgacatcgcccggccgcgctgttcatcaatccccagccgctgaccgccgatatgaatttcaccgcggtccggctgttccagccagttcatacagcgcagcagggtggattttcccgacccggacgagccgagaatactcaccacggtccccttctccaccgtcaggttaatatcccgcaggacttccacattatcgaactgtttggagacgtttttgacgcttacggcaatagactcaggcatggctcattcctcttttggctccccaggcggtcaggcgcttaatcagcagctccagcagaatgctgatcgcccagtaaagcccaatggcgacgataaaggcgttaaacggaataaaataggtcgcctggacgctgttggcggcggcggtgatctcctgaacggtaataatgctcaggaaagcggtgtccttcaggcaaataatcagctgattgccgatcagcggtaaggcggaagagacgatattgggtaaaataatccgccgaaaaatggcatagcgagaaaagccctgagcaatcgccgcttcaatatatccgccggaaaatacccgccgctggctgcgtaatatttcaaagaaataggcgccatgataaataatcagggccagtaaaccggcggtccacggctccatgctaataccgagctgcggcagtccgtaatacagaagataagcgaggatcaaaaaagggatcgcgcgcatcaggctgacgaaaccaataataatccggttaatcactttcttttgatattcgctaaaataacacagcgcaataccgataatcagcgccgccagggcggcggtaataaacagttcgagggtcgcgaataacccggcaataaagctatcgcgaaccgaccagataacgccccactgattcataatgcctcccgttcctagcgcgccagacgcctggctttacgttccgcgataccctgcagcttcaacaaacagccgatgatcgccacatacagcaggccggcggcgaggatcggcgacagcggctcgtaggtgaccgaggagatacggttggtgacccgggtgagatccaccacgccaatcacggcgatcgccgggcttcctttgatcaaaaaggacatctcattgaccagcgccggcaggctctcgatccacatctgcggcagcatgatgtagcggaagtaggtccagcggcgcatccctaccgactccgccgcctcccgctgttcgcgcggaaaggtgcggaaggcattgcgccagatctcagcgttaaacgccgacgtgttaagcgtcagcgccacgatggcggccacgttcttgtcgaggttaatgcccatcgtgggcagggaaaggaacagaaatagcaccagcgtcaccagcggcgtcgcgcgggccagactgatatagaccaccagcagctggtcgatcaccggcaggcgcagcatccgtaccagggcgatcagcaggccagccaccaccccgaaggcgatagcgatggccgaaatccagagggtcgtccatgcgccttcgattaataactgccaggaaattgcatccatgaggccctccttctcaacaacaggcggcggtcgcccgccgcggaatattacagtccggcgagtttgtgaaactgttccgggctggtgatcgcctcggtcggcaggttgtcataggtttcgccgaaccattttttctgcagctcggcgagcttgccggtctccttcatgtggttcataaacctggtcatataggccagcagctgcggcgagtttttcgggatcggccacgccatataccccggtccggagacggccagccctttggcgaagaccttcggtttggctttcgccaggtcgtttaccgagatcaccacgttaatcacgtaatccagtcgcttgttcgccaggtcggcgtaggcttccggataggagggatactccaccaccggccccagcttgccgccggtcttctccagcatcgccttcagctccggcaaacgcgccagcagcgcgctcccggcctgtaaccccacttttttgccgctgagatcggcaatggtatttagcgaggtatcgccagcgcgtttgacgaaatagtgctgcgcggaggcccacggtggggtgaaatcaaagaccttcagccgctcatcggtaataaccgccccggttaaggccatatcgtattgcccggtggagacagccgctaataatccggtccacggtaatatgctctggtcgacatggaatttggcgtacttacgtaattcctcaagcatatctttgttaaagccatcggcctggccattattcataaagttaaatggcgcataatcatcttccgtcgccactttcaaggtgccggatttttctatttccggaagatcggccgcgacggcgtgataagaaaaagcgaccgttaatacagcgctcagacacattgatgccaatgattttttcattatttcacccctgatggattggccagacgggttcattccagaacgcgaaaaggtttctgcaaaatagtggccggggacgttccggtccacggcggctgaatacgtttttaatgtgggagcgtttttcaattccgtatagagccagatgggccgcatcgctgtgtcagatggcggcagggtggtatggaatttgctgagcgtaacgggtggtcgcaatgcgttattgccagaggagccccgtatgatccgtcacctgttacacgttgattttcagcctggccgcggtttgcaggaacaggtgcgagagacgctggtgaatgccattctcagcgggatcttcgccgccgacaccccgctgccctcctgtcgccagttggccagccagcttcgcgtctcgcgcaacaccaccgcgctggtgtttgaaagtctggtcaacgagggctacctgattagccgcccacgcagcggttactacctgcatcccgactatcatgaagcttcgcctgccgccgtcgagagtgcaccgcagcgcgaagcggctgcaccacgctggggcgaccggctgcagatgacccccagccagcaggagtcgatcctcaaaccggcgggctggatgcactaccgctacccgtttatctacggccagcccgatacccggcaattcccgctggccacctggcgctcggcggcgaactggctgcacggcggggtgcgcgacccggcgtgggtcatcgaccatattgaccaggatgtgccgatgctgatcgagcagatccgcacccgggtgctgcccaagcgcggcattgtcgccgcgccggatgaaattctcatcacccttggctcgcaaaatgccctctacctgctgacccgactgctgctctcttccaccacccgcattggcgtcgaaaacccctgcttccgcgaagccatcaacacctttctgctcgccgacgccgaggtggtgccgcacccggtggatgaagaggggatcgtgcttaatgagcgtccctgcgattactactatgtcactccaggtcatcaggtgcccaccggggtgaccatgagcagtgcgcggcgtcgccagttgctggagcatgccgcccgccatgacgcggtcattattgaagatgattatgactcggagagtaactttaccctcaacccgctgccggcgctgaaggccagcgatcgcagcggccgggtggtgtatgtcagcagcctgtcaaaagcgctgtcaccggggctgcggttggggtttatggtcgccgacccggacctgatcgacgaggcgcgcgccctgcgccggctggtctatcgccatccgccgaccaacattcagtaccagatggcccacttccttgcccagggccattatgaaacccatctgcggcgctaccactttgactccgcccagcgctgggagcgtctgcacgccgccctgcagcgctatctgccgtcgtgtcgcgcgctggcgggaagcgaacatgctaacgccttctggctgcagaccccggcgcagatcaacacccagcagctcacctggcgcgccgcccacgccggcgtgctgattgagcccggggcgcgccattttcttaacgccgcgccgccggataactattttcgcatgggattccacgccattaaccccgacgccatcgcccagggggtggaggtcctgcgcggccagctggagcagatgggttagcggtattgttcatactcaacggcgtcgcgcacgctgagcagcgccgggcgcaggctgtcgaaaggcaccgatccgagcgcaatgcgcagcgcctgcgggatcgtggcggagacgcagaacggctcggcggtcgataccgaaatgcggcgttccatcagcgcattcgccagccgatcggcccggctctcttcacccagcggcagccagacgaagtacgaatcgggatgactgacgacgggaagcccgcaaagtacctcgcgggccacctgctgtcgctgtcgcgcatcctggcgtttctgcgtttcaaagcgcgccaccgtgccatcttcaatccaggcgcagatcagcgaacttatcagcgtcggcgtattccacgtcgtggcccggatggcgcgctcaatctccgggcgatagcgcggcggagaaatcaccacccccacgcgcagtccggtggcgatattttttgaaaatccggtgacatacaccgttctttccggcgcatagctgaccaccggcggcggcggatggctcaccagccgggcataggcggcatcttcaataatcagcagatcgtgctggcgcgcgagatcggccagcgcctgtcgctgcccggtgttgagcacccagcccagcggattgtgcagcgtcggcatggtatacaccgcccgcacccgccgctgctggcacagcgtctgaagcgcctgcaggtccggtccctccggtcgacaggggatcgccgccagctccagatgatacagcgccgccagaaccttgaagcccgaataggtcagcgcatccaccgccaccacatcccccggtcgtaacagccccatgacggtcaccgccagcccgtgctgtgcgccgttgacgatcaggacattttccgcgtccggcgcaaagtgctggcaggtcaaatggcgggcgataatgtcccgctcggcgagccgccctgcatgaggctgatagcgcagatgcgagtcaatatcgcccgccatcgccagctgcctgagcgcctcgcgcagcgcatcgccctgctccggcagcgaagggtagttgaaattaagatccacgacatcggcggcgaccacctgctgatcgaccccgtgccccggaggcagcgagaggtcgcgcacgaaggtgccgcggccggtttcgccgctgaccaaccccatctcttccagttcccggtagacgcgcgtggcggtggccagcgagaggcgttctccggcggcaagggtacggtgcgtcggcagacggctgccggcgggcagctgcccgctgcggatcgcctgcgcatatcggtcgacaacggctttatatcgggctttcatcgtgaaatgtatctatgacaataatttgattgtattagattggccacattaccatcgccgctgacgatgctcaagcgggcgcagcccaatcagataacgcgaggttaacgtggtagattcagcaatggataaatcggcgcccggtccctggtccggatgggttcatggtttactgggggtgatcattttcagcggttcgctgcccgcgacgcggctggcggtgcaggatatggatccgttgttattgacctttctgcgcgcctctatcgccgggctgcttgccatcgcgctgctggtgggctttcgccagaaacgcccgcgcctggcgcagcttgtgtccctgatcatcgtctcatccggggtggtgctcggctttccgctactcacggcgctggccctgcagcgcatcacctcggcgcattcgattgtgtttattggcctgctgccgctgatgaccgccctctttggcgtactgcgcggcggcgaacgcccgcggcgggctttctggatcttttcgctgctgggcagcctgctggtggtgggattcgccctgacgcaaaatgcggcggcctcactcagcggcgatctgctgatgctggcggcggttatcgtctgcggcctcggctatgcggaaggggcgaagctgacgcgggagctcggcggctggcaggtgatctgctgggcgctggtgattgccctgccgttgatgctccccgcctcgctgctggttcagcccgcctcctggcatgccatctcggcctcctcctgggtcgcgctcggctatgtgtcgctgttcagcatgctgatcggcttcatcttctggtacaaagggctggccgcgggcgggatcgccgccgtcggccagctccagctattgcagccgttcttcggactaggcctgtcggcggcgctgttgcacgaaaccgtcagccccttgatgctggcggtcacgctgggcgtggtgctgtgcgtggtgggctcgcgcaaatttggccgccagcgggttggcgcagggagcccgagccgtgattgaccgccccgtcatccgccgtcccgggtcgcggcggcgtaaccgccttacccgggctatagcatgataaacggctggaggtcgcgtcgccggggaggacgaccgtctacaccggccgcgcgtactgaagcatcacctgcagcagcacgttggcgccggcggcgacgtgctccggcgaggcatactcaatttcgttatggctgatcccgtccttgcaggggataaaaatcatcccggtgggcgccaggtagctcatatacactgcgtcatgcccggcgccggagacgatcggccgcgccggatagcccagccgctgcgcggcatcggcaatggcctgctggcattcggcatcgaacggcgccgccggatagtggcttacctgcttcagggccacctgcagaccgctctcccgctcaacctccgcgataaacgcccgcagctggcgatccatctcgtccaccagcgcatcgctgagattgcgcatatcaatggagaaggtgacctccccgggcaccacgttgcggctgttgggccacacctgcacgctaccgaccgtgccgcgtccctcttcgctgcgcccggcaatggccaccacttcctgcataatgcgggtcgccacctgcagggcatcctgacgcaggcgcatcggcgtgggtccggcgtgcgaggcctggccggtgaccacgcagtcgtaccagcggatccccagcacgccctgcacgataccgatggttttcgcttcatcttcgagaatcggcccctgctcaatgtgcgcctcaaaataggcgccgatgggatggtcccccggggtctgctcgccaatatagccgatctgcgccagcgcctcgccgacgctgatgccctctttatccgtgacggcccaggtctcctccagcgggaagacgccggcaaagaccccggagcccatcatcaccggcacaaagcgcgacccctcttcgttggtccagaacaccacctcaatcggcgcctcggtggcaatctgcagatcgttgagcgtgcgcaccacctccagcgccgccagcacgccgtagttgccgtcaaatttgccgccggtgggctgagtgtcgatatggctgccggagacgatgggcggcaggccggggttgcggccttcccggcgcataaatacattgcctattttatcgatggtgacgctcatcccggcctcccgtgcccagcctattaccttgtcccgcccctggcggtcgaggtcggtgagggtcagacggcggcagccgcccttcggcgtggcgccgatctgcgcgagatccattaacgacgcccacaggcggtcgccattgatgcgccagccggtggtgtcggtcgcgggggtaaaaagtacatcactgctcatggtagtctcctgacatcaaggtcgccgccagcgtaaccggcggtgggaatgcgctatcaacgcctggtcttcatcctgtatggttttttgccgccgatcagacggccagggcctgggcgttagcgtcaatcgccagctcgcgccagcggtggcaactcaccgcgtggcgctccgcgacggattccgtcggcggcagactctgctcacagaccgggcgacggtgcgggcagcgctcggcaaaggcgcagccgggcggcaagcgagccagatccggcggcgcgccgggaatgcagtgcagggcatcacctttcttaagcccctctttcggccgactgcccagcagcacctgggtataaggatggcgcgggtggcgcaggatctcgctcatcgacgcttcctcgacgatccgcccggcgtacatcaccgccacccggtcggcgatctccaccgcggcgccgatatcgtgggtcacaaacacgatcgacagcccgcgctgcttttgctgctcgcgcagcaggatcaggatctggatttgcaccgtggcgtcgagggcggtggtcggctcatccgccagcagcagcttcgggttacaggagagcgcaagggcgatcatcgcccgctggcgcattccgccggacatctcgtgcgggtaagcatccagccgccgctcggggctgggaatgcgcacctggctcagggcctccagcgccctgtcccgggccgcctggcgcgacagcccttcgtggcggcgcaacccttcaataatctgctgcccgacggtgtagaccggatcgaaggccagcagcggctcctgaaaaatcatcgcgcagcgtccgccgcgatagcgccgcagctggctggcgctcatcgtcagcacctcgtcatcccccacctgcagggtgccggagagctcactgctccctggcgggtgcaggcgcatcagcgcccgcagggtcacgctcttgccggaacccgactcgccaatcagcgccatcacctcccccttttgtacctcaaaggagactccattgaccgcgttgatggtctgcccgtcgcggcgaaagacgacccgcaggtcgcgcacatggacaaaggcgttatccgacatggctgacctccttaagggggatgctttgatgccagggcgaggccggctgcgccatcaggcaggcgctctggtgcccctccccgaccgcctccagccgcggtttcacctcggcgcagaccgccttcgcatgcgggcagcgggtgtgaaagcggcagccgctcggcggcgcgatggggctggggggatcgccgcttagcggcgaggtcagggtgcggttttccgggtccatggagggcatcgagcttaacagcgcccgggtataggggtgggcggaggcggtaaacagctgctccgccgggccaatctccaccacttcgccaaggtacatgacgaggatccgatccgacagccagcgaaccacgtgtagatcgtggctgatgaacacgtaggtcagctcgagagtccgtttcagctcctgcagcagctgcagcacctgggcttccaccgatttatccagcgccgacacagcctcatcgaggatcaccagccgcggcttcatcgccagcgcgcgggcgatattcacccgctgccgctggccgccggagagcgcatgcgggtagcggtcggcaaagcgcgccggctcaaggccaacgtgcgccagcagatagctggcatattcgctggcctctctggcgctgacgccgtggacgcgctggccgaaggcgatgctctcctccatggtcaggcgcggattgagcgaagcatagctatcctggaaaaccatctgcacctggcgacggtaggctttcagcggcagacgtgacgagccgaccccctgtccgtcgaagatcagttcgccgctgtcctgggtgagcaactgcatcagcagccgggcggtggtcgatttgccgcagcccgactcgccgaccacccccagggtttcgcctttcatcaccgtgaagctgatatcgtccaccgcctgcaccacctcccggcctttgccgccgcgaaagtacttcagcaggtgattgaccttcagcagcggctgcgccggcccgccaaggtcgatattgataaagggttgcatcgcttactccttaatcgccattgccgcacgcaggcggtccgcgaggatattgaacgaaatggaggtgataaaaatcatcaggcccggcagggcggccacccacggctgggtatagattgccgtgcgcagcgtattgagcatcagcccccactcgggctccggcggccgcacgccgaggccgagaaacgacaggccggaggcgaggatcatgcacaccgaaatcagcccggtggagaagacgaagatcggcccgagcacgttgcccaacacctggacgcggataatggtcaacgcgctggcgccagtggcccgggcggcgtcgatatagtccatatgccgcacctgggcggtcacgctctcggcaatccgcgccacctgcgggacaaacacgagggtcagcgacaacagcgcattgccgatgcccgcccccaacgctcccgacagcgcaatcgccagcaggacggagggaaaggcatagaacacatccacggtgcgcataatcacggtattggttttgccgcccgtatagccggcgataatcccgatggccccgccgataaaaaaggcgaacaccaccgggacaattcccataaacagcgacagtcgggtgccaaggatcagccgcgacagcatgtcgcgtcccagctcatccgagcccagcgggaagccgtcgctgccgatgggtttcaggcgcaggaacatcgacgtttgatagggatctttgacgataagccacggaccgaacagcgccagggccagcagcaggaggatcaccacgcccaccaccaccccgccggggtcgcgcagtaggcggcgcagcacgccgcgccagtaaccttgccgggtagcgtgggccgctgcggccgggaccgctttcgtcgttgccgtatccaccatggtcagctcctcttaatacgcggatcgagggtggtctgcagaatatccaccagcaggttgagcagcacgaaaaacagcgccagcacccagatggtgccctgcagcaggggcaggtcgcgctgaaaaatggcggtattgagcagcaatccggttcccggccaggagaaaacggtctccacaaggatcgagccgcccatcagatagcccacctgcagccccatcaccgccagcgcggtgggcgcggcatttttcatgacatggacaaagatgcgcgactcgttgagcccgcgggcgcgcaggccaacgataaactcctggctgaggatatcggccacctgcgagcgcacggtgcgggcgataatcccggtcgggatcaccgacagggtgagggccggcagcagcatgaactgcaggtgcgcccagtcccattgccagcccacctcgcctatcggcccgccgccggtggccggcagcagcgcgaacttgacgctgcagaggatcaccagcagcatccccagccagtagtgcggcacgctgacgccaaacaccgacaataccgaggccagacggtcaatgacgctgttgcgaaaatagccagcgacaaagccgaacaggctgccgaggacaaaaccgatcgccgtcgccagcagcgccaggcgcagagagtaagccaccgcggtcatcacttcgtctatcaccgggcggccggtggcgaccgacataccaaggtcgccgtgcagcgcccgccacagccagtggataaactgcaggggcagcggcttatcaaagccgtaagcctgcattaatgtctgacgcagcgcctccgaggcgtccggcggcatcaccgacaccagcgggtcgcccggggcgatctgcaccagcatgaaacagatcaccgccacccccagcatggtggggatagccagcagaatgcggtatagcagcgtattgatcatcggtcgcccctttcgcgattactcttttttgctcaccaggctgaggtcgataaaccagctctgcggttgcaccaccccggtcaccgcaggggaaatcgcacgcggcccgacgtcgtgggcgacaaacaggaatggcacctgatccaccagcgcggcgtgcaactcaccggccgctttgttcatctccgccggggtaaaggcgtgcttgacggcggcggccagcttctccgtctccggcgtggaaaagtaaccccagttggtcgccaccggcggaaacgctttggccgtcgagaagcggatcaggccaaagtaaggatcgttaaccgcggcgctgacgttgatcgcatcgatccctttcgccgaggggtcccgggcgcccaggcgccagttggtaaacagggtgttccattccaccactttgatatccacattgaagaagcagctcttcaggctctgctggatatactcgttcatcggcaagggctgcatctgcccggagccggaggccgaggtagccaccgtgacgcgcagcggtttgctggcattgtatccggcctcggtcattagctggcgggcggcgtccgggtcatattttatctggaaggtgggtttgccatgccacgggctgtcagcctcgtagaccccagtggcctcggtcatgtagccgccgaggtagctcttcagctcggcacggttcagacacaagttggccgctttgcgcacgcggatgtcctgccacggcgatcctttttcaaaggagaactgccagggccacagatgcggctgggtgttggcgtagaggtgaaaaccctgagacttgatctgatcgatggcgtccggcgccggggcttcaatccagtccacctgcttcgacaacagcgccgcggtacgggcgttggcctccggcaaggggatcagcaccactttatccacccggggaatgcgatctttgttccagtagtcggggtttttatcgaggatcagctgctgacgcggcaccagcttctccagtttgaacgggccgctacccaccgcgtgggcggcgaaggcggtccacgcctgtttgctgcgcgcggcgctatctctcacgctggccggcaccgcgtcatactgcttctgccacgccgtcggcgagacgataaacaggttggtgatgttgtacggcagcagcgcatccggttccgaggtggtcagcgccacggtgtggtcgtcaattttctctgcgccggtgagggtcggcatgcgcgacagggtgttgccgatctgacccggggcgtactgcggcgccgctttattcagcaccttatccacgttccagacgatggcgtcggcgttcacctccgtcccatcatgaaacttcacccccggacgcagggtgaaaatccagcggctggtgttctgcggatcgatgtgccactcggtcgccagccccggcaccagaccgctgggcttttcaccttgcgacagatcccactccaccagcgcgtcgtacagcgggatgccggtaaagcggttgccctcatagccttgatccggctggccaagggttaacggaatatccgcggcggtcatggcgatccgcagcgtggaggcgttggcaggtaaggcggcgcccgccagggccagtgcgccgctcaccgccacggcgagacgaccggcacgcgaaaataacgtctttttgtgcatcacatgatccctgttaaataaagtgtcacggattaacaggcaaaatgcgtaccagctcttacgcggacgaaaataggccaaaaccgaccggtaaaataagaatgacttatattatcaccatgataattatgggaaaataattgcatcttattccgccgcaccgccagcgggaaatatgttgcagaattgcaccagccgctatatggcaaatttcaaataatcactctgcgtcactttttattcatcccccgtccaccgccgccgcgtattctccgtcgggatcaatcccttctatacttcagggaacacatcgaccgggagagactatgcctttagccgattttcaccgctccgatccttttaccctcggtatcgaactggagctgcaggtggtgaacccgccgggttacgatctcagccaggatgcctcgacgctgattgccgacgtccagcatcagttgaccgtgggagaagccaaacatgacatcaccgagagcatgctggagatcgccaccggggtgtgccgcgacatcagccatgcgcaaatccagctcagcgccatccagcaggcggtccagcgcgcggcgctgcgccatcatctgcagatctgcggcgggggttcccacccctttcatgcctggcagcgccagcaaatcagcgataacccgcgctatgtcaaaaccgtcgagcattttggctatctggcacagcaggcgacggtctttggccagcatgtgcacgtcggctgccagagcggtgacgacgccatctatctgctgcatggcctatcgcgctttgtaccgcacttcatcgcccttaacgccgcctcaccgtggtttgacagtaccgacagccgcttcgcctgttcacgcctaaaccgcttctcctcctatcccgacaacggtccgatgccgtgggtggccgactggcaggggtttcgtcgcctgttccgccagctgagctacaccagcatgatcgacagcatgaaggatctgcactgggatattcgccccagcccgcagtttggtaccgtcgaggtgcgggtgatggacacccccctgacccttgcccaggcgatccacatcgccggctttattcagaccctggcctgctggctgttgacggagcgcccttttaagcaccagcctgatgattatctgctgtacccctttaaccgctatcaggcctgccgctacgggctggacgggaccctcaccgacgtgcgcagcggagagcagcgcagcatccgccaggagatcctgcagctcgccgaccggctggcccctttcgcccatcagctgaaggcgacggcagcgctggaggcggtggttcgccaggcgaaatcgccgcacagcgaggcgcagcagatgcgcgactttatcgccaacggcggttcgctttccgggctggtgcaaaaacactgtgagatttgggcggcataaggcagcgaggcgggtatactcggcgcagactatagaaaggactgcccatgttattacgttgcctgctccctctggcgctgctgcccctggccgccgtcgccagcgccgcctgtaccctcaccgacccgacgctgaccctgcagagctatcgggtggatgcgcagaaagagcgcattgcgatgtactggcaggatcggcacggcaaagcctggggttccctgcgttcgctgctggcgggtatcgatggcgacggccgggtgcagatggcgatgaacggcggcatttacgataaggcctacgcgccgctggggctgtatatcgaagacggcaaacggctgacgccggtcaaccgctccgccggcggcgggaacttctttatccgccccggcggcgtattcctggtggaaaacggccgggcgaaaatcgtgccgctgccggcgtacaaaccctctcccgccatccgctatgcggtgcagtccggcccgatgctgattgaaaatggcgtcatcaactggcgactgaagccctccgccagttcgcgcaagctgcgcaacggggttggtatcgataagcagggccgggtggtgtttatgctcagcgatcgcgagaccaacttttacgattttgcctgctatgcgcagtcaaagcttggcgtgcggcagatgctttatctcgacggcaccctgtcgaagatgtaccgcaaaggcggcagcgtgccgtggcagtatcatccgttcgtgaccatgataacggtggagagaaaatagcgggcgcgtttgggggcagccattccagccaggagagtgaataaattaacgacaggccgggcaaggtattgccgccgtgcccgatgtccttgcccggtgacgctgcgcttaccgggcctacagagtctgttcgctatggtgtggctcctgaaatctacgggcgtgcagcagggctgattcccgctgaaatcggcgaaccgaaggtcggcagataaggcggggctcacgcccaaacgcaacgtgaacgcaaaacccaccctcaccctacccctctcccaaagggagaggggaccgcccggtagtcgttgcagcctggagtatccccgttaccgaccggtagcgccgcgcttacccccgccgatgcgcccactcgcgcatacgttgaaacagtacatacagcgacgggataaacaggatgccaaccatcgtcgccaccagcatcccgctgaataccgtggtgccgatgatccgccggctctgcgccccggcgccggtggcgagcatcatcggcatgatgccgataataaacgacaccgcggtcatcattaccgcgcggaagcggcgggtagccccctcgcgcgcagcgtcgactatcgacagcccctcctcgcgccggctgcgggcgaactcaacgatcagaatcgcattcttcgccgccagggcgatcagcagcaccagccctatctgaacatacacatcgttggcatagcccgcggtccacagccagagcagcgctccgccgatggcgaacagcaccgagagcatgacgctcgccggcagcgtccagctctcatactgcgccaccaggaacagccacgccatcgccaccgccgccagcacgatccacaccgcctgattgccggtctgctgctcctgccaggagatcccgctccaggcatagtcatatcccggcggtagatgggcctgcaaaatctgctccatggccgccatcgccgtgcggctgctgaccccctcggccgctgaaccgctcaccgacacggacgggaactgattgtactgctgaataaacggcgcccccaccgtcggcgtaatggtgaccagattgctcagccgcacccgctcgccgtcgcggctgcggacgtacagctcgctaatctgctcagcccgctcgcgccactgcatctcattttgcatcaccacatgatagacacgattgttacggctgaaatcgccggcgcgcgtgccgccgaacgccgtctgcaggctgctgaagatctgcgccaccggcacatccagcagcgccgcccggtcgcggtcaaccgtcagggtcagctgcggcacgttgctgctccaggtggtaaacacccggctcagctgcgaatgctggttcgccagctggaggatctcccgcgtcacctgctccagctccgccgacgactgaccggcctgcgccaggatgcgcagatcaaaccccgaggcattgcccaggcccggcagggtcggcggtgcgaaggtcatgatcgtcgcctccggtagcgacagcagctggcgctgaatatccgccatcaccgcatccagcggcggccgctgatgccagtccttgagcattaccgagataaccccgccgttagaggcgctggtgccgttgagaatgttgaacccggacacctgaatcacatcctccaccgccgggttagccatcagcagcttgcgcgcctgggtcatcaccgcttcggtacgctccagcgacgccgcctccggcagctgcacgctggcaaacaggtaaccctgatcttcctgcggcaggaagcctttcggcatcgaggtgaagctgaacgccaccagcgcgcctgccgccaccgtcgccgccagcgccagccagggacggcggttcatccagcctaccagccggccatagccgtcgcgggtgccgtcgagaagacggttaaacgcccgccacaccgccgctggccgggcaggacgcgggcgcagcagcagcgcgcagagggccggcgtcagggttagcgccaccaggctcgacagggccaccgcggtggagagcgttacggcaaactgccggtacagctcgccgacgatccccgggagcagcgccaccggcacaaacaccgccagcagcaccagggtcgtggcgatcaccggcccggcgatctgccgcagcgcctgggcggtggcctgcaggcgatccagcccttccgccattttggtttccacattctccaccaccacaatggcgtcatccaccaccatcgtcagggcgagaatgatcgcgaacaggctgagggtgttggcgctgtagcccagcagatagagcaccgcaaaggtgccgatcagtgacaccgggatcgccagcactacgatcagcgtcgcccgccagctctgcaaaaatagcgacaccaccacgaccaccgccagcagggtcagcgccagcgagacgccgatctctttgatcgtcgccgccacaaagcgggtggtatcgaacttcacctcccaggtgagatccgccggaaagcgagtgtgcaggcggttaagctccgcacgcactgcgctggcgacctgcagggcgttggcggtgggcgtcggatagatccccagataggccgacgctttaccgttcagctgggcgccggagctgtagctgcgggcgcccagctcaatggtcgccacgtcggcgaggcgcaccagctgcccctgcgcgccgcggcggaggataatctcgccaaagctggccgcctcgttcagacgccccagcccgttgatggtcagcgtctgctgctggccgttaaataccggcggggtgcccacctgccccgccgcgccctgtacattttgctcgcgcagcgcctgggcgacatcatccgtggtgatgttgagcgcgttcatgcggtccgggcgcagccagatacgcatgctgtaatcccgggcgccaaacatctggacctcgccgacgccgggcaggcgggccagcgcctcgcgcacctgggtgctggcgtagttgctgacaaacagcggcgacagcgtgcccagcggcgagtagaggcttacccccataagcagattgctggcgcgcttgcgcacctggacgccattctgctgcacctccgccgggagctgcgccagcgcctgcgccacccggttttgcacgtcgatcgccgccaggtcggcatcggtgcccgccgcgaaggttatgctcaggcggtacgtcccctcatccgagctggtggactccatatacagcatatgatcgacgccgttgagctgggtctccagcggggcggcgatggcttccgccacgtctgacgcgctggcgcccggccagctggcgctgacgttcaccaccgggggggtgatcgccgggtactgctccaccgggatcagcttcagcgacaccgcgccgacaaaggtcagcagcagcgcgatcaccatggcaaatcgcggacgacggataaaaaaggtcagcatcccttctccttagctagttcagcacctgcaccgcggcgccttcgcgcaaccgctgcgcgccgtcggtgatcacctgctcgcccgcctgcagccctttctcgaccgcaaactgctgcccctgctgccccgcgagggtcagacgacgctgcccggcggtgtggtccggcttcagcacccagctgaaaaagccctgcggatcctgctgcacggcggcggccgggaccatcactcgcgacggcagttcctgcggacggaacaggatcgtcacgctgccgcccggcagcagacggtgctgcggattggcaaactcggcccgcaccgctacgctgccggtgcgggcgtcgatccggttatcgatagaggtcaacaccccgtcgcgccgtttaccatcaacctcaatctgcgccagccacgcctgcttcagagcgtggatatcggcgtgctggccggttttgctgaaaaacgcggcttcgtcgagggcgaacgagacccgcaccggatccaactgcacaatgtccaccagcacgccgctggacgaattgaccagcgtcccgacgtgaaaggcgctatggcccacgcgaccggtcaccggcgccgcaatctgagtgtagctgagcacaatctgctgggcctcgacgcgggctttggcctgctgtacggcagcggcggcgacgtcgcgctgcatccgggccgtatcgacgtcgttgcggctgatggagtgattgttgataagccgctcgtagcgagtgagcaactgctgcgactgacgtaatgaggcttcggcgcttttcagctcggcctgcgccagagccagcgccgcgcggggctgcgcgtcgtcgagggtaaacagcaggtcgccttcggtaacatactgcccgtcctggaagtggcgctgaacaatcaccccttcggcgcgcgcgcgaatgtcgacggcgcggatcgcctcgacccgcccggggatagcgcgttcttcagcatgaggagccagttcaaccgtggcgacgcggaccggcaccgccggcgcggcggtcgccgtcagggcgccgccgaccagaccgcaggccagcagagcaaagcggaaggttttaatcatagaggatccttgcgacagtaacgcgcgcctgcagcgaggcgcgcgagattgttcaggccgttttgcggaaccggcgcgtcagacgcttctcgacttccaccaccaggaacatggcgacgccgatgaccagagtgacaaaccagtagcgcagcggcagcgcttccgtaccaaacatgctctgcatcagcgggacatagataatgaccagctgcatcagcagcaggacgccggtcaccagccagatgcctttgttgcgcagcagacccatgctcagggagaagctgtcgctgctgcggcagttgatcatgtagacccactgcgccgtcaccagcatctgcagcagcacggtgcggataaactccggactgtggccgcgcggcgccagccaggcctcaaggataaaggcggcaatcgcgatcatcgacccgacgaaagccactcgccacacggcgaaaccatccatcacatgctggccggttttacgcggcggacggttcatcacgttgcgctctgcggcctcaaaggccaggccgaaggagagcgtcgccgacgtcgccatgttcatccacaggatcagcaccggggtcagcggaataatgttccccgccagcagggcgatgatgatcagcagcccctgcgccaggttggtcggcatgatgaagaggatggtcttcttcaggttgtcatagacccgacggccctcttttaccgagctggcgatggtggcgaagttatcatcggtcaacaccatgtcggccgcctctttggtgacttcggtgcctttgatacccatggcgatacccacgtcggcctggcgcagcgccggcgcgtcgttaacgccgtcgccggtcatgccgaccacttcgccgttatcctgcagggctttaaccaggcgcagcttatgctccgggctggtacgggcaaagatgtcgtactccaccgccgccttcgccagcgccgcatcgtccatgtgctccagctggtagccggtcatggcctggctgctgttggtgatccccagcatctggccgatgctcatcgccgtctgcgggtggtcgccggtgatcattttcacgcggatgccggcggtctggcaggcgtggatggcgtcaatggcttccggacgcgggggatccatcatcccggcgatgccgaggaaaatcagtccctcctgcaggtcctcatggttgagggtggtggcatcaaggctggccggcttacaggccgccgccaccatccgcagtccctgacgggcgaagcgcgccatctcctcttcccagtactgcgcctcgaacggcaccgcgccgtggcggctcatctgctcgcggcacatggcgaagataacgtccggcgcaccggtgatcagcacccgggcatcgccatcgatgtgctgcagggtcgacatatatttgtactgcgagtcaaaggggatcttggccaccagacgggcctccaccgccgggagctgcgctttcgccgccagcactttaagcgccccttcggtcggcccgccggtgatcccccacagaccgcgctcatcctgggtaagctggctgtcgttacacaggtcgatggtgcgcagccaggtctccagcacggtgccgggctgaacctgcacgggctcatcgctcccctcgaggaagatccgcccctgcggctcgtagctgtcgccttccacccgatagcagcagtcggcggtgatgatcgctttgacggtcatttcgttcatcgtcagggtgccggttttatccgagcagaccacggtcatggcgccgagggtttccacggtcggcagcttacgaataatcgcccgcttgcgcgccatcgtctgcacgccgagcgacagaataatcgagatgatcgccggcagtccttccggtaccgcggctaccgccaggctaatcagcgacagcagcagctcgcccatcgggatatcccgcagcgcgaggctgaagataaacagcgccaccatcatggcgagaataatggcgaaaatcgctttgccgagcttatccatctgcaccagcagcggggtacggtgcttctcaatacccgccatcatctggttgatatggccgagttcggtctgcgcgccggtggcggtcaccacgccgacgccgccgccggcgctgacggtggtcccggaaaagaccatgttcacccggtcgcccagcggcagatcgccctccagcgcgtcggtgattttatccaccaccgtcgactcgccggtgaggatcgcctcttccacccgcaggttgtgggtttcaatcaggcgcatatccgccggcacgcggtcgccggcgcgcaggataacgatatcccccggaaccaggtcgcgcgtcgggatagtctcatgcttgccgttacgctggacgcgggcatcgctggagagcatgttgcggatcccctgcagcgatttttcggcgttgctctcctggatatgaccgatcagggcgttaatcaccgtcacgccgaggatcaccaaggtatcgacccagtgccccatgatggcggtcagcgccgcggcggccagcagcacgtaaatcagtacgtcgttaaagtgggcgagaaagcgcagccagcccggtttgcctttcttttccggcagcgcgttcggcccacaggtattcaggcgctcggcggcgtctgcggaacttaacccagcggcctggcttttggtctgcgccagcactgcgtcaacggtctgctgccagacctgccgtggcgcggtgtcgcccgagggcgtcgtaaactttgggttattcatcttggtcaatttacattttccttataaattccgtgagtcggaaagcctgaaatcattcctggccaatgaagtaaaagagggcaaaaatgccgataaaaatgtgaaccaatacaagtctaaatttttcgcaaaataaaaattttgtgataagttaattccacaaaccaactattacagaatattaataaaccaaaactaaacgaggtaaaatatgtttggaatctaccgcgggcgccgactggcgctgtacatcgcgctagccattatcattgctacgctggtgggatatagcacttacagttttgtaaaagcgctggcataataatgacgttaatttacacccggctgcaattaacttaattacaaattatttcagattaattaacatgagagcgaaaggcaggcgataatatttaaaatagtcgtgttatagcgagtaaaaaaacaaagcatattgcgttaagcattattttaccggacaatatgtttttttaactgatgattaacatgacatgaaacatccactggaaacgctgctctccgccgccgggatcttactgctggccctgctctcctgtctgctgttgcccgcgccttcgctgggcctgacgctggcgcaaaagctggttgagacattccatatgatggatctcaaccagctctatacggtgctgttttgtctgtggttcttagcgctgggcgccattgagtatctggtgctgcgctgggtgtggcgtcgctggttttccctcgagcggtaaaccaggagaggcgcgcctcagtgggcgcgactgtggttctctttgcggtaggcgcccggcggctgattgaaggtccgggtgaagacgcgggtaaaggtctgttgcgaatcgaagccatacttcaggcagatatcgtagacccgctgatcggtgtcgcgcaaatcgcgggcggccagcagcagcttcctttcgcgaatatagcgccccaggctctcccctttgtactgtaaaaacagccgttgcagatgccatttcgaatacccggcatggcgagcgatatcatcaatacgcagcggttgatgcaggttatcatcaatccactcgacgatagtatcaatcacctgagcggaaatcgtcatatgctctctcctctgatactgcactggcgcttagcgccaccaggcgttaaatgattgcgtcttatcggcgacccacaccggctcgccctgcacaggcgtcagcagacgccaggcccttccttcgctggcagccgccagccgttgatacggttcatcccagctgtgtttcgccaaaacgaatcgtcctgcatgcccaggcagcaccgcgcgagcgcgcagatcgtcggcagcctgagccgtttcatccggcatcatgtggatatatttccagtcctggtcatactgcccgttctccatgatcgccagatcgaccggaccgaactcatcgcctatcgctttaaagtgcggcccatacccgctgtcgccgctgtaataaatcttttgctgccgggtaacgaacagaaaactggcccacagcgtctggttacgcttcagcccgcggccggaaaagtgccgcgccggcagcacgtggacggtgagctcgtcgctggccggtaccgcctgctgccagtccgcttcggtaatcagcgccccgtccattccccagtagcgcagatgcgatccgacccccagcggcgtaatgacccgcttaattttcggcagtaaggcgcgaatggtggcgtaatccagatggtcgtagtgatcgtgggagatgatcagcagatcgatctccggcatcccttccgcccgccacggatagtcgccggggaaggctttattgataaaggagaacggcgccgcgtaatcgctgaacaccgggtcgatcaggatgcgttttcccgccagctgcaggtaccaggaggagtggccgagccagaccatcacgtcctgcccgaggggcagcgtcgccagatcggtcttcaccagcggcagcggttgcgcgggacgggcgttttcccgtttggtcatcaggaaatcccaccacgccgccagcatatttttctgcccggtgaaccctggcgtgggcaattggttatggaactggccgtcccggtagtggggagacgcttccacctggctaagctgtgctccctgcggcgccttaccaaaaccggcattaagaacaaacggcaatgtcgttgctgctgcgagtaacatgatggcgaccacgctgaaagtgacacggttcatatcctgaccagacaaaagcccccatcccggaggctttatgatataacttgattatgagtgagtacgcactcattattaggaaagcgatgaaagtcgtcaagacgattttcaatttttgcgttccgccgttgcagcgacctggtcagacgtgccaagatcggcggtttgtttaaacctgcgtgaggaaaaaagtagtggctcgtccaaagagtgaagataaaaagcaagcgttactggaagctgccaccgcggctttcgcccagtccggcatagccgcctcgacgtcggccatcgcccgcagcgccggtgtggccgagggaacgctgtttcgctatttcgccaccaaggatgagttgctcaacgagctgtacctcgcgattaagctgcgcctggtgcgcacaatgatcgccgggctggatccggacgagaagcgcccgaaagagaacgcgcgcaatatctggaacagctatatcgactggggcgtgcgcaacccgatggagcacaaagcgatccgccggatggcgctcagcgagcgcatcaccgacgaaacccgccgccaggtaaaagagagctttccggagctcaacgaaatgtgccagctgtcggtgaaagagatattcctcagcgaggcgtaccgcgcctttggcgacgccctgtttctgtcgctggcggaaaccaccatcgaattcgccagccacgatccgcagcgcgcccgggagattatcgccctcggctttgaagccatgtggcacgccctgcatgaggcggacgcctaatgacgccggaaacactgcatccctgcgctcaccgtatcgccctgagctacccgtttaccgaacactgctggccctttgggccagagtacgacgtgtttaaggtcgacggccgcatctttatgatcaccatgactattcgcgggcgggcgctggttaatctcaaggccgagccgcagaagtcgctgctgaatcagcaaatttatcgcagtatcgaacccggctaccatatgaacaagaaacactggatcacggtggtgccaggagaggatatcagcgaggatctgctggccgagctgattgacgattcgtggcatcaggtggtgaacaagctgagtaaaaaggcgcagcagcgcctgcgtccgcgctgattttcagccaaatgcgataagtgttatcgcatttttcacccttatcattttgcgatcttcgctgtactcttcctctcctgaacgcaccggtaaggtgctgtaaactgtgaggaagagttatggatatcgtatcggtcgctttgaagcgctattccaccaaggcctttgacgccacgaaaaagctgactgccggggaagcggaacagctgaaaacgctgctgcagtacagcccgtctagcaccaactcccagccgtggcactttattgtcgccagcaccgatgaagggaaagctcgcgtggcgaaagccgccagcggcacctacgtgttcaacgaacgtaaaattctcgacgcctcgcacgtggtggtgttctgcgcgaaaaccgcgatggacgacgcctggctgcagcgcgtggtggatcaggaagaggccgatggccgtttcgccaccccggacgcaaaagccgctaaccacaagggtcgcaccttctttgccgatatgcaccgcaaagagctgaaagatgacgatcagtggatggcgaaacaggtgtatctcaacgtcggcaatttcctgctgggcgtagcggcgatgggtctcgacgccgtgccgattgaaggggtcgattttgcgatcctcgatgaggaatttgacctgaaagcccagggctacaccagcctggtggtagtcccggtcggccaccatagcgtagaagatttcaacgctaccctgccgaagtcgcgtctgccgcagtcgacgaccattaccgagatttaattcccttctgccgggaacgcccgggccatggcgcagcagcgtctcgcccgggacttttttcatccactctttcccccctctttttctgccgtttgtgccaagtttctggcgctcataagcccgcttgtgccaggaataacgactttagtgtgaaccagacgatttaattaattgataaataatattttttatttctggcacgccctttgctcttaacagataccgctatctggatgaaggagaaaccgggtgaaacatatctatgtggccagccacggccattttgctcgcggactggtgaacagtttgtcgctgctgattggcgacgaacacggcgttatcccggtctgcgcctatgacgaagatatcgtgaccaccgaacagctggagcaaaccctggagcatctcatcgtccaggcgaatggtgatgaagtggtgatcttcaccgacctgcttggcggcagtatcaacaatagcgccgtgagcgtcttgatgcgacatcgcaacgttttcgtggtcgccggcatcaatctgactctgctgctggagtttctgctgtgcgaagaagccactaccgaggccgcgattatctacgccaccagcgcggcgcgtgaatccattgttttcatcaatcctctaataacacaaccatcctctgacccacagggagaatctcatgattaaactcgtgcgcattgattatcggctgctgcacggccaggtggtttttgcctggacccgagcgctggatatcgaccatatcatcgtcgccaacgccaaagccgcggcggatgccttcattacgatgtcgcttaacctggcaaagccagcgggcgtcacgctggacatcgccaccgttgaacaggcggcggaaaagcttaacagcggcaagttggatcataaaaaagtcatggtggtcctgggcaatactgcggaaaccctcgcgctagtggaaaaagtcccaggaattagcgcaattaattacggcggtctgccacagaaggaaggggcaagacaattcggcaaggccatctatctgaccgaagaggaaatcgcccatagcagagtgctaaaagaaaaaggtattcggctggagatgcgtcaggtacccgcccactcggctgaactccttaacgaccaactttaacttcggaggtcactatgttgctcaccgcaacgttactcggactgatcgctgccctggggatacttgatggtcgcctgcttggggtatcaatgatcgatcgaccgctggtgatgtgcgccctcaccggtctggtctgcggtaatttacatgaggggattctgattggcgctacgctggagcttattttcctcggcaacgtcgccatcggcgccgcgcacccgccagatatcgtgaccggttccgtattggccaccgcgttttcgatcatgtccggtcgtggtccagaggctgcgctcaccatcgccatccctgtctcaatgctggcgcagacgctgggaatcctggtgcgcgtggtgaacgcccgctttggtcatctggcggaccgctatgcggcacagggtaatacccgaatgatcggcctgatgcacctcgccggtccgacgctactctattttttaaacggatttctaccggtattttttgccattctgcttggttcttcggcggtaagctggttcctggaggccattccgccggtgataaccaatggattgatcgtcgccagtaagatcctgccagcgctcggcttcgccctgctgatcagcatgatgctcagcagcaaactgatgccgtacctcggtctgggatttctgatagcggcatataccaaactggatatcatcgccatcgcgctgttcgctgtggtgttggcatttatcatcagccagttccttaatcttaagcagcaggagagctaatcatgagcgaaatgacgcaaactgtgactggcgctacccagccgcaaagcgatgatgcaagccgcatcaccgcccgcgatttacgcagcgtgttctggcgctcctttacgctacagggctcctggaactacgagcgccagcagcatatgggctatgccttcgcaatgtcgccagccctgaagcgcatctatcaggacccaacggagctggggcgcgccctgcagcgtcatctggtgctgtttaacaccacgccccatctctcgacctttatcttcggcctgtcgattgccatggaagaagagaaccagcgtaaccccgaatttaatgaggagtcgataaacgcgattaaaaccagcctgatggggccgctggcgggcatcggcgactccatattctggggatcattaaaggttatcgccgccgggatgggtatctatttcgcccagcagggcagcctgctgggaccgatactggcgctgttagtttataacctgccgcatcttttgtgccgctggtatggcctgaagctcggctaccgggcgggtacgacctggctgatgagaatttaccaaagcggccttatggaccgggtgacctatatcgcatcaattgttggcctcatggtcgtcggcgcgatgaccgccagcatgatagatatcaccaccccgctcagctttaccgccgggcagaccaccatgaaggcgcaggagtttattgacaaaatacttccttcgctgctgccgctgcttttcacccttgggatgtacaagttgatccgcaagggagtcaatattaactggatcctgctaggaaccgtcgcgtttggcatggcggccagcgcgctaggcctgctttaagaagaggaatatcacccatgcacgtagaagactatatgaatgaaacacccgcctgtctgctcgctatgctgacgcagacgcgggaagatctatggcaggcggcaaaagcgctaacggagcgcggcgtcacgcgtattatcctgaccggctccggtacctcttatcacggcgcgctgaccgcccgctcgtttatgcagcagtggtgcgggctacccgttgatgtctactggccttttctgctggatgattcggcgctgaccctcagcgacaaagcgctggtcatcggcatttctcagggaggcggcagcctctctaccctcgccgcaatggaacgcgcccgggcagccgggcatcttaccgcttccatggccggggaagcgccagccgttatcgaccgggcggcagatttggtcttaacagtaccctgtggagaagagcgggctggcgccaaaaccaaagggtatcactgcaccatacttaatctgatgctgctggggcttgctgtcgccagtcgccagcggcgcctgagcgatgaggagcgcaaggcgctactcgtccgcatggataccacgtttaatcatttgcctacgctcattgaggcctcgcaggcgtgggttctcaatcatgcccgaccgcttatcgacagcgcggacattcgcctgaccggtccggcaaggctgtttggcaccgttcaggaaggtgcgctaaagatgcttgaaacgctacgctgtccggttgccggttacgaatttgaggagttcatccacgggatctataacgccttcgacgagcgctctaccctgatcatgctcgatccgtttcccgatgagcgtcaggatcgcctggcggaaatacttggcggctggactcagcatatttatcgcattggtccacaagtcgaaaataacggcaaaaatatgcccttcgcatttattaacgatcccgactttgcggtctttgaatatattattccgttacaaatggtttgtgcccgactgccgccagtgaagggcatcgatcccgcaataccgaaggatccgcatttccaccagaaaatgaaaagtaaacaactcaattaattgacgcatagtaaaagttatccgcgtttcagcggaggacccgttacatcccaaggagaccaatatgtctatagctcatcaaaacgcacatactattattcgcgatattttatctaagcagcacattgagcgcgtatggtttgttggctgcggtggttcattaaccggtttctggccggggaaatattttctcgattgtgaagctaaaaagctggccgtcggctatgttaccagtaatgaatttgtccatgcgacgccgaacgcgttaggtaaaaacagcgtagtgatcctcgcctcgcagcagggcaacaccgctgaaacggtggaagccgcccgcatcgcgcgtcagaaaggcgccgccactattggactggtatatacccccggcacgccgctgtgcgaacacagcgattacactattgaatactgctgggcgcgctatcccgaaaccgtcgatccgacgcagcaaaaagcggcatacagcctgtggctggcgctggaagtgcttgcgcaaactgagggatacgcccattacgatgagatggtcagcgcctttgccagttttgaatccgtggtacgcggcgctcagcagcaggttcaggcggatgcgcgccattttgccgaagcctggaagaccgaaaaggtcatctacatgatgggcagcggcccctcattcggcgccgcgcatcaggaatccatctgtattctgttggagatgcagtggattaactccgccagcatccacagcggcgagtatttccacggcccctttgagattaccgaaacgggaacgccgtttattttattaaaaagcagcggccgcacccgcccgctggatgatcgcgcgatccgctttatcgaacgttaccagggaaaactgcagattattgacgtggaaaaggtgggaatcgacgcactgcacgccagcgtgcgcgaatatttctgcggcctgctgcacaactgcgtactggatgtttacaacctggcgctggccaccgctcgcaaccacccgctgaccacccgccgctatatgtggaaagtcgaatattgattcgctaaccgcctgccagccccggcgtaattctccggggctgcgttgaggattaccagctaaaatcttcaatacgtaattcaaaaatatcgtgaatatagccaatttccgctaccggtagcgccacgttatagagtattttcaggcgctggaacgagtgattcaccatggcaataaattcaccatgctggcgggtaaattgctcaagatctttataatggctaatttcattacgcattaccagacgctcaatcatacagctgagatgcacatataaactgataattaagttattattaaaatgaaaaccaagcgtattttgccactcagcgataatggtttcgatatggcccatggtttttccagcattcagtatcgtcagagagttgacaacgttatgcagtgaaaactcacgaaccatatttttattaatcagcgcaatttgcttttcattaagatagccgcttaagagctgactcagatgtcgatgcccctgctcgccaagtagttcctcaatgccaacccaaggcactccggccagctgcgggtcgtgggtacccacgaccgcaataacttcatactggtggagcaacgataccgccgtacgactgttttttaagcgcgtatactcgcaggcgatgatgttaatatcaaaatcgttgagcaggctcttctccatcagatttttaaatttaaatgcggtaccgatacctgtaatacaggtcaccagcagcacacgctcttttttttctgcgggccagaacacatcccaacgcgactgattaagcggcacgatctcttcggcgatttgttcgatgttttttcccaacgcgatctcgctggcaacgttcagcgccatgcgggtcgtgacgttatccaccactaccagcgggccgttaatcaccgacaaaagcgcatcggcaatctccttggtgtagcccatatcaataagcaccatcacacccgcacgcgtgtccgtatgctggagataatcaaccacggcgcgactgacatcgttaaacgccacctccatcggcatatccatggcctggtagatcttctcgccaatcaggcggttggcaacgccggcaatgctgctggcggtcgaataaccgtgggcgattatcagcgctttcacttttccgccgctggtcgcatcgatagcattactgacaatggcggtaatcgccagacggtcaagcgtatcgatgagcagatcgtatttattattgacgacatccagtagtttctccgcgatgcgttgcgccagccccgccgaggagtccagccagcgctgcatcaccagacgcacgggctcagcaacgctgcgcggcgccagagggaggctggtgaggtagcggccggtaagataagcgaattcgacatttagctgaaggtcataattgacagcgattgctttgcccacatcttcaataaagcgcagccgtttgtcctgcagagagaccgtactctcctgattcatcagcgcatcaagatagagcgtcacgttctgataaataagcttttcaaaggtccgcacgctaatattatcctgagccaactcctcgcacaggctacaaatattttccgttagccgttggtattcatggtgacgaccagaaaaaagaggctgcgcgtcgccatcgcggtaaatcataacccgctcgctattttgctgaagggtaaaaggcgcatccgccagtaatcggtcgggcagcaaacccgcttttatatgtaaaagaccgctatcacgttcgccaaatgtccaggcgctggcgcaaatattgcgaatcaaattttccagcccaccgacatttccttcaagcgtttcacgcattagctggctgacgatttcgccatccagctccagatcgtggttcaaacgctgggcttcacggcggaaaaagtggtggataaacgccagccgctcgaattggccgcgttcagcgatcggcagaatttttacaatcaccggaatacggcgaataaaggtcgccaggaagtgtttttccagatcctcggttgaagcaaaaattagccgcaccgtggcgctgcgctcgtcggcgctctcccccagccggcgccagctaccgttatccataaaatgaaacaacttttcctggccttcgggcggcagccgatgaacctcatcgataaacaacaccccgccgttgctggtctcgataagaccaggaacggccttatcggcgccggtaaaggcccccttcgcatgaccaaataacttcgaggtcagtagttctggattattcgcgtactcggcgcagttaaatacggtaaaaggcgcatcggcaggtaaaataccttcatctattgcgtagtgccagagctggcgagctagaaaacttttcccggtgccagtagggccccgcagcagcagcggcagacctgcgccagggtagctgatggcagccttgcactggcgcaatgcttcctgcaggctgccctgcgcgccaatcagctgcgccagactatcctgacgatccgcgcacagcgcctgaatggaggcgtattcgccgtgccgaaccgccaggcggtgatgatcgcgcagaacggtaacgggtaaaaacagcaccgggcgaccgttcactttgaccacccgctgctcgcgatggagattattcagatgatggctgatgatgctgcgtttttgcttcaagctatcggcgatggccatagcgttaaactcgcccagcgcttccgccgtcagcgctcgcccggcgatccgttgttctagttggcgaaaaatcgactccttattcatctcgctcccctgtcaaaagcgtaaaattcgcttatacgacaattcgcgcaggacgtcgctgccgccagccacacttctttaaaaacgcttaatttttcatggcttaacgttccccgcatgccagatgcgctcggcatagcggccaatcaccgccagcgagacggcaaggatcaggaaaaacagcactttgtgcatcccgttccagaaaaactcaaagaaacgggtatagagattgatcgccaggaaggttagtccgaagccgcgcagcattccgtcatcggttttcaggctgataaaaatgcagacgccggccgctacggcaaacagcagcccccacggcaggagtcgcgcctggctcacctggtaccagttgtctgcgtcgtaattgccgaaaatcgacatgatccacagcgcaataaacaggtacgtgaggcccatcgccttgctgacggtaaacagctgccgctggcgaagcagggattgcgcgccgtagcagagcgccagcagcgcgccgccgaacaggacgaagcgaatcgggtagttcatgcccagccagtaggcgccccaccccgagacgtagccggtttccgcgccgaaccagttgcccagcgccagcagaaaaaagagccacaccagcccggagcgggcaatatagccgatggcgccgtaaatcacgcatccggccagaaacagcggtgcgatatggccgctgccgttatccagccgttcgccaagctgccatagcgccacggcggtaaagacgacgcccagaaacaaaatcgcctcggtgctgtagtgccactgcgtctcccgccgctggcgacgaaaaccccagccgtagcaggcgactgccagcagcgcaggcagcaggatccgcatcagcgccgagtggctgaacaggctcagcagccacgccaccagctcgctgtcggcgaacagactgcccagggaaatcagcacgcaggccagcgcggtccagaaggcatagcggctcaggcgccgccagtcgaagggggagacgcgcatcgtttgcgccagccgctggctgtccgaggggattaactccccgctggcctgccaggcattcagcgcgcgctgaataatgcgctgctcttttcgggttacgttcataggcattccttgggactgatgacaaacctgttttcgctaatatgctcgcctttctgccgggcagcggctgtcgccctccccggcctacttaaccatttatatatcagattgttactccttaccgtaagcccgcgtaagcgcagcgccgccgagcatgatatcaggcacggagccgctttattgccgggtggcggctggcgccttacccggcctacggtccgcagcagccagccgttaacttacccactagtgcgactgaaactgccgctgttgcggcctcaacatcgctgagacgttcccggaaggccggggcagcccgcatggatgcgggctgagggccgtgttttgcacggacgctgcctcggcccgacccgaagcctgcagggataagtcga

SEQ ID NO: 59 - DNA, 295055 bp, Unknown
  source: /note="Description of Unknown: MKP2_coc_1 Mutant Bacteria sequence"
tttgcctggcggcactagcgcggtggtcccacctgaccccatgccgaactcagaagtgaaacgccgtagcgccgatggtagtgtggggtctccccatgtgagagtagggaactgccaggcatcaaatttagcgtgctgatatggctcagttggtagagcgcacccttggtaagggtgaggtccccagttcgactctgggtatcagcaccactttttaggttaaagttcggcacgttgtaaagaatttgcctggcgacaatagcgcggcggtcccacctgaccccatgccgaactcagaagtgaaacgtcgtagcgccgatggtagtgtggggtctccccatgtgagagtagggaatcgccaggcatcaaataaagcaaaaggcccagtcgaaagactgggccttttgcttttgtgttatctgttgtttgccgatgagcttctttgctgcccagggaaaatctaactggcatcgatatgaacattgcgcagcaacggcccggagagagggaaaggacgttcgccatcattgctcaccatcagagtaaaggcccgctcttcgaccgggcctttggtgtttgttggttctgaaccctgaatctgaaaagtttgccgatagcgatggacgactcattgccagcggtctctggcaacaacaacggctaagaaagctggcgaactatcgtcaggaagagcctgaatgatcgcttactttggggaatggagtggagcagatacaggggatacacctgtatctgcggttggggaagcgatctagcgggtcagagcaacgatccctaacgtgaggccggctaccgcggccgcacccccggcgattgcgcctgcggtttcccagttgtcttctgttgtgcctttcatacaggtattggtatggactaagcggccttgcgagtcataaaccggtacgcagggagagtcatgggcacagcctgccagcagagaggccagcagcgccacgattaaatactttttcatgatattacctctggataatccgctgggttgtactgaaagccagtgcagaacggaatggcttattttatcaccgcggattgtccgggccggaggccgaaatcatctcaatatatgagccgcgtaaatatcgtgaagataagcccgggaatatgcagaaaagatggagagaaagattgtgattcagcgatgctgcgtgcgatggcggttgccagactgtggcgcgtttagctggctgccaatattgcatgcgaaaaaaagcgcccgcaaggggcgccttcaagacatagccgagttattcagcgtgccgggtaaagcgtcgtctaacgaccacgaagaacaccggaacaaagaagattgccagcagcgtcgcggtcagcatcccgcccatcacgccggtgccaaccgcattctgcgccccgctgccggcaccatggctaatcaccagcggcatgaccccgagaataaaggccagagaggtcatcagaataggccgcaggcgcatccgcgatgcctccagcgtggcctcaatgatccctttcccttctttctccatcagatccttggcgaactcgacgatcaggatcgcattcttggccgacaaaccgatcgtggtcaagagtccgacctggaagtaaacgtcattatttagcccacgcagcgtggcggctaacagcgcgccaatgacccccagcggaaccactaacatgactgagaaggggatcgaccagctctcatacagcgccgccagacacaggaagacgacgatcagcgagatggcatagagcgcaggcgcctggttgccggagagccgttcctggtaagacatcccggtccagtcataaccgatgccgctcggcagtttactggccagcgtttccatcagcgccatggcttccccggtacttttgcctggcgaagcttcaccgaggatctccatagatggcaacccgttgtagcgctccaggcgcggcgagccatatatccagcgtgaagtgacaaaggtggagaacggcaccatttcgccgttggcgctacgaacatacatgttgttaatgtcgctcggcagcatacggaagtgggcatcagcctgaacgtacacttttttcacgcggccgcggtcaataaagtcattgacgtagtatccgcccagcgcggctgatatcgtttcattgatatcggagagcgatacgcccagcgcctgcgctttttcctgatcgacatccagtttgaactgaggggtatcttcaagcccattagggcgtacccgaaccagctgatccggatgctgtttcaccatgcccagcagttgattgcgcgcctgggtcagagcggtatgaccgagtccgccctggtcgatcagttcaaagtcgaagccggtggcggtacccagctcaataatggctggcatgttgaacgggaaaaccatggcgtctttgatctggctaaaggctacggtggcccgcttgatgatggactccacgctgttttcatcgccgctgcgcgcttcccagggcttcaggctgacaaacgccataccggagttttgtccctggccgctgaagctgaagccgttaacggtaaagacgctttcgacgttggccttctcgttatgcaggtagtagtctgtcaccgtatccaggaccttctgcgtgcgctcctgggtagcaccggacggcagctggatcatggtcaggaagacgccctggtcttcgtcgggcagaaaggacgtgggcaagcgcatgaacagcacggccatccccacgacgatcagcaggtagatcaccagataacggccagttccacgtaaaataccgctgacgctgttggtatagtggttaacgctctggtcgaagcgggcgttaaaccagccgaaaaatccttttttctcatggtgttcagctgaggctggcttcaacaacgtggcgcagagcgccggagtcagtaccagcgcaaccagcacggagagcgccatggcggagacgatggtgattgaaaactgacgataaatcgcgccggttgagccgccgaaaaaggccatcgggacaaatactgcggagagcaccatggcgatacccaccagcgctccctggatctgcgacatagatttttccgtcgcttcttttggcgagagcttctcctcaaccatcacacgttcgacgttttccactactacgatagcgtcatcgaccagcagacctatcgccaacaccatgccaaacattgtcagcgtgttgatggagtagccaaacatcgacaataccgcgaaggttcccaacagcaccacgggtacggcaatggttggaatgagcgttgcgcgcatgttctgcaggaacagatacatgacaagaaagacgagaataattgcttcaaaaagcgttttgaccacttcgtgaatggagattttgacgaaaggggtcgtatcatacggataaaccaccttcatcccctgagggaagtagggctgcagctcggccagcttcgctttaatcgcggtggcggtatccagggcgttggcgccggtcgcaagcttaatacccagaccagaggcaggtttaccgttaattctggcgacaacgttatagttctctccccccagctcaatgcgggcgacgtctttcagatggacgacagagccatcggcgttgacccgcagcgtgaccttgccaaactcctgcggatctttgagccgcgtctgagcgatgattgacgcgttcaactgctggcctttcagcgctggcgtaccgccgagctgacccgcggcgatctgatcgttctggacctgcagcgcattgatgacgtccaccggcgtcaggttgtatttattcagcaggttgccatccagccagacgcgcatagcgtactgcgcgccgaacagctgcacatcgcccacgccgttgaggcggctaataggatctttgacattggaggcaacatagtcagaaatatcgtcctgggtggtggtcgggttatcagagataaagccggcgaccaacaggaagctgctactggatttctcgacgctaatcccttgctgctgtacttcctggggcagcagcggcgtggccagctgcagtttgttttgcacctgtacctgggcaatatcgggatcggtacccgatttaaaggtgagcgtaatggttaccgaaccggcagagtcgctggtcgacgacatatacatcaggttgtcgatgccgttcatattctgctcgataacctgggtgacggtatcctgtacggtctgggcatctgcaccggggtaggtggcggagatcgcgaccgcaggaggggcgattgtcgggtactgagctatcggcagctgcaggatggccaggccgccggcaatcatcataatgatggccagcacccaggcgaagaccggtcgatgaataaaaaacttagacatggctgggtatccttattgcacggccggcgccgcacgctccgcttccgctttgacagtgacgcctggacggactttctgtaagccgctgacaatcactttatcgcccggcttcagcccactggtgataagccacttatcgccaacggcctgagtcgcgaccacttcccgggtttcaacctggtttttgtcattcaccagcatcacggaggcatcaccacgcggcgtgcgggtcaccccttgctgcggtaccaggatagcctgcggatcgacgccttcgtctatgcgggcgcggacgaacatccctggcagcaggacatgctgcgggttagggaagatagcgcgcagagtaattgagcccgtactttcatcaacagtgacgtcagaaaactgcagtgaacctttgagcggataggcctggccgttctccatgaccagctcaacgcttttagtatcaccgccgcgctgcaggctttcctgcttaaggcgcatgaagtcattactggactccgtcacgtcaacatagatgggatcgagctgctggacggtagccagggcatccgattggccgttggtgaccagcgccccttcggtgacgctcgatttaccgatgcgcccgctaatgggggaggttactttggtgtaggccaggttgatacgggccgtttctacggcagctttggtggcgatgacatcggcatcggcctggcgggcggtggccactgcctgatcgtattcctgctggctgatatatttagtacccagcagtggaacgtagcgtttcaccgtcaaatgggcgatagcggccgcggcttcggctttggcctcatcgcctttggcgctgttccacgccgcctggtaggtcgccggatcgatctgatagagcgactggcctgcttcgacatcacttccttcaacaaagttacgcttcagaatgataccgctcacctgggggcggacttccgctacgcgaaaagcagaggttcggcccggcagttcggtggtgactgatagcggcgcgctgttcacgacatggaccgtcacctgcggcgcctgcgcatggggttgctggttgtcagaattatcgcaaccggttagcaataaggccgagataattaaaccggataaaagtgtcactctggcgtgagtcgtcatggcggttccttatagattacgtacccaatcaggcggcgaatctgtgaaagaaagagggaatcaaaaagcagtttgccatcctacaaataaacgccgttggatgtaagagatacttatttttaagcaatcagcaaggcacgcaaaaacaaaaaaatggtcactgtagtattgcgatttatcgcaattgtaaaagttgataaatagacattatttcagtgaatgtattttccggtgatattcacttgaataattaattctcttttcgcatcaggattaacttgtctgcatttttgctaaataatacttcatggcaaatgctagattaattctaattaagaatatcctatatgatctgcttatcgggaagtggggccttgtatggcaagaaaaacaaaagaagaggcgcagcgcacgcggcagctcctgattgagtccgcaatccagcagttcgccctgcgcggagtaaccaacaccaccctgacggatatcgccgatgcggcgggagtgactcgcggcgcggtgtactggcattttgccagtaagacggagctgtttaatgaaatgtggcagcagcagccgccgcttagagatttgattcagcccagtcaggccatagagtacgaacatgagccgctaaatgctttacgcgagcggtttattgcaggcctgcgctatattgctgcgaatcctcgacagcgcgctctgatgcaaattctttatcagcgctgtgagttttccagtgatatgctttcggaatacgaaattcgccaacgtattggttttaattattcactcattggcggcatcctgcagtgctgcgtgcgtaacaatatattgccagccgaaacaaacattgagatgatattaattgttttacacagtgctttttccgggctgattaaaaactggctgctcgatccgcaacgcttcgatctttatcagcaggcgcctgcgctggtggataatataatggcggtggtctgtgctgcgcgtttatcgggagggcctgcgctacggctggtgaatcagtaatgaggtctgttggcgcagataataaaaaaggcgcttccccatgccgaagagcgccttttatatcaagcaagcaactgactagtatcagttcatgccgtattttttcagttttttacgcagcgtaccgcggttgatgcccatcatcagagcagcgcgggtctggttaccacgggtgtattgcatcaccatgtccaacaggggctgttcaacttcagccagtaccagctcatacaggtcattcacatcctgaccgttcagttgagcaaaatagttcttcagtgcctgtttaaccgagtcacgcaggggcttttgagttacctgatcctgagagttaacggtagaaacggtcagtacgtcagaatttacgcgttgttcgaacatagttctgtcagctctttatttctattacgcaaaattttcgaagtatgcctccaacgcctccagctgttcgctggcatcctcaatggcgttgaatgtgcgccgaaactggtcatctggagcatgttcctgaagataccaggagacgtgtttacgcgcgattcggtacccttttgcctgaccataaaagtcatgcaactcccgaacgtgcgcacaaagcaagcgcttcacctctgccagcggcagcgggggcagcagctctccagtgtccagataatgctggatttcccgaaagatccagggtcttccctgagctgcacggcctatcatcagggcatcagcccctgtatagtcgagcacagctctggctttaagcgggtcagtaatgtcgccattcgcgataatcggaatggaaactttctgcttaactgcccgaatactgtcgtactcagcgtctccgttaaacaaacaggcgcgggtgcgtccgtgaatagtcagagcctgaatgccacactcttcggccagttgggcaatctctacgcagttacggtgttccggttcccaaccggtgcgaatcttgagagtcacaggaacgtccaccgcgttaacgaccgccgtcaggatcgacttcacctggtcggggtactgcaagagggctgaacctgcaagcttgcgattcacctttttcgccgggcatcccatattgatatcaataatctgggcgccgctttccacgttaatccgcgcggcggcagccatctcttccggcacgctaccggcgatttgcacggtacgaataccgggctcatcgatatgcaccatccgtaaacgggacttgtcgctctcccacacctgtgggttagaagacatcatctcggaaacggttaaacccgctcccatctcgtagcacagcgtccggaatggtctgtcagtaatgccagccatgggcgctgcgatcaggcgatttctgagctggtggtgtccgatgcgcatgagttaagaaatgaccatactgtgactgcaaggcggcgtatattacgcattttttgcacgagatgaaaggccaaactttgagcaatcctctgttgcagatcaatgaatccgggactagcgtaaaagggatgaataaatacttatattaatcattgatttaatggatgatggataatttgtgtccatttataaaatcataaaacttctcgatttttcttggataaactggccgcatggcgatataaaacgctgtttttgtagccaaaaaagtgctctgtagtgcgatctgcctctcatttcctggcattatttggtggctactggaaacaaaaatgcggcccgtaggccgcatcgcgcttagtttttccggccggtaatccggcaccactcttccttctcgaccaccgggtcaagggcgaagagatcggcataggcttcacagacgctctccgcctggctggcaaggatgccggaaagccccagcaaaccgcctgaaacgggcaggacgctgattaacggcgccagctcacgtaacgggcctgccaggatattcgcgaccaccacgtcggctttcatcgactccggttggtcctgaggaagatagagctccaggcgttcagaaacgccgttacgctgcgcgttatcacgactggcctgaatagcctgcgggtcgatatcaatcccgattgcttttgccgcccccagcttcagtgcggcaatcgccaggatgccggagccgcagccgaaatcaatcaccgtttttccgttgaggtcgagtccatccagccactgcagacacaaggatgtcgtcggatgcgtaccggtgccaaaggccagacccggatcgagcatcacgttgacggcattttcatccggaacatcgcgccagcttgggcagatccatagccgctccccgaagcgcatggggtggaagttatccatccattcccgttcccagtctttatcttccagttgctcgatcttatgcgcgaacccggcgcccagcagcggatgctgctccagttgggcaacgaccgctttcatatcggtttcagcatcgaacaggccgattacgtcggtatccccccacaggcgggtttccccgggcaatggctcaaataccggcgtatcgtgcgtatcctggaaggtgatcgagaccgatccggcctccatcagcgcatcgctaagatcttcagcgttcgcgccggtggtatttagtttcagttggatccatggcatagcaaaactctttatttatcagtagtcaaaatgggggactgtggggcgggacgaccgaaacggttccccgccacaaacgccagcaaactcagcagcagcgcgggaacgatcgggtgaaagcccagaaactgcactttcagcgtggccagtacggcatacaggacgccgcctacgatcatggcgctcagcgcgccagccgcgttggcgcgttcccagtaaaggcccagcaccagcggccacaggaagacggcttccaggccgccgaaggccagcaggttcagccagattatcatctccggcggccgccaggccgcgagcagcaacaagacccccagcaggagcgtgatgccggcggacatgcgtttaagccgcttttcgttagtcgcctgatccggccgccagttcaggtacagatctttgatgatcgtagcggaactttgcagaagttgggcattgatcgtcgacataatcgccgccatcggcgcggcaaggaagatcccggcggcaaagggcggaagcactttaaccatcagcgtcgggatcaccagatccggcacggttaaatcggggatcaccgcccggcctaatgccccagccagatgcatgccaaacatcaggatcgccaccacgatggtgccgataatgatgccgcgatgcacggctttgctgtctttgtaggagatacagcgcactgcggtatgtggcagaccaataacgccgaagcagaccagtacccaaaacgaggccataaaggttggcgagaggatatcctccgcgccctgcggggacaccagcttgacgtcgatcgactgcagcgtctctaccgcatggccaacccccccggcggcgtggatcacgcccaccagcagcacgatcgtgccgatcagcattaccatgccctgcatcgtgtcgttgagcacgctggcgcgaaagccgccataggcggtatacagcgcgatgctgaccccgaagatcagcaggccggtatcgtaaggaataccggcagccgtctccagcaggcgggcgccgccgataaactggacggtcatggcgccgacaaaggccaccagcagactcaggctggccagccagaccagcaggcgactctgatagcgcgcaaacagcatgtcattgagggtgacagcattatagcgacgcgcaaggatggcgaattttttccccagcacgcccagcgacagccagatggcggggagctggatcatcgccagcagcacccagcccaggccgtatttataggcggcgccgggtccgccgataaatgagctggcgctgatataggtggcggttagcgtcatggccagcacgaagccgcccatcgagcggctgccgagaaagtactcattaagaaagctacctgaggcgcgttttctcatggcgtagagggataaaccgaacaccaccaccaggtaggcgatcaggggaataatgacctcaaactgcatcatcgtcctccagagaaatatcgcggaaaatcagtttgaccatcgcccagcacagcagaatgaacagcagcggtaccagcaggcaggccatttcaaaccagtgtggcaggccggtaaagccaatagccacccccggcaaataggcggcggccagccaggcggcaaggtagagaagggtcagccacagcgcccagcgcgcttctttgtgggcctgaacaaagcgtttgtccattttttgtcccttgaggatgaagaaagcggggattgtaccgcatggtatagatgaggagagagaaaaagaaaaaaggccggtttacccggccttttgctgagagagcagaattatttttcctgcaagccgagttttttctccagatagtggatattggtgccaccatgctggaaattctcgtcgctcataatgcgcatctgcagatcgacgttggttttgatgccatcgatgatcagctcctgcagcgcattcttcatgcgggcaatcgccacgtcacggctttcgccgtagcagatcagtttaccgatcatggagtcatagtacggcggtacggtgtaaccggcgtaaatatgtgactcccagcgcacgccaaagccacccggcgcgtggaaacgggtgattttgcccgggctcggcaggaaggtgttcgggtcttcggcgttgatacggcattccaccgcatggccgcgaaccaccacttcatcctgcttgatagacagcggctggccggctgcgatacgcagctgctctttgatcaggtcaacgccggtgatcatttcagttaccggatgctctacctggatacgggtgttcatttcaatgaagtagaactcgccgttttcgaacaggaactcaaaggtacccgccccgcggtagccgatatccacacaggctttcgcgcaacgctcgccgatgtagcgacgcagttccggggtgatgcccggcgccggcgcttcttcgaccactttctgatgacggcgctgcatggagcagtcgcgttcagccagatagatcgcgttaccctgaccatccgccagcacctgaatttcaatgtggcgtgggttttccaggtatttctccatgtagaccatgtcgttgttgaaagccgctttggcttccgctttggtcatggagatggattgcgccagttcagcgtcgctacgtacaacgcgcataccgcgaccgccgccgccgccggaggctttgatgatcaccggatagccgatgcgtttggcatgggcgcggttagcgtccatgtcgtcgcccagcgggccatcagaacctggaacggtcggaacgccagctttcttcatggcggtgatggcggacactttgtcgcccatcaggcggatagtgtcggctttcgggccgatgaagatgaaaccggaacgctcaacctgctcagcaaaattagcgttctcagagaggaagccataacccgggtgaatcgctaccgcgccagtgatctcagcggcgctgataatggccggaatgttcagatagctttttacggacggagccggaccgatgcagaccgtctcatccgctaacaatacgtgttttagatcgcgatccgcagtggagtgcacagcgacagtcttgatgcccagttctttacaggcacgcaggatgcgcagtgcgatctcgccacggttagcgatgacaattttatccagcatgttcgcctcgttactcgataactaccagcggctcgtcgaattctactggttggccgctttcgatcagaatggctttcaccacgccggctttgtcggcttcgatctggttcatcattttcatcgcttcgacgatgcacagggtgtcgcccacgttaactttctggccaacttccacaaacgctttcgcgtccgggctcggcgtacgatagaaagtaccaaccatcggggaacgtacgatgtgaccactgatttccgctttcgccggcgcttcagccgcagcagctggtgcggcagtcgcggcggcaggcgcctgaggctgcatcatcggcgcagcataagcctgctgcataaccggatagcttgcggccggtgcagagcggctgatgcgaacagactcttcgccttcagaaatttccagttcggagatacctgattcttcaaccagctcgatcagttttttaatcttacgaatatccatgagtgggttccgtactctttgtttagtgtgattgtgacaggcgttttaccgccgtctgtaaagcgtatgaataaccatccgcccccagcccgcaaatgacgccagcggcgacatctgacagatacgagtgctggcggaagggttcgcgtgcatgcacattgctcaggtgaatctcgataaacgggatgttcacggcgagcaaagcgtcacggattgctacgctggtatgcgtgaacgcggccggattaatcaggatatagtccacgttgtctttagcctgatgaattcggtcgattaacgcatgctccgcgttggactgcaggtgatccagactcacattcagcgccgccgcttcagatgttaaacggttaacaatttcagccagcgtgagagggccatacttctcaggctcgcgggtaccgagcatgttaatgtttggaccattcaaaagcaaaatgtgaaacttcactgccattgtgtggcgatctcctgccattttcgggtaaaaaacaacatataccttcaatgcgcccttgtcaccttttcagggtcagaaaaccccgtcaggaaaaccaaagtcgcacattataacgatttcgtagcaattggcagctaaatactggtcttatcagggaagattatcaaccgctatctgaaaaagagtcgcggttgataaaggatctgcgggaaactgcacattaccggattgcgcgccaccactggcggaacttcttgtaacgccatgtcaatagccccgctgccagcagggcatatataacgggctgcggcgagacgatcttcactgaccacaggtagtgtatcggcgcgaggatcgccaccagatagacgaagttgtgtaaaagttgccagcgacgccccagttttcgctgcatcgcttgcgtggaggtcaccgccagcgccagcagaatcgcccagctgatcatgcccaatgtcagataggggcgggtgataatctccgagcccagcagcgccagattgttaatgcccagctccagtagggtatagctggtcaggtgcagcgtcgcccaggcaaaacaccataaacctaacaggcgacgaacgcgaatcaataatggctgcttcgcatagcgcgccagcggagagaccagcagcgtcgccagcagaaacttaagcgccattctgccggtaaagtgctggatatccttggctggatcggcgctaaagtagccctggtgcccggcccagaataaccagaccagcggcaaaaaccccgcaaggtgaagtaaaatcttcagccagacgatctgtttgacggtgaaacgcactagaagttctcccgcagattcatgccgcgatacagcgacgccacttcgtcggcatagccattaaacagcaacgtcggttgacgcttcacatcgagcacgccgccggcgccgataaaccgctcgctagcctgcgaccagcgggggtgatcgacgtgcggattgacgttagcgaagaagccgtattcgtccggcgccgccaggttccaggtggttggcggccgctcgcgggtcagctcgatactaacaatggattttatgcctttaaaaccgtacttccacggcacggtcaggcggaccggcgcgccgttttgcggcggcagcgctttgccatacaccccgacggtgagtagcgtcagcgggtgcatcgcttcatccagccgtagcccctccacgtaagggtaagcgagccccccgccgataaaccggtctttctggccgggcatttgatccggagcatagagggttttgaaggccacatagcgcgcgctgctggtgggctccaccagcgccagcagtttatgcagcgggaagccgacccaggggaccaccatcgaccaggcttccacacagcgcatacgataaatgcgctcttccagcgggaagcgtttggtcagatcgtcatggtcaagggtcagaggtttcgccacttcgccaccgatggtgagcgtccagggatcggtgcgcaggctacccgcgttcgccgccggatcggctttatcgaggccgaattcataaaaattattgtaaccggcgaccttatcttccggggtaagcgtcagattagcctgccactcggcgggtttagcaaactccagggccttgcccgccggggccggcgggcggtcatttcctttaaaccagtccagcagatcggcctgcgcggcggcgggaagcgaaagcgccgtcgcgctgatacccagcattttcagcacctggcgccgcttgagcataaaaacggattcggccgtgacgtcggcttccgtcagtttttttcttttcatggtgtcctccgtcatgcgttttcctaagcatgacggagacggcgatgaatggcgaatatgtcacgaaaaattgcacattaggatgaggagccgccgccgaagcagaggcgcggtcgtccaggaatcatcggaaagtggcgcaagacgtttcctttaccgcgcatgacccggcatctttagcagggaaaaagagggcggcaagcaggccaaacggtaaaccggtaataatttgcgccgccggcgcggggttgccatcctgcgtctaaaattaaagcgcttctggcgcaggccgcaggcgggcgacgattggcaaattttttctgcaaactatactcgctatcggcatacttttaccgataatacgcattccattgccagactcgccatctttgatagtatgcgtcgcgctttaaaaggttaatgcttgcggcaaggtgcgcgccggcacgggagcctgatggttcatcgggtagtcattcactcgcggagttaacacagggatgcgattaacgacgaagttctcagcctttattacgctgctaactagcctgaccatctttgtcacgctgattggcgcttcgctgagtttttataacggcattgagaacaaggtcgaaaaccgcgttcaggcggtggcgaccatgctggataaccggctcatcaccacctctttcgataagcttgaaccgcagttggatgagctgatgacgccgatcgagatcgtgcatatcgatttcatgctcaacggcaaaccgctctacagccattcccgacccgatagctatcgcccgctcggcagccatgagcaattccgtgagatcacggttcagtcgcttaaacatcctggtattacgctgcatctggtctacgttgacccgatggtgaactatttccgttcgctgtcgatcactgccccgctgtcgatctccattggcttcatggtggtaattattttcttcgccgtccgctggatccgccgccagctggccggccaggagctgctggagctgcgttccacgcgtatcctgagcggcgagcgcgggccgcaggtgcgcgggtcggtctatgaatggccggccagcaccagtagcgcgctggatatgctgctgtcggagctgcagttcgccagcgatcagcgcagccggatggatacgcttattcgctcctacgcggcgcaggattcgaaaaccggactgaataaccgcctgttttttgacaatcagctggccacgctgctggaagaccaggagaaggtgggaacctacggcatcgtgatgatgatccgtctgccggagtttgatctgctacgggacaactggggacgggcggcggccgaagaacattactttacgcttatcaacctgctctctacctttattatgcgttaccccggcgcgctgttggcgcgctatcaccgtagcgacttcgccgtgctgctgccgcaccgtacgttgaaagaggcggatagtatcgccggcctgttgctgaaggcgatggatgcgctgcctccaacgcgtatcctcgatcgcgacgatatgatgcatatcggcatctgttcgttccgcagcgggcaatcggcggcgcaggtgatggaacatgcggaagcggcgacgcgcaacgcggtgctgcagggcagcaacagctggtcggtctatgatgacacccttccggagaaaggtcgcggcaacgttcgctggcgaacgctgatcgaacagatgctgagccgcggcgggccgcggttgtaccaaaaaccagctgtcacccgcgacgggcgggtacatcatcgtgaactgatgtcgcggatgtacgacggtaaagaagaggtgattgcagcggaatacatgccgatggtgctgcagtttggcctggcggaggagtatgaccgcctgcaggtaacgcgcctgctgccgtttttaggcttctggcccgaggagaatctggcgctccaactgtcggtggagtcgctgatccgtccgcgtttccagcgctggctgcgcgatgccttgatgcagtgtgaaaaatcgcagcgtcagcggattatttttgaacttgcagaggcagatgtttgtcaatatatcggccgtctgcagccggttatgcgattggttaacgctctgggcgttcgggtggcagtggttcaggcggggttaaccctggttggaaccagctggatcaagcagctggatgcggagctgatcaaactgcatccgggtctggcgcgcaacatcgaaaagcgcagcgagaaccaactgctggtgcaaagcctggtggaagcctgtaaaggcatgcctatgcaagtttttgcgacgggcgtacgcagccgcagcgagtggttggtactgtcccaatgcggtgtcacgggcgggcagggggaattttttgccgcctcacagccacttgacacaaatgtgaaaaaatattcgcaaagatactcggtttgatctgccgtttagcgtgatttcacgtagaataacgcgcgccatcgtgaagggggtgtgcttgtctacctgccggatcatcgcaatgtaaatgccagtgaccctcctttgacaggttacaaattcaggcgtggagcgctgctgaagatttcagcaatgaacggagtcgggaaaatttgtaacaaaggaaatgaactgcactaattttcaccgcagcaggtgatttttgcgccttgtcgctgctgcgtgtggttggtaaagtaagcggattttgttttccgccccagctttcaggattatcccttagtatgttaaaaaaatttcgtggcatgttttccaatgacctgtccattgacctgggtaccgcgaatacccttatttacgtaaaaggacaaggcatcgtattgaatgagccttccgtggtggccattcgtcaggatcgtgccggatcgccgaaaagcgtcgccgccgtgggtcatgaagcgaagcagatgctcggccgtaccccgggtaatatcgcggcgattcgcccgatgaaggacggcgttatcgctgacttcttcgtgacggaaaagatgctgcagcactttatcaaacaagtgcacagcaacagctttatgcgcccgagcccgcgcgtgctggtgtgtgtaccggttggcgcaacccaggtcgaacgtcgcgctattcgtgaatccgcgcagggcgcaggcgcccgtgaagtcttcctgatcgaagagccgatggcggcagcgattggcgcaggcttaccggtttctgaagcgaccggctccatggtggtggatatcggtggcggtaccactgaggtggcggttatctccctgaacggcgtggtctattcctcttctgtacgtatcggcggtgaccgcttcgacgaagccgttatcaattacgtgcgtcgtaactacggctccctgatcggtgaagcgaccgctgaacgtatcaagcatgaaatcggttcggcttacccgggcgatgaagtgcgcgaaattgaagtgcgcggtcgtaacctggcggaaggcgtgccacgcggcttcaccctgaactcaaacgaaattcttgaagcgctgcaggagcctctgaccggcatcgtgagtgcggtcatggttgcccttgagcagtgcccgccggaactggcgtctgatatctctgaacgcgggatggttctcaccggcggtggtgcgctgctgcgcaacctggaccgtctgttaatggaagaaaccggtattccagtcgtggttgctgaagatccgctgacctgcgtagcgcgtggcggcggcaaggcgctggagatgatcgacatgcacggcggcgacctgtttagcgaagagtagtcagcctgaaggtccggggcggcatacgagctgcccctggtctttactgacacgagaatacgcatagcctatgaagccaatttttagccgtggcccctcgctacagattcgccttattctggcggtgctggtggcgcttggcgtgattatcgccgacagccgcctgggtacgttcagtcaaatcagaacgtacatggatacagccgtcagccctttctactttgtctctaatggtccccgggaactgctcgacagcgtatcgcagacgctagctacccgcgaccagctcgaactggaaaaccgcgcgctgcgccaggagctgttgctgaaaaacagcgatctgctgatgctgggccagtacaagcaggagaacgcgcgcctgcgtgaactgcttggctcgccgctgcgccaggacgagcaaaaaatggtgacgcaggtcatctcaacggtcaacgacccttacagcgatcaggtggttattgacaaaggcagcgtgaacggcgtctatgaaggccagccggttatcagcgataaaggcgtggtggggcaggtcgtggccgtggcgaaaatgaccagccgagtgctgctgatctgcgatgccactcatgcgctgccgatccaggttctgcgtaacgacattcgcgtcattgccgccggtaacggctgcacggacgatctccagcttgagcatctgccggcgaataccgatattcgcgtcggcgacgtgctggtgacctccggtctcggcggtcgtttccctgaagggtatccggtcggggtagtctcctcggtgaaactggacacccagcgcgcctataccgtgattcaggcgcgtccgacggccgggctgcagcgcttgcgctatctgttgctgctgtggggcgccgatcgtaatggcgctaacccgatgaccccggaagaggttcatcgggtggctaacgaacgtctgatgcagatgatgccgcaggtactgcctgcgccggatgcgatggggccgcagatgccggcgcccgccaccgggttgacgccgcctcagccgtcgcagcctgcaggggggcaatagtggcaagttaccgtagccagggacgctgggttatctggctctcgtttcttatcgcgctattgctgcaaattatgccctggccggcggacatcagcgttttccggcccaactgggtattattgatcctgctgtactggatcctcgcgttgccgcaccgggtaaacgtggggacgggtttcgtgatgggggctattcttgatctcatcagcggttcaacgctcggcgttcgcgcgctgtctttaagcatcgtcgcctatctggtcgcgctgaagtatcagctgttccgtaacctggcgctgtggcaacaggcgctggtggtaatgttgttatccctggccgtggatatcattgttttctgggcagagtttttagtgatcaacgtctctttccgtccggaagtattctggagtagtgtagtaaacggcatcctctggccatggctcttcctgctgatgcgtaaagtgcgtcagcaatttgcagtgcaataaggttgatatgacaactctgtatctcgcttctggttccccgcgtcggcaggaactgctgactcagcttggtctcgctttcgagcgtctggttcctggtatcgaggagcagcgccagccgcaggagagcgcccagcactatgtcgtccgcctggcgcgcgaaaaagcgcaggccggggtggcgatggccacccgcgatttgccggtgctgggagcggatacgattgtcattttgaacggcgaagtgctggaaaaaccgcgcgacgccgaacacgctgcagcgatgctgcgtttgctttccggccacacccatcaggtcatgaccgcggtggcgctggcggataagcagcaaacgctggactgtctggtggtcacggaagtgaccttccggcggctcagcgagcaggatatcgccgattatgtggccagcggcgagcctttagataaagcaggtgcatacggtattcaagggttgggtggttgcttcgtcaggaagattaatggcagctatcacgccgtagtcggcttaccgctggtggaaacgtatgagttgctcagtaactttaactcactgcgtaaaggaaagggataaagatgacggctgaattattagttaacgtaacgccatccgaaacgcgcgttgcgtatattgatggcggtattctgcaggaaatccatattgagcgtgaagcgcgacgcggaatagtaggcaatatctacaaaggtcgtgttagccgagtgctgccgggaatgcaggcggcttttgtagatattggtctggataaggcggcgttccttcacgcctccgatatcatgccgcataccgagtgcgtcgccggtgaggagcaaaagcagtttaccgtgcgcgatatttcggagctggtgcgccagggccaggatctgatggtccaggtggttaaagatccgctgggtaccaaaggcgcgcgtctgaccaccgatattaccctgccttcccgctatctggtctttatgccaggcgcctcccacgtgggggtctctcagcggattgaaagcgaagccgagcgcgagcgcctaaaaaaggtcgtcgcagaatattgcgatgagcagggcgggtttatcattcgcaccgctgcggaaggcgttcacgagcaggagatggccgccgatgccgcttatcttaagcgcgtatggaccaaggtgatggagcgcaaaaagcgcaaccagacccgctatcagctgtatggcgagctggctctggcccagcgcgtgctgcgtgattttgccgatgcgcaactggatcgcattcgcgtcgactcgcgcctgacctatgaggcgttgctcgaattcaccgccgaatatatcccggaaatgaccagcaagctggaacactacagcggccgtcagccgatattcgatctctttgacgttgagaacgaaattcagcgcgcgctggagcgtaaagtcgagctcaaatccgggggctatctgatcatcgaccagaccgaggcgatgaccaccatcgatatcaacaccggggcctttgtcgggcaccgcaatcttgacgatacgatcttcaataccaacatcgaagccacccaggcgatagcccgccagctacgtttgcgtaatctcggcggcattatcatcattgatttcatagacatgaacaatgaagatcaccgtcgacgggtgttgcactctttagagcaggcgctgagtaaagatcgggtgaagacgagcattaacggcttctcccagctgggcctggtggagatgacccgtaaacgcacccgtgaaagcgtggagcatgtgctgtgcaacgagtgcccaacctgccacggacgtggaacggtaaagtcggtggaaacggtgtgctatgagattatgcgtgagatcgtccgcgtacatcatgcttatgattccgatcgcttcctggtctatgcttcccctgcggtggcggaaaccctgaaaggggaagagtcgcatgcgctggcggaagtggaaatctttgtcggcaagcaggtgaaggtacaaattgagccgctctataatcaagagcagttcgatgtggttatgatgtaagacaccgcgtcattgtgcggctgacaaggagagaggcgtgaggcgactgcccgggattttattgctcaccgtggcaacattgattgttatcgtcgcgctgctggtgagtggcttgcgtctcgtgttgccacagctcgacgcctggcgtccgcagctgctggagaagctctccaccctcaccggtacgccggtggacgcctcgcagatcaccgccagctggcagacttttggtccgacgttagacgcccgcgatatccatgtcgggctgaaagatggcggcacaatggcggtcaagcgcgtaaccctggcgctggatgtctggcagagcctgctgcatatgcgctggcagttccgcgacctcaccttctggcagctgcaggtccataccaatacccctattcagaccaatgacggtggcgaaagcctgaaaaccgaccgcatcagcgatctctttttacgtcagttcgatcactttactctgcgcgacagccatctgagcttcctgactctttccggtcagcgggcggagctggcggttccgcagctgacatggcttaacggcaggaaccgtcatcgcgccgaggggcagctcagcctctccagcctcaccggccagcatggcgtcatgcaggtgcggatggatcttcgcgatgaggatggcctgctgaataaaggccgggtctggctgcaggcggatgatatcgacgtcaaaccgtggctgggacgctggatgcaggacaatatcgccctgaaaagcgcccgcttcagcctcgaaggctggatgaccattgaaaaaggtgatgtggccagcggcgacgtatggctgaaaaaagggggcgccagctggcagggcgataacgaagtccatcatttgtcggtggataacctgacggcgcatctctcccatgataagcaaagctgggccttttatattcccgatacgcggatcgctatcgatgataaaccctggccaagcggagccctggcgatggcgtggatcccggcgcaggacgttggtggcgacgatcgtcagcgtagcgatgagttacgtattcgcgccagcaatttggccctcagcggcctgagcgggttacagccgtttgctgataagctggcgccttctctgggcgaactctggcgtaccacgcagcctggcggcaaaatcaatttgctggctctcgatatccccctgcaggcgacggagaaaacgcgttttcaggcgcagtggagcgatctggcgtggaagcagtggaaactcctgcctggggcagaacacttctccggcagtctgaatggcagcgttgagcacggggaattacgcgcccatatggcgaaggcgctgatgccgtatgccggcgtcttccgcgcgccgctggagatagccgctggcgaagccacgctcagttgggtgaaaaacgacaaagggtttatgcttgatggccgcgatatagacgtgcaggcgacaggcgtacgcgcccgcggcggcttccgctatctgcaaccgcagggggacgatccctggctgggcattctggcgggcatcagcaccaatgacggtggccaggcatggcgttatttcccggaaaatctgatgggcaaagcgctggtggactatctgagcggcgcgattaaagcggggcaagccagcgatgcgacgctggtgtatggcggcaatccgcatttattcccttatccgcataatgaaggccaattccaggtttatgttccgctgaagaacgccacttttgccttccaaccggactggccggcgctaaccgggctgaacatcgatctcaattttatcaacaacggcctgtggatgcaggcggataaagcgatgcttggcaacgtgaccgccagcaatctcgatgccgcgatcccggactatgcgcaggaaaaactgctgattgatgccgatatcaaaggcccgggaaaagaggttggaccttactttaatactacgccgctgaaagagtcgctcggggcggcgctggattccctgcagctggatggggatgtgagcgctcgcttacatcttaatatccccctcgacggcgagatgaccaccgcgaaaggcgatgtgcgcctgcagaataatagcctgtttatcaaaccgttagatactacactgcagaacctgagcggtaatttcagctttgtgaatggcgatctcaatagtcaaacgttgagcgcgacctggtttaatcagccgctgaacctcaatttttccacccgcgaaggtgaaaaagcgtttctggtggatgtcgggatgaatgccaactggcagccgtcgcgcaccgggctgctgccgaaagccgtgagtgaggcgttgagcggtagcgtcccgtgggatggcaaggtcgccatcgaactgccgtaccatggcaatgccagctataaggtcgatatcaacggcgatctgaagaatgtgagcagtcgcttaccttcgccagtcagtaagcccgccggcgaaccccttccggtcaaaattaacgtcgccggcggcctgagcagcttcgacctgaccggctccatcggggcgaagaatcatattaacagccgctggttgctcaatcataagctgacgctggatagagcgatccttaccactgacagcaaagggtactctccgctgcccgatcagtccggtatcgagctcaacctgccgccgatggatggcgcgcagtggctggcgctcttcgagaacggcgcggcaaatgaagtgagcagcagcgtgctctttccaccgcgcattgtgctgcgtacgccgtcgctggccctcgcgggtcaacagtggaacaacgtcagtctgatgtcacagccggtcgccggcggctcgcaggttgaggcgcaggggcgtgagatcaatgccacattgacgatgcgcgacaatgctccgtggctggcaaatgtgcgttatctctatttcaatccggccagcgccagcggccagaacgcaacagagaatgtggccccccagacggcgacgcggctggatttccatggctggcccgatctgcagctacgctgcgcggaatgctggctgtggggacaaaaatatggccgcatcgatggggatgtggcgatcaaaggggataccttaacgctctccaacggcctggtggataccgggtttggccggctgacgaccaacggcgtgtgggtgaacgccccttcaggggttcgaacctcgctgaaaggcagactgcacggcaataagacggatgcatttgcggatttctttggcgtctccacgccggtgaaggattcgccgtttgatatcgactacgatctgcactggcgcgcgccgccctggtcacccgatgtcgcgtcgctcaatggcatcattaaaagccacctgggcaaggggcagtttaccgacctgagtaccgggcacgctggccagctgctgcgtctgctgagtgtggatgccctgctgcgtaaactgcgtttcgatttcagcgataccttcagcgaaggcttttacttcgattcgattaacagtacggcatggattaaggatggcgtactgcataccgatgatacgctggtggatggccttgaagcggatattgctatgaaagggtcggtcgatctggtgcgtcgccagctggatctgcaggcggtggtggcgccggagatctccgcgaccgtcggcgtggcggcggcctttgccgtcaaccccatcgtcggcgcggcggtatttgccgccagcaaagtgctgggtccgctgtggaataaagtttcgattctgcgctaccgcatcaccggcccgattgaccagccgcagatcaatgaagtgctgcgcctggcgcgcagcaataaaaagcaatgatttgacgattgccgggaattgccgcaatctcaatagatagccttctgtatttccgcctgtcaggcggcaacaaacgagtagcataacgatgagtctgaacctggtaagtgaacaattactgtcggcaaatggcctgaatcatcaggacctgtttgccattcttggtcaactgaccgagcgccgcctcgattacggcgatctctattttcagtcgagctatcacgaatcctgggttctggaagacagcatcattaaagatgggtcgtacaatatcgaccagggcgtaggcgtgcgcgccgtcagcggcgaaaaaacgggctttgcctacgccgatcagatcagcaaactggcgctggagcagagcgcccaggcggcgcggaccattgtgcgcgacaccggcaatggcaaagtgcagaccctcggcgccgtagagcatcgtgccctgtacaccagcatcgacccgctgcagagtatgacccgggaagagaagctggatattctgcgccgggtagacaaagtcgcccgggcggcggaccagcgggtgcaggaggtttcagccagcctgagcggggtgtatgagctgatcctggtcgccgccaccgatggcactctggccgccgacgttcgtccgctggttcgtctttccgtcagcgtgctggtggaagaggatggcaagcgtgagcgcggcagtagcggcggtggcgggcgttttggttatgactatttcctcgcctcccaggagggcgacgtgcgggccgatgcctgggcgaaagaagcggtgcgcatggcgctggtcaacctctcggcggtcgccgcccctgcggggatgctgccggtggtgctcggcgccggctggcctggcgtcctgctgcatgaagcggtcggccatgggctggaaggcgatttcaaccggcgtggcacctcggtctttagcggccatatgggggaattagtcgcctctgagctgtgcaccgtagtggatgatggcaccatcgccgatcgccgtggctcggtggccattgatgacgaagggacgccggggcaatacaacgtgctaatcgaaaacggcattctgaaaggctatatgcaggataaactcaacgcgcgcctgatgggcgtcgcaccgaccggcaatggccgacgtgagtcgtatgcccatctgccgatgccgcgtatgaccaacacctatatgctggcgggccagtcgacgccacaggagattatcgaatcggtcgactacggtatctttgcgcctaacttcggcggcgggcaggtggatatcacctccggtaaattcgtcttctccacttccgaggcctatctgatcgaaaaagggaaggtcacgaaggcggtgaaaggggccacgctgattggctccggcattgagaccatgcagcagatttcgatggtgggcaacgacctgcgcctggataacggcgtcggcgtctgtggcaaagagggccagagcgtgccggtgggcgtcggccagccgaccctgaaggtcgataaccttaccgtcggcggcaccgcctgatcctgacctggttcccggcgctgccgggaaccgcttcaccgggcgatcccgcgcccgtgcatgccctgatagatcttcgccacgtcgacaaaatactccgtcagatagttgatacagacctgcactttcagcggcagtttatccttttccgtatacagggcgtagaccggtcgcggatcggactgatagctgggcagcaggatctcaagctcaccgcggttgatctcttcgatcgcccacattaacggtacataggcgatacccaccccggcggtcagccagcgcaccagcgtcatagggtcgttggtcacgaagcgcccctgcggggtgaggcgggtcgagatcccttccggcgcgataatgacaaactcattgtccggccgcacgctatattccagccaggcatgtccggcaaggtcggccggtttctctggattgccagcctgcgccagatagcttttagcggcgcataataccatcggcattgagcccaggcggcgggaaaaaaggctggaatcctgcagggcgcccacgcggatcaccacgtcaaggccgtcggcgatcaggtctggcgcaggtatgccggtgaccagattaacagagagcccggggtattctttgagcattttcgccgttatgcgcgccagaacattctgtgccatagttgaagagcagccgatgcgcagcgtcccgatgggggtattgttaaatgcgtataattgctcatggacatcctgcgcttcaaacagcatcctacggcagccctggtaatagattttacctgcttcagttaagccaaggctgcgggtgctgcggttgagcagctttacctgcagctcatcttccagtttggcgacggtctgactgatcgaggaaacgctcatctgaagctggcgggccgctgcggtgaatgaacctaattcgaccactttggcgaaaacggacatgcgttttaatcgttccattattcactctggcttaaaagtgatttagatcacacattgtagataatgcggcaatcgttacgttaatatattgttagctacataataaacgcatctgctcactacctgtacgcttcttattcaaggtcatcatgagtctgtttcctgtcatcgtgattttcggcttatcgtttccgccgatcttcttcgagttgcttttgtcgctggctatcttttggctggtgcaccgactgctggttccgaccggcatttacgattttgtctggcacccagcactgtttaatacggcgctctattgctgccttttttatttgatatcgcgcttgttcgtttgaggttgatgtgaaaacactaacaagaaatatcctccgtactgccattaccgtgatactggtcattctggccttcgtggcgattttccgcgcctgggtttattacaccgcctcgccgtggacgcgtgatgcgcgctttagcgccgacattgtggcgattgcccccgacgtctccgggctgatttctcaggtaaacgtcaaggataaccaactggttaagaaagaccaggtattgttcgttattgaccaacctcgttaccaaaaagcgctggcgcaggcggaagctgatgtcgcctattatcagacgttagctcaggaaaaacgcgtcgaagccggtcggcgtaataagcttggcgtacaggcgatgtcgcgggaagagattgatcaggcgaacaacgtactgcaaaccgttgaacatcagctggcgaaagcggtggctagtcgcgacctggccaggctagatctggagcggacggtcattcgcgcccctgcggatggctgggtgactaaccttaacgtctacactggggaatttatcacccgtggctccacggcggtggcgctggtgaaagagaatacgttttacgtcatggcctatctggaagagaccaaactggagggcgtccgtccaggctatcgtgcggagattaccccgctgggcagcagcaaaaccattaaagggacggtggacagtatcgctgcgggggtgaccaacgccagcagcagcagcgactcgaaagggatggcctcggtcgactccaaccttgagtgggtgcgtctggcgcagcgtgtgccggtgcgtattcgcctcgatcaccagcaggggaatctgtggccatcgggcaccacggcgacggtagtgatcaccggtcaagaagatcgtgataccagccaggccaacttcttccagaaactggctatgcgcctgcgcgaatttggttaatcgctatggggacatataccattgctccccggcatctccgctttgccattaagcttgcatgcgcggtggtgctggcgctgtttgtcggtttccattttcagctcgaaacgccgcgctgggcggtactgacggcagcgatcgtcgccgccgggccggcctttgctgctggcggcgaaccgtactccggcgcgatccgctatcgcggtatgttgcgtattgccgggacctttattggctgtattgcggcgctggttatcatcatcctgatgatccgcgcgcctctgctgatgatgctggtctgctgtctgtgggccgggttttgtacctgggtttcgtcgctggtcaaggtcgaaaactcctatgcctgggggctggccgggtacaccgcgctgattatcattattaccatccataccaatccgatgctggcgccgcagtttgctgtcgaacgctgcagcgaaattgtcatcggtattgtcagcgccatcgtcgccgatctcctgttttcgccgcgttcgattaaaaaagagatcgacctcgagctcgataatctgctaattgcacagtataagctgatgcagttatgcgtcgcgcacggtgaaaaagaggaagtggatcaagcctggggagcgctggtacgccgcactacggcgctggaaggtatgcgtagtaacctgattatggaatcctcacgctgggcaaaggccaatcagcgcctgaaggcgatcaacaccctttcgctaacccttatcacccaggcttgcgaaacctatctgattcagaactcacgcccggaaatggtcacggacgactatcgcgagctgttcgccgagccggttgagacggtgcaggatgttcaccagcagctgaagcgcatgcgccgcttcctgacctggaaaggcgagcataataccccggtcacgatttatagctgggtgggcgccgccacgcgttacctgctgcttaagcgcggcgtggtggggaatactaaaatcagccgtatcgaggatggcgtgttgcgcggcgaaacggtggttaaagtggagtccgccgaacgtcatcacgcgatggtgaacttctggcgcacctctgtctcctgtattctcggaacgctattctggctgtggacgggctggacctcaggcagcggcgcgatggtaatgatcgccgtggttaccgcgctggcgatgcgcctgccaaacccgcgtatggtggcgatagacttcctctatggcaccctggcggcgttaccgttgggcaccttgtacttcctggtgatcatgccggcgacgcagcagagcatgctgttgctttgcatcagcctggcggcgatggcgttctttatcgggatcgaagtacaaaaaaggcgtctcggatcgctgggggcgctggcgagcaccatcaacattctggtgctggataacccgatgcagttccagttcagccagttcctcgatagcgcgctggggcagatcgtcggctgtttcctcgctctgatggttattctcattgtcagggataactcccgggccagaaccggtcgggtgctgctgaaccagtttgtctccgcggcggtctcttcgctgaccaccaactcggcgcgtcgcaaagagaatcatctgcccgcgctctatcagcagctgtttttattactcaataaattcccgggtgacgtcgcccgtttccgtctggcgttgacgttaatcatcgcccatcagcgcttgcgcgatgcgcccgtgccggtgaacgacgatctctccgccttccatcgtcagctgcgacgtaccgcggaccatgtgatctccgccggcagcgatgataagcgtcggcgctattttacccagttgctggcggagcttgatgtctatcaggagaagctgcgggtctgggaggcctcgccgcaggtcaccgagccggtacggcgactggttgagatgttgcataagtaccagcatgtgctgaccagcagctaacccataaaccgacgcccaggcgtcggtttttttatcgctatacttaacggcgacagaaagagaagcgggaggggctgtcatgaccacctatacgtttgattttgacgaaatcgccgaacaacaggatttctaccgggagttttcccgaaccttcgagctggctcaggataaggtcaacaacctggattcgctatgggacgcagtgaccggtggcctgctaccgctgccgctggatattgaattcatccatttaaatgacaagcagcgccggcgctttggcgcattgattttattgtttgatgaagcagaggaagagctggagggggagttgcgttttaatgcccgacaagcataaaaaagcccccggcaggcgggggcaagtcgtcgaaataagacgacgagggtttatttgtacagctcagcggtggcgtgccagctatcgccggtacgtgcttcaataatacggtagctgctggcgccttctttctcggctttagccgccagttcctgacgcatgtccattggcgcactacctacctgggatacggagatggtgcccatggattgcagattttgggcttgctctgcgttcacttgctggacagccgcgctggcaccgaaagagagaagggaagccaggccaagggatgcgatgatcattgcgcgtttcataatctttactccagtctttgttttgccgcggcggggcgatgtatgtcgccgggccgcggtagagaatttttgtcaggttaatcgttgacgtctaaaacttatttatacagctcagcagtggcatgccagtggtcgccagtgcgggcttcgataatgcggtaagaagaagccccttcttcctgcgcttttttgttcagcatttcatgcatatccatcggggaagatgctaccgcgccgacggaaaccgtgccgatggcctcgcggccctgggcctgctcgctgttgataatatcagcggcgaaagcgccaaacgacacgacggacaggatgctgatagcagctacagtggttttgattttcatgatgttcacctcgtcgaatctttttgttgggggtctttgtttcgtgaccctcatcacaaaaccaagtatacactaatcactaaaaatattaataccatgctaattgttttgtgcgttaatagttacaatagattgcgctttttataacggataagaattaaaaatgacacgttagcgacagcgataagatttatttctaataaattcataaaggtatacgaatttgatcttttgtgcgttttacgattttcgcgttagtaaaagaacgtatagacggcgtaaatgacactaagtgttaaatagttgttgtgccagaaggggggagaggcaaaagaaagaggagtcgccctctgacggtagccagaggggaattactcagagttcctgctcaaacagaaccagaatggcgtcgtgcagatctttcaccgtaaaaccgcgtgcaggcgtggtaaagatggtgtcatccccggcgatactgccaagaatgccttccgctttgcccagcgagtcgagaagacgggcgatcagctgcgcggcgccggggctggtatgaatcaccactacggcatcgttatagtcgatatccagcaccaaattcttcagcgggctggaggtggtcggtaccccaagctcggcaggcaagcaatagaccatttccattttggcgttacgggtacgcaccgcgccaaatttggtgagcatgcgggaaaccttcgattggttgatattctcgaagccctcttcctgcagcgcctggacgatctctccctgcgagctgaatttctcttctttaagcagcgccttaaacgctttaaccagttcttcttgttttgccgaacttcgcataagtcacccagattatggtggtaaaatcaacatcattatgcataaccatgaatttttatgcaaataatccgcgaaaggataggtcaataatgttatgaagggggcatattttagcaaaaaaaccgtataaggaacatgttctcatcacaacgcttaaagccatgtaaaagtaaatgaaatgttattgagttggtgttgttttgcgcaactggctgggtgtattgtaaccaatagtcgatccggttcttcgctttgctggatggtcagtcaggaagcataaagtgcgccgctgttctattgctacgcacaataatgcattcttcagccataatcattgtaattgttcatcttgtgaattaaggtccaggcgacggaataacgaaagactaaattaaccataataaggagtttaggatgaaagttgcagtccttggcgctgccggtggtatcggccaggcgcttgccctactacttaagacccaactgccttcaggttcagagctctcgttgtacgacatcgctccggttacgccgggcgtggcggtagatctaagtcatatccccacagatgtaaaaattaaaggattttccggtgaagacgctactccggcgctggaaggcgcggatgtagtgctgatctccgcgggcgtggcgcgtaagcccggcatggatcgttccgacctgtttaatgtgaatgcgggtatcgtgaagaacctcgtgcagcagattgccaaaacctgcccgcaggcctgcatcggcattatcaccaacccggtgaataccaccgtggctatcgccgccgaagtactgaaaaaagccggcgtgtacgataaaaacaaactgttcggcgttaccacgctggacatcatccgttccaatacctttgtggcggagctgaaaggtaaatcggcaaccgaggtggaagtcccggtcattggtggtcactccggggtcaccattctgcctttactgtcgcagatccccggcgtcagctttagcgatcaggaaattgccgacctgactaaacgtattcagaacgccggtaccgaagtcgtggaagcgaaagcgggcggcgggtcggcgaccttgtcgatgggccaggcggctgcccgttttggtctctctctggttcgcgccatgcagggggaaaaaggcgtggtggagtgcgcctacgtggaaggcgacggccactatgcgcgtttcttctcccagccgctgctgctggggaaaaacggcgtggaagagcgacagtctatcggcaaactcagcgcctttgaacagcaggcgctggagggcatgctggacaccctgaagaaagatatcgcgctcggcgaagacttcgtcaacaagtaatctcgccctaacagaagagccggaaccgctgttccggctttttattgtccagcattcatggaaaccgggtttctggtcagattcccggccggtccggtatttagcgattaacgtggctccccaaacggggagccgtttagttggtggccgggtattcctggacggcgatatggagcgtgattttcttatcatcacgcatgatgaccaccggaatttccgatcccgggcggatctcggccacctgatccatcgtctccagcgccgagacggcgggtttgtcattcacggagatgattacgtcgttggcgcggatcccggcttgcgccgctggaccgtccggagccacatcgttaacgacgatcccctgaatctgatcgatccctccgccctgcgcgtgcagcggggcgatctcccggccgctaatgccgatatagccgcggatcacccggccatcgcggatcagtttatccataattttggtcgctaactggaacgggatcgcaaagccaatgccttccggcgtttcgccgtcattgctcttgtcaaaggagagggtgttaatccccatcagctcgccgagggagttcaccagcgccccgccggagttaccgtggttgatcgaggcgtcagtctgcaggaagttctggcggccggtcggattgaggccaatgcgccctgtggcgctgataatcccctgggtgatggtctgccccaggttataagggttgccaatcgccagcaccacgtcgccgatgtgcggcgtgcgtttcggattgatcgggatcaccggcagcccgccggtagcattgattttgagcacggcgagatcggtgagggaatcggatcctaccagcagcgcttcgaagacgcggccgtcctgcagggcgacgataatctgatcggcatcgttgataacatgcttgttggtcaggatatagccgcgctgatccataatcacccctgagccaagcgtcagctgattatggctggtgctgttaagggcgcggttatagacgttcaccacggcgggcgccgcgcggcgcaccgcggcgttatagctcgccggggagtcgtctgccgtatcgttctgggtagtcggcgccaactgccactggcgcagcgagggcatcagggccagcagcagacccccgacaagcaaaccgatgagtactgaacgtaataactttccaggcatgatgcagatatcgttaatgaatggtcaggcgcagcatagcatgagttgtccggacatcgcacatggcggcgatgcccggagagacaatcagcgcagcagcagatagatgctttcgttgccgcggatcacgttcagggcgatgaccggcggtttgccttcgagcgctttgcgcagttcggcaattgagtgaatacgctgccggttaaggccaatgataatgtcatccttatgcagaccgacctgggcggcggcgctgcctttatccacattatcgatcaccactcctttggtgccatctttcatctggccgtcgctgaacgaggccccctgcagcgccgggataatcagttccgcgctggcggttgaggaggtgctcttatccagggtcacttcgacatcgaccggctttccatcgcgcagcaggcccagtttgaccttggtacccggctcggtggtggcgatccgcgaacgcagttcggcgaaactgttcagcggtttgccgttcagactcacgatgacgtccccggatttaatccccgctttggcggagccggagtttggcaggacttcactgacgaaggcgccgcgctgaacgttgagattcatcgctttggcgatgtcggcgctcatttccatgcctttaatgcccaacaggccgcgcttgatttcgccaaactgaataagctggtcggcgagggttttcgccatattgcttggaatggcaaagccgatgccgatgctgccgccgcccggcgcgaggatcgcggtgttgatcccgataagctcgccgttgaggttcagcagcgcgccgccggagttgccgcggttaatcgaggcgtcggtctgaatgaaattctccagcccttcaaggttcaagccgctgcggccaagggcagagataatgccggatgtggcggtctggccaaggccgaacgggttgccgacggcgacggcgaagtcgccgacgcgaagtttatcagagtcagcaatggcgatttgcgtcaggtggtctggcttaatcagctgcagcagagcgatatcgctctgttcatcgctcccgaccagtttggcatcgaactcacggccatcgttcagctggacgctgatcttctgcgcctgattgatgacgtggttattggtcagcacatagcctttcgccgcgtcgatgataacgccggagccgagcccttcaaacggctgcgcctgctcctgcggggcgttatcgccaaaatattttttcagctcttccggcatattgagcgtcggcgaggcagtgccttccacctgtacgctaaccaccgccggcagaaccttttccagcatcggcgccaggcttggtaacgcgccctggccgggcacctgagtcggtaaggatgccgctgccggaggcaggaccgacaacgataacccaatgcttaacgctaacgcactcaacagcaaagtctgtttcttcattagatgctggctctcgtaacctgaggtgtatggaaaaatgtcctgaataacctgatgttattgaatttttgcacaggtaacaacgtggggactggtttaaattgtagccgggaagtgggggaaggagcgggcgcgacgggcgcgcccggagaatattttaatcgcagcgaggcttaatcgcgttttgcgcctccgcgcagtaaaccggatgcgccctcggagtagtcgcgcggcatctggaccggcgcctgatcgttactggcttcagactcttccagacggttgcggaacgggttggcgtctgccatcgagtccggcagcaggttgttagagcttttcgccatatgctgatatagctgacgatagtcgtgcgccatgttatccagcagttcggcgctacgcgcaaagtggctcaccagctcttcacggtactcttcaagctcggctttattcttttccagttcgtactgcagcgcctgctgttggcgcagtttgcggttgccgaaacgcatggcgacggcaccaatgatgataccgacgactaacccaattagcgcgtattcccaggtcatgaacatctcccgttgtattgtggttccgtagggtggctcttaggctctccgcctgcgcccgatagtgccactataaccgctaattccacagaagtggaatcctggcgtatcatcgcgtagtgtagaacggcctttttttcgtcaatcgtgagcttcggcattacggttttcaaggaataacaattagatcatgcaaagcctgtctccaacatcgcgttaccttttagccctgaaagagggcagccatcaacccgacgacgtccagcaagaagcggtgagccgccttgataccatttaccaggaactgcagacgcagcccgcgccggtcgcgtcaggcggcggtttgcgcgcgaaattcggcaaactgctgggtaagcgcgagccggctgccgggacggcacctgtccgcggcctgtatatgtggggcggcgtggggcgaggcaaaacctggctgatggacctgttttaccagagcctgccgggcgagcgtaaacagcgcctgcatttccatcgtttcatgctgcgcgtacacgaagagctgaccaccctgcagggacatagcgacccgctggagatcgtcgccgaccgctttaaagcggaaaccgacgtgctctgtttcgacgagttttttgtctccgatattaccgacgccatgctgttgggcgggctgatgaaagccctgttcgcccgcggcatcaccctggtggcgacctccaatattccgccggatgaactctatcgtaatggcctgcagcgggcccgttttctgccggcgatcgatgccatcaagcagcattgcgatattatgaacgtcgatgccggcatcgattatcgactgcgtaccctgacgcaggcgcacctgtggctgtcgccgctgaataacgacacccgcgaacagatggataaattgtggctcgcgctggcgggcgcgccgcgcgctgccgggccgacgctggagattaaccatcgcgagctgcctaccctcggcgtagaaaaccagacgctggcggcgtcattcgccacgctatgcgtggatgcgcgcagccagcatgactatatcgcgctctcccgactgttccatacggtgatgctgttcgacgtgccggtgatgaccgcgcagctggagagcgaggcccgccgctttatcgctctggtggatgagttctacgagcgccatgtaaagctggtggtcagcgcggcagtaccgctgtacgacatttaccagggcgagcggctgaagtttgagttccagcgctgtctctcgcgtctgcaggagatgcagagcgaagagtacctcaaacgtccgcatatgccctgacaggtgactttttcaggcggattcagggccgtaaggccgccccgggcgcggcctgaaaaatctcataaaggggtcgatctttgaccccgacttctctataatcttgcgaccccacgttacgagaaggtttttttcccgaaactttctatgcgccggcataggctattcgaaggggtaggtttgctggacaatgtcgtgtgaacctcaactgactaaacgtttgggtgttcaccaacgtgtaacttattatttgggtaagcttttaatgaaaacttttacagctaaaccagaaaccgtaaaacgcgactggtatgttgttgacgcgaccggtaaaactctgggccgtctggctactgaactggctcgtcgcctgcgcggtaagcacaaagcggaatacactccgcacgttgataccggtgattacatcatcgttctgaacgcagaaaaagttgctgttaccggcaacaagcgcgaagacaaaatgtactaccaccacaccggccacatcggtggtatcaaagaagcgacctttgaagagatgattgcccgccgtcctgagcgtgtgattgaaatcgcggttaaaggcatgctgccaaaaggcccgctgggtcgtgctatgtaccgtaaactgaaagtttacgcgggtaacgagcacaaccacgcggcacagcaaccgcaagttcttgacatctaatcgggattataggcaatggctgaaaatcaatactacggcactggtcgccgcaaaagttccgcagctcgcgttttcatcaaaccgggcaacggtaaaatcgttatcaaccagcgttctctggaacagtacttcggtcgtgaaactgcccgcatggtagttcgtcagccgctggaactggtcgacatggttgagaaactggatctgtacatcactgttaaaggtggtggtatctctggtcaggctggtgcgatccgtcacggtatcacccgcgctctgatggagtacgacgagtccctgcgttccgaactgcgtaaagctggcttcgttactcgtgacgctcgtcaggttgaacgtaagaaagtcggtctgcgtaaagcacgtcgtcgtccgcagttctccaaacgttaattgttttctgctcacgcagaacaatttgcgaaaaaacccgcttcggcgggtttttttatggataaaacggctgttatccacaagcatagcgccggttctcgccactttttcagcatttccagaatcccctcaccacaacgtcttcaaaatctggtaaactatcatccaattttctgcccaaatgctggtgattgttcattttttgttttattcgtgaacgaaggtgacatcgcgctaatggggtttttacatctggctggtcatgagtggccggcagcagtacaaaattctgaatatacctggaggttttcatggctgtcgctgccaacaaacgttcggtaatgacgctgttttctggtcctactgacatctatagccatcaggtccgcattgtgctggccgagaagggtgtcagttttgagatagagcacgtggagaaggataacccgcctcaggatctgattgacctcaacccgaatcaaagcgtaccgacgctggtggatcgtgagctcactctgtgggaatcccgcatcattatggagtatctggatgagcgtttcccgcacccgccgttaatgccggtttatccggtggcgcgtggtgaaagccgcctgtatatgcaacgtatcgagaaggactggtattcgctgatgaacaccatccagagcggtaccgcagcgcaagctgatgctgcgcgtaagcagctgcgtgaagaattgctggccatcgcgccggtcttcacccagaaaccttacttcctgagcgatgagttcagcctggtggactgctacctggcgccgctgctgtggcgtctgccggttcttggtgtggagctggttggcgctggtgcgaaagagctcaaaggctatatgactcgcgtatttgagcgtgattccttcctcgcttctttaactgaagccgagcgtgaaatgcgcctcggtcggggctaaataatggatgtatcacagctgacgccgcgtcgcccgtatctgttacgggcgttttatgactggctgctggataaccagctgacgccgcacctggtggtggatgtgacgctgccgggcgtgctcgtgccgatggagtacgcgcgcgatgggcaaatcgttctcaatattgccccgcgtgcggtaggcaatctcgagctggcgaacgacgaagtgcgcttcaacgcgcgctttggcggggtaccacgcaacgtgtctgtcccgctggctgcggtactcgccatctacgcccgtgagaacggcgctggtacgatgttcgaaccggaagcggcctatgacgaagacgtcagcagcctcaacgatgatgacgtcgcgccggagagtgaaagcgaaacggtgatgtcggtgatcgatggcgataagccggataatcacgacgacgatcctgacgacacgccgccgccgcgcggtggtcgcccggcgctgcgcgtggtgaagtgaatcccttctctgacaggccctgcggggcctgtttttttgtctgtccgctttgttaactctgccacaaacgaggcgtcccatggctggtatcgtcatcgccacaggtagtttttagggagcagacatgtctttactcgcacaactggaccagcgtatccgtcatcatggcggattaattgtctcctgccagccggtgccgggcagtccgctggataatcccgctatcgtcgcggcaatggcgctggcggctgagcaggcgggagcggtagcgctgcgcatcgaaggccaggccaacctgcaggccgttcgtccgttagtgacggtgcccgttattgggttgatcaaacgcgatttgcctgatagcccggtgcgtattacgccgtggctggaagatatcgacgcgctggcgcagggcggagcggatattattgctattgacggcacccagcgtcagcgtccggcgtcagtgtcggcgctattagcagaaattcatcggctgggaaaagtggcgatggccgattgctcatctctcgacgatgctctcgagtgctggcagttgggggctgagattgtcgggacgactctctccggctataccgcagaagagacgccggatgagccggatctggcgctggtgcaatgcctgagcgtggcgggctgcagagtgattgccgaagggcgctataacacgcctgcccaggcggcggaggcgatgcgctgcggcgcgtgggcggtgaccgtcggctcggcgattacccgcctggagcatatctgcggctggtataatacggcgctgaaagcggcggtttacccggcgaatgagcaataaaaaagcccgatgacgttaaccatcgggcttttatgcgtgaggctccggacctaatcagacttcaaggtagttgaggatcccgtccgccgctttacggccttcggcaatcgcggtgaccaccagatcggaaccgcgaacgatatcgccaccggcgaagattttcgggttgctggtctggaaggcgttttcgctgccttccggggcgataatacggccctgggagtccagctcgacgctgtgcttcgccagccactccatgctgtgcggacggaagccaaacgccatgactacggcgtcagccggcaccacgtgctcagagccggggacgagctccgcgcggcggcggcccttcgcatccggctggcccatttcggtgcgcgccatcttcacgccgcaaaccttaccgttggcatttacttccacgcccagcggctggacgttaaactggaactcaacgccttcttcgcgcgcgtttttcacttcgcgttttgagccgggcatgttctcttcgtcacggcgataggcgcagatcacgtgcgccgcattctgacggacggaggtgcgtacgcagtccatcgcggtgtcgccaccgccgagcaccaccacgcgtttgccttccatgctgacatagggctcatcggcggtttcaccaaagcccatgatctgcttagtgttagcgataaggaacggcagcgcgtcgtaaacacccggggcgtcttcgttgtccagtccaccgcgcatcgactgataggtcccgacgccgaggaacaccgcatcgtactccttcagcaggtcgtcgagctgcacgtcgcggcccacttcggtattgagtttgaactcaatgcccatgccggtgaagatctcccggcggcgggtcatcacctctttttccagcttgaacgctgggataccgaaggtcagcaggccgccgatttccggatggcggtcaaataccaccgccttgacgccgttacgggtcagcacgtcggcgcaggcgaggcccgccgggccagcgccgatgatcgcgacggttttaccggtcggcttcacgtcggagagatccggacgccagcccatctcgaatgccttatcgttgatatagcgttcgatgttgccgatggtcaccgcgccgaactcatcgttcagcgtacaggagccttcacacaggcggtcctgcgggcagacgcgcccgcagacttccggcagagtgttggtttgatgcgacagctcggccgcttcaaaaatacgcccctcgttggccagcttcagccagttcgggatgtagttatgcaccgggcacttccattcgcagtacgggttgccacaggagaggcagcgatccgcctgcgccttggcctggccttctgaaaacggctcgtaaatttccacaaactcaattttacggatcttcagcggtttctttggcggatcaacgcgctgcaggtcgataaattgataaacgttctgactcatcttaaccccttactgcgcctgcacccgcagctcagctgcggaacgactacggtgacccaacagtgctttaacatcgctggactttggtttaaccagcgcaaacttcgcggagaaggccggccagttggcgaggatctcttcgccgcgttgcgaaccggtaagctgtacgtgctcggtgattaaaccgcgcaggtgctcttcatggatggccagagaatcaacgtccagcacttccaccagctccgggttcacgcgtttgcggaagtcgccatcttcatccaggacataggcaaagccgccggtcatccctgcgccaaagttgacgccggtttttccgagcacgcagacgatgccgccggtcatatattcgcagccgttgtcgccgatgccttccaccacggtgatggcgccggagttacgcacggcgaaacgctcgcccgcgcggcctgcggcgtacagacgaccaccggtcgcgccgtacaggcaggtgttgccgataatactggcttcatggctgcggaacgcagagcccaccggcggacgaatggccagcagaccgcccgccatgcctttcccgacgtagtcgttggcgtcgccagtcagatgcagttccacgccgccggcgttccacacgccgaagctctggcccgcggtgccgctaaagtgagcgacgatcgggtcgcccgccagtccctggtcgccatgggtctgggcgatatacccggacagcgaggcccccacggagcggtcggtgttacggatatcaaaccagaacgtcttgctctgcttttcatccacgtacggtttcgcctgctgcagcagctgggcgttgagcacgccgttatcgaacggtgggttgttctcggtgcagtacagcgctttgcccggatgcggctctgcggtctccagcagtttacccagatccagtttctgctgcttggcggtgaacccatccagctctttgagcagatcggtgcggccaatcagatccaccagacgcttgacgcccagctgggccatcagctcgcgggtctcacgggcgataaattcaaagtagttggtcactttgaacggcagaccgtgatagtgattcttacgcagtttgtcatcctgggtcgccacgccggtagcgcagttgttcaggtggcaaatacgcaggtatttacagcccagcgcgaccatcgggccggtaccgaaaccgaagctctccgcgccgaggatcgccgctttgatgatatcgagaccggttttcaggccgccatccacctgcagacggatcttatgacgtagaccgttagcgaccagcgcctgctgggtttccaccaggccgagctcccacggacagccggcatatttcaccgaagagagcgggctcgccccggtgccgccgtcgtagccggcgatggtgatcaggtcggcataggctttggccacgccggtggcgatggtgccaacgcccggctcagaaaccagtttgaccgaaatcatcgctttcggattgacctgcttgaggtcgaaaatcagctgcgccagatcctcgatagaatagatatcgtggtgcggcggcggggaaatcagcgtgacgcccggtaccgaatagcgcagtttggcgatgtacggggtgactttatcacccggcagctggccaccttcacccggtttcgccccctgggcgactttgatctggatgacgtcggcattgaccaggtaggctggcgtgacgccgaagcggccggacgcgacctgcttgatgcgcgacactttattagtgccgtagcgcgccgggtcttcaccgccttcaccggagttggagaagccgccgatgctgttcatcgcttccgccagcgactcgtgcgcttccgggctcagggcgccgatcgacatcgccgcggtatcgaagcgtttaaacagctccttcgccggctctacttcgtcgatgctgatggcgtcttcgcctgggttgagcgccagcaggtcgcgcagcgtggccgctggacgttcgttaaccagtttcgcgtattgttgataatcgctgtattcgccgctctgcacggcctgctgcagggtgcgcaccacgtccgggttgtaggcatgatattcgccgccgtgcacatatttcagcaaaccgccctgggccagtggcttacgcgccagccaggcgcgtttcgacagattcagcagatcctgctggaagtcgtcgaagctggcgccgccgatgcggctgaccacgccctggaagcagagctcggagacatcgcgatgcagaccgaccgcttcgaacagcttcgagcagcggtaggaggcgatggtcgagatccccatcttggacatgatcttatacagacctttattgataccgttgcgatagttcagcatcaccgcacggtacggtttatcgatggctttgctgtcgaccagcttcgccagcgtttcgtaggcgaggtatggatagatagccgtcgccccaaagccgagcagcacggcgaagtggtgcggatcgcgggcgctggcggtttcaacgatgatgttggcatcgcagcgcaggcttttatcgaccagacgggtctggatcgcgccaacggccatcggcgccggtaccggcagacggtctttggcgatgttgcggtcagagagcaccagcagcacggtgccgtcgcgcaccatttgctccgctttatcgcacagcgctttcaccgtctcgctgagggaggcctctgccgggttgaacgtgatatcgaggacgtcggcgcgatagtgctcttcttccatcgtcgtcagctgtttaaaatcggagtacagcaggatcggcgatttgaagctcagacgatgcgcctggccttccgcttcgcagaagacgttcatttcgcgaccgatgctggtagccagcgacatgacgtgcgcttcgcgcagcgggtcgatcggcgggttagtcacctgggcgaactgctgacggaagtaatcgtagataatgcgcggctggctggagagcacggcgaaaggcgtgtcatcgcccatcgaaccgactgcttcctggccattttcgccgagcacgcgcaggacggagtccagctcttccgcgctgtagttaaactgtttctggtagctggcgagcgtgtcgtcatccagctggcggctgccaacctcttcgtccggcagatcttcgaacggcaccaggcgacgaacgtttttctccatccactctttatacggatggcggctcttcagatcgtcatcggtttccgctgagtgcagaatgcgtccggcacgggtatcgataaccatcagctcgcccgggcccacgcggcctttctcgaccacttcgtcaggctggtaatcccagatgccgacttcggaggcgcaggtgatgagcttatctttggtaatgacgtagcgcgccgggcgcagaccgttacggtcgaggttacaggccgcgtagcggccatctgacatgacgatgcccgccgggccgtcccacggctccatatgcatggagttaaagtcgaagaacgaacgcagctccggatccatatccgggttgttctgccaggctggcggcaccagcagacgcatggcgcgcacgatgtccatcccgccggccagcagcagctccagcatgttgtccatagaactggagtcggagccggtttcgttaacgaacggcgcggcgtcgtgcaggtcagggatcagcggggtctggaacttataggtacgggcgcgggcccactggcggttgccggtaatggtgttaatttcaccgttgtgcgccaggtagcggaacggctgcgccaacggccagcgtggtacggtgttggtggagaagcgctggtggaacaggcagatagccgactccaggcgcaggtccgcgaggtccaggtagaagcgcggcaaatccgccggcatacacagacctttatagatgttgaccagattggacaagctacaaacgtagaaatccttgtcttcctgcaggcgtttttcaatgcgacgacgcgcaataaacagacggcgctccatatcgcgcgggcgccagccagccggggcgttgacaaagatttgctcaatacggggcagcgaggagagggcgatttcaccgagcacgccttcgttggtcggcacatcgcgccagccgacaatcgacagggtctcaagctgaagttcttcttcaacgatgcggcgcgccgctttagccagctcaggatctttattcaggaacagcatcccaacggcgtagtttttggctaaacgccagccgcgctcttcggcaacgatgcggaagaaacgatcgggtttttgcagcagcagaccgcaaccgtcgccggttttaccatcggcaaggattgcgccacggtgctgcatgcgggccagtgcgtgtattgcggttcgcactaccttgtggctaggttcgccttctatgtgggcgatcaggccgaaaccacagttatccctctcaagggatttgtcgtacaacatatcagtgaacctccccaggctctacggacaccctccgataccgattgcgcacaggcacagaaagagcatggcgacggggtttacacctcgcattcgccctctttaaatccttttcgcatcggtacacaagtttgaggacttgctgttaagagggaatctcaattactgcataaatatgatgagcagagtgctcatccagaaagcttccagcggattcccaacttatcgggaatccacacttacgtcaaatggcaatcttattaatacaaaaatgtgctatacacaagttaactaattgttattaaagaaaataatggcaatttttatgctttgaatacgcctgctggtggtgcggctagtgtgatctgtctcactgtgcacgcggctttgcattaccaatatgcgctgaaatacatttcattattagcatatttgactgcaatatttttaactactggacattaataccgttttttaccagaaagcagattagggcaatgcgaagataaaatataaggaaaactcatcacctggtggttgaatgaaattgcagtaatcttgattgtttatgcaatagggttgatcgccgcgctgacgattgatccaggtcatcgccgtcggtgacgaaaagtggcaggcttggccccctttgttgagggcggtctatcagattatgcagttacagaaattagtcaatatgtttggtggggatcttatgcgtcgctatggcgaaaaggtccataagctaacgctgcacggcggttttagctgcccaaaccgcgacggcacgctgggccgcggcggttgcactttctgtaacgtggcatcgtttgccgatgaggcgcagcagcatcgctctatcgccgaacagctcgctcatcaggcgcagctcgtcaaccgggcgaagcgctatctggcctattttcaggcctacaccagcaccttcgctgaagtgcaggtgctccgttcaatgtatcgtcaggccgtcagtgccgcaaatatcgttggcctgtgcgtcggcacccgcccggactgcgttccgcaggcggtccttgacctgctgagtgaataccatcagcaagggtatgaggtatggctggagctggggctgcaaactgctcatgataagaccctgcatcgcattaaccgtggacacgatttcgcctgttatcagcgtaccgcgcgcctggcgcgagagcgggggctgaaagtctgtgcgcatctgatcgtcggtctgcccggagagagccaggggcattgtctgcagacgctggagcaggtagtggcgaccggcgtggatgggatcaaattgcatccactgcatattgtgaaaggcagcattatggccaaagcgtggcaggccgggcgtctcgatggcattgagctggaggcgtataccgtcaccgctggagagatgatccgccatacgccgccggaggtgatctaccaccgtatttccgccagcgcccgtcggcccacgctgttggcgccgctgtggtgtgaaaatcgctggaccggcatggttgaactggatcgttatctgaatcagcagggcgctcagggctcggcgctgggccgtagctgggttgttccccaggctgagtgagaagtacgagcgtgatgtccggaacaatgccggacatcgcgctcctgccatttatgcctggctggctttcatcgtcacacgcggagttttgatcacgaacagcaccagcagggcgccaagcgcggcgatagtgccggcgagtacgaaagcgctgtcaaatttaccagtagactgcacgatatagccggtaacaatcggccccacgatgccggagacgctgccgataagatggataaagccgctggcgccgccaacgcgggatttatgcaccacgtcctggataatcgcccagtagatcgccccggttacatagaggaaaaagatggagaccgacatcagcagaacggcaggcacgacgctgctgacggtacccgccagtcccacgcagatagcggccatcagcaggcataccaccagcacaattttgcgcgacagcagcaggcgcccggtgagtttaaaaattttatcggaaatatagcccccaagcgccagaccgacaaagccgactatccatgggatcatagtggtaaggctcatctgtttaatatccagatggtgctgttgtaccagataggacgggaaccagctgagaaagaaaaacagaatatagttgtagcagaagaaggcaaaggccgttaccagaataattggctgtttcaaataataacccagcgagtgagctgtttgattttctattgtttccagcgcgacttcttcttctttcattttattaatcagcttaagttcttcctggctgacttttttatgcttttcgggcgaattagcggcaatgaaaaaccacgctatcatccatacaataccgatagcgaaaataatcataaaagccgggcgccagccgaatgccagggccaggtaaccgacgatggggccggcgaccgcgccgcccagcggagagcctgcgctgagaaagccgacggcggtagccgcttgctttttaggaaaccagccgttgatcatcttgttcgccgatgcgcagatcgggccttccgccatcccgaaaagcacccgcagcaccagcatggaataaaagccggtggctaccgcggttaagccgcaaaacagcgaccacagaccgaccgccaggcccattaccagcgttgcgccaaacttatccacggccaaaccgccaataaaattaaataccgcgtagccgaagaaaaagctgccgaaaataatgccgaattgttcagcgttaagtgcaaggtccttttcaatcatcgggaccgtaatggataatgccacccggtcaagataatttatcatatatactaaaaataataacaggacgataatccagcggatattttttcccatgataacaccatgctcattatattatttatatcaggcgcggcggatacgcagatatccgtcggccgttattctatacgatgccggtttaacccaactgcagcagcactttgcagcaggtcttacggtcgttagcaaaaatctccatggcctctttcacctgctccagcggcatacaatgggtgattaacgcctccggacgaataaggcctttctccatccagtcgatgaccagcggaaaacgcccgctgttcagccgggaggagaaaatagaaatttctttactggtgatgctttgctgagtgagggttgaggcctcgccggagaaaccgagtataccgatgcgggcggcgggggaggcgaggagaatggcttcctgcaggatcgccgggtggcaggcggcatcaatgaccagcgtgggggcaagctgccgctgcgccagctgttccgtgagcggctggtcagtgttatcgagcgtcagatcggcgccgttttcccgggccatctgcagacgttcggcaatgcgatccacgacgatcacctgcttaacgccatataccccctttagcgcctgaatgattgtcagccccatcgggccagcgccgtaaaccagggcaatatcttgcgccgtgggctgcagctgggcggtaatatttgccgcgatggtaaaaggctcaaccatcgttgcctgacggtcgctgatagcctcggggatgcgccaggcatttttcgccggcacgcaggcatagtcgctaaatcccccgtcgcggtgaactcctatgacctggagctgcgtacagacattcggccttcctaccgagcaaggataacaatggccgcagctgacaacggggtccaccgcgacacgctcgccgatgcgtgccggagatacctgctcgccgacggcgtcgatgatgccatagaattcatggccgatgacgcggggatatttcgcgaaagggttgtggccgtgatagatgtgtacatcggaaccacagatcccagcaaaagcaattttcacccgtacttcatgggcgcccggaactggaaccgaacgtgattcaatgttcagttggcctggctctttgacgacgacgcttctcattttgattccttccattgtcttttttctgaacaaattacgctacttttattaccatacaagtatgcaaaagatcataatcaggcctggatcacatttgagaaagctcggcagaaaaagccatagcatgattaatctattgaaataaattgaaaaaaattatgaatgcgccgacgcattcgccgctggcgagccggtcggcaggaatgtgatcgctatcacgacagccaacgctcaatcatctatgattactggtatggtagtagggtaaattaaactaagttgagcaggtgaagacaatgcagatgacaatgcgctggtttggaccagaggaagacaaggtttcattagaacatattcgccaggtgcctggcgttgagggggtggtcggcgcgctctacgacgtcgcggtgggcgaagtatggccggtggataaaattgagcgtctggtcggtcaggcccatgccgcaggcctgaaaatggaggtgatagagagcgtcaacatccatgacgacatcaaaatcggcctacctacccgtgaccgctatattgccaactaccagcagaccatccgcaaccttgcccgctttggcgttaaagtcatctgctataacttcatgccggttttcgactggatgaagacggatatgaactacgtcctgccggatggctcgctgacgatggcgtttgagaagaaagatatcgataagcggctggaggacgtggtgaaggaggtgcttgagaattcaaacggcttcgccttgccgggctgggagccggaacggctggcggaggtgcagaccctgtttgccaaatatagcgcggtggatgatcagaagctgcgggagaacctggtttattttctgcaggcggtgatcccggtttgcgaagaggttggggtgaaaatggcgatccacccggacgacccgccgtactccatttttggcctgccgcgggtggtcaaaaaccgcgacgatctggactggatctgccgggctgtcgattcacccgccaacggcattacgctctgcaccggctcgattgccgaagatcctgataatgacgtgtacgccatcctggccgaatttacgcggcgtaagcgaattcattttgcccacgtccgcaatataaagctgatgcaggataaagacttttacgagtgcgcccatccgtcagagtacggctccctggatatgtacaaagtgatgcaagcgctgtatgacaacggattcgacggctatattcgcccggatcatggtcgctttatctggggagagaccggacggccgggctatggcttgttcgaccgcgccctcggcgtgacctacctgaaaggactctgggaggcgttaagcaagcgttaatccctctcctgatccccctcttttgcggctggttcgcctcagcggccggccgccgtatcgactcctgcccgcattttttgcacaacttacagcgcattgctcagaattgagtattattgtgcggagttgtcgtgaaggaatcccctatgaagcaaattcgtatgctggcgcagtattatgtcgacctgatgatgaagctgggtctggtccgcttttcgatgctgttggctcttgcgctggtggtgctggccatcgtggtacagatggcggttaccatggtgctgcatggccaggttgaaagtatcgacgttatccgctctatcttctttggcctgctgatcacgccttgggcggtctactttctctcggtggtggtggagcagctcgaagagtcccgtcagcgtctttcgcggctggtggacaagctggaggagatgcgtgagcgcgatctaaagctgaacgtccaactgaaagataacatcgcgcagttgaatcaggagattggcgaacgtgaaaaagcggaagccgagcgcgagaccaccctcgagcagttgaagattgagatgaaagagcgcgaagagacgcagatccagctcgaacagcaatcctcctttctgcgctctttccttgatgcttccccggacctggtcttctatcgcaatgaggataaggagttttcaggctgtaaccgggcgatggagctgctgaccggcaaaagcgaaaaacagctgatccacctcaaaccgcaggacgtctatagcgaagaggcggcggaaaaggtactggagaccgacgagaaggtgttccgccataatgtatcgctgacctatgagcagtggctggactatcccgatggccgcaaagcgtgctttgaaatccgcaaggtcccctactacgatcgcgtcggtaagcgtcgcggcctgatgggtttcggccgcgatatcaccgaacgtaaacgctatcaggacgctcttgagcgcgccagccgggataaaaccacctttatttccaccatcagtcatgagctgcgtaccccgctaaacgggatcgtcgggctgagccgaattttgctggataccgaactgaccagcgagcaggaaaaatacctgaaaactatccatgtctcggcggtgacgctggggaatatcttcaatgatattatcgacatggacaaaatggagcgccgcaaggtgcagctcgataaccagccggtggacttcaccagcttccttgccgaccttgaaaacctatccggcctgcaggcacagcagaaggggctgcgctttgtgctggagccgagcctgccgctgccgcataaggtaatcacggatgggacccgcctgcggcagatcctgtggaatcttatcagcaacgccgtgaagtttaccccgcagggcggaggggtgaacgtccgcgtgcgctatgacgaaggcgatatcctgcacttcgaagtggaagactccggaattggtattcctgaagcggaacaggacaaaattttcgccatgtattaccaggtcaaagacagccacggcggcaaaccggccaccggaaccgggattggtctcgccgtctcgcgtcgcctggcgcgtaatatgggcggtgatatcagcgttaccagccagccgggtaaaggggcgacctttacgcttaccgtccatgcgccagccattgcggaagaagtggaagatacgctggcggaagacgacatgccattaccggcgctcaacgtgctgctggttgaggacattgagctcaacgttattgtggcccgttcagtgctggaaaaactgggtaacagcgttgatgtggcgatgaccgggaaagccgcgctggagatgtttgagccaggcgaatatgaccttgtgctgttggatattcagttaccggacatgaccggactggatatttcccgggaactgaaacagcgctttgccgctgacgagctaccgccgctggtcgccctgaccgccaacgtgctgaagaataagaaagagtatctcgacgccggaatggacgatgtgttgagtaagccgctatcggtgccagcgctgacggccatgatcaagaaattctgggatgcaccggatgaggaagcgcaggaagcgccggcggccgatctgcataaagccgacgcggtgctggataccgatatgctggagcaatatatcgagctggtgggaccgaagcttatcaacgatggtctcgcggtgtttgagaagatgatgccgggctacatgtccgttctggagtctaatctgaccgcccgcgaccaaaaagggattgtcgaagaggggcataagatcaaaggggcggccggttctatcggactgcgccacatccagcagctgggccagcagatccagactccggatctgcctgcctggtctgataatgtcgctgaatgggttgaagagatgaaatccgagtggcaaaacgatgtagcggtactgaaggcgtgggtggcgaaagccagcaaaaaatgaccccggacagaccggggtgcgcgaatactgcgccaacaccagggaactggtggttgagccagtgttgtttgagtgatgttgttacgtggcgcaaccgaagaagtggattgctcgctcattaagatagcaaagcttaactaatttgttacatgaatcagtaaaatatgtgaagcatagcgagttaatcgacatttttgactggtttcagcgagttgcatggaggagcgaaagcgatgaaaaaaattggtgtggtactgggcggctgcggcgtgtacgacggcagtgaaatccatgaggcggtgattaccctgctggcgatcgcgcgcaacggcgcgcaggcagtgtgctttgcgcccgataaaccgcagcgcgatgtcatcaaccatctaaccggggaggcgatgccagagcagcgcaatgtgctggtggaagcagcgcgtatcgcccgcggcgacatcctgccgctggcgcaggcgcgtgcggagacgctggacgcgctgatcgtccctggcggcttcggcgcggcgaaaaatctaagcagcttcgccgccgagggcagcgaatgccaggtggatcccgatctgcgggccctggcgctggcgatgcatcagaccggcaagccgctgggctttatgtgcattgccccggcgatgctgccgaagatctttgcgtttccgctgcggatgaccattgggaccgatcttgataccgccgatgtggtggaagagatgggggcagagcacgtgccttgcccggtcgacgacatcgtggtggatgaagacaacaaagtggtcaccactccggcgtatatgctggcggaggacattgcgcaagccgccaccggaattgagaagctggtggcccgcgtgctggcgctgagcgcatgaggctccgcgttgcgccccttgcgctattaaaacgtctggcattgcgtctgctgctgatcgccgccgttttctggggcggggggatcgcgctgtttagcgtgctgccggtgccgttttcggcggtgatgcttgagcggcaggtgagcgcctggctgtccggcgatttccattatctggcgcattccgactgggttgccatggataagatctctccatggatggggctggcggtgattgccgccgaagatcagaagttcccgaaacactgggggttcgacgtgtcggcgattgagaaagcgctggcgcacaatgaacgtcacgagacccgcatccgcggcgcgtcaacgctgtcgcagcagacggcgaaaaacctgtttttatgggatggccgcagctggctgcgtaaggggctggaagccgggctgacagtcgggatcgaaaccgtgtggagtaaaaagcggatcctgaccgtctacctgaatattgccgagttcggcgatgggatatttggtgtggaagcggccgcccagcgctattttcataaacccgccagtcagctgacgccgggggaagcggctctgctggccgcggtgctgccgaacccgatccgctatcgcgccgatgcgccgtcaggctatgtgcgcagtcgtcaggcctggatcttacgccagatgcgacagctgggcggggaagggttcatgcgcgagcataagctctattagcgggttactccggcgccggggctggtacagtcgccagtcgtccctcgccgggaagcgtcacgtttagtcttcgtcaaagccagcgttaaacagggcaatcaccgcggcgagggcttcaacttcctgcggaccgctggcctccacctctatctgtcgccctttcgccgagtccagcatcagcagggcaatcacgctgttggcttccgcctccgtgccttcatcgttgcgcagcagtacttcggcatcgaaattctgcatcagttcgaacagcttcatcgccgggcgggcgtgcatgcccagcttattggtgatttcaacggtctgctttacggtcatgatttacgtttttccagcgtccgatgacgagactgcacgttcttgccgcgcgagcggaagtagtcagccagttgttcagcaatataaaccgaacgatgtttaccgccggtacagccaatggccaccgtcagatagctgcgattgttggtctccagcatcggtaaccatagctcaagatagcttcgggtctgataaataaagttgtgcacttcagtgtgccgatcgaggaaggcggccactggtttatccagaccggtcattggacgcagtttcggatcccagtgcgggttgggcagaaagcgcacgtcaaagacgtaatcggcatcgatcggaataccgtgcttgaagccgaaggattcgaagaccatcgtcagttcacgctcgcgtttacccagcagtcgggtacgcagcatttccgccagctcatgcaccgacatttccgacgtatcgacgatcagatcggcgcgggagcgcaggggctccagcagatcgctctcttcgtcgatggcgctttccagcgacagattcttgctggagagcgggtgcaggcgacgggtatcgctgtaccggcggatcagggtattgcggtcggcatcaaggaacagcagctgcggagaaaaacattccggcagattctgcatcgcctgctcgaagatctccggggattccggcatgttacgcacgtcgatgctgacggccgcggagatattgcggtcagccagcgaccgcgccaggtcgggcagcagcacgaccggcaggttatccacgcagtaaaagcccatatcttccagcgctcgcagagcgacggatttccccgagcccgagcggccgctgacgatcatcagtaccatgtaccgtttctcctcagtacgataaaggataaggtgcgactgccgttatgcgtcatcgctgcttcctgcttcggtgatgatctcatacaactcttcatcgctctgcgccgctcgcaggcgacgacaaatcgctttgtccgccagccgtttggccaccagggagagcgtatgcaggtgagtttttgtctggtcggccggcaccagcagcgcgaacagcaggtcgacaggttgattgtcgatcgcgtcgaaggcgatgggggtttccagctggacaaaaacgccgacagcacgcagcgtatcctcttccagttttccgtggggaatggcgataccattgccgatcccggtactgcccattttttcgcgggtgaggatcgcttcgaacaccacctgcggcggcaaacttaactgtttggcggccagttcgctgatgatttccagagcacgcttcttgctctggcagtgcacctggctacgggtacattcctggttcaggacgttgctcagttgtagagccgaatcgttgttcatcataatttcacctgagcgcccccgcgcccgtcgccgatgatatccagcggcgggcgcaagggggcccggacaattagtgttgttttagtttatctttgtgcttcgttaactgtcttgccagcttgtcgataagaccatcgacagccgcatacatatcctgcccttccgcactggcatggatttcgccaccgttgacatgcagattcgcgtccgcaatttgcgtcactttctctacttttaacacaatatagacctgattgatccggtcgaaaaattgctccagcttgctgaacttcgccgtaacgaattcgcgcatcgcaggcgtaatttcgacgttgtgtcctgtaatgttgagctgcatagtgtcttccttatcggttatgtcagaccagttgtttacgctggtttgacggcgggatggataaagactctctgtacttcgcgacagtgcggcgcgccaccataataccctgctcggacagcatggaggtgagcttactgtcgctcaacggcttcgcggggttttccgcggcgatgagcttcttcaccagcgcgcgaatcgccgtcgacgaggcttcgcctccgccttcggtattcacatggctggagaagaaatacttcagttcaaaaataccgcgcggactgtgcagatatttttgcgtggtgacacgggaaatcgtcgattcatgcatctcgacggcctgggcgatatcggccagcaccatcggcttcatatactcttcaccctgttcgaaaaaagcctgctgctgctctacgatgcagcggctgacgcgcagcagggtatcgttgcggctttccagacttttaatcagccagcgggcttcctgcagattgctgcgaatgaactggccgtcggcgtcattgcgggcgctgttgcccattgccgcatactgctgatttattttcaaccgtggaatgctgtcggcgttgagctcgacggtccagcggccgctcaccttgcgcaccagcacatccgggatgacatattccggttcgctggtctgaatggactggccagggcgaggatccagggactggatcaggttgaccgcctctttaagcacctcttctttcaggcgggtgactcgcattagagtgcggaaatcatggttggccagcagatcaagatggtcgctgataatcagccgcgcctcttccagccacggcgtctctttagcaaattgcgacagctggatcagcaggcagtcgcgcagatctttcgctgcgacgccaaccggatcaaaacgctggattcgcttgaggaccgcttccacctcctccaggccgatctcgtcatcgccgatgctgtcgacaatatcttcaatctgaatcgtgaggtagcccgtatcgtcgacggcgtcgacgatagaggtggcaatagcgcggtcggtgtcggtgaaaggcgtcagctcaacctgccacatcagatagtcctgcagagtctgggtggtctcgccttgatagacgggaagctcgtcgtcctgatagtcgacgccgttacccgacggcgtgccagcggtatagatttcatcccagctggcatcgagaggcagttcgtcgggcatctctttttgctcaagcgcatcgacggtatcgagggactcgcggtcctccacctcttttgcctctacctcgtcgtgaagatcggtttgctcaagcaacgggttactttccagcgcttgctggagctcttgctggagttctaacgtggacaactgcagcaaacgaatcgcctgctgcagctgcggcgtcatggcaagctgttggctaagccttaattgcaaaccttgcttcatgttcagggtaaatatctccggctaaaacgtctgtaacctctaccctatcagagtctgaagtcttccccaagatacacgcgcttaacctgctcatcttcgaggatctgctgcggtgtaccatgagcgataaggtgtccctgactgacaatatacgcgcgttcgcagaccgcgagggtctcacggacgttatggtcggtaatcagaacgccgagaccgctgtcgcgcaggtgctcaatgatgcgtttaatatcgataacggagatcggatccacgccggcaaagggttcatccagaagaataaatttcggattcgccgccagcgcgcgggcgatttcgacgcggcggcgttcaccaccggagagcgcctgaccgaggctgtcgcgcaggtgctcaatatgaaactcttccatcagctctttagcgcgatcttcccgttgttcgctggttagatcgtcacggatctgcaggaccgccatcaggttgtcatagacgctgaggcgacggaaaatcgacgcttcctgcggcaggtagccgatgccccgtcgcgcgcgcgcgtgcagcggcagcaggctgatgtcttcgtcatcgatgatgatattgcctgcgtcgcggggcacaatcccgaccaccatgtagaaggtggtcgttttaccggcgccgttcgggccgagcaagccgacaatctcgcccgagttaacggtgagactgacatcttccaccacgcggcggcctttatacgctttagcgagattcttcgcagttaaggttgccataacggattagttactcttcttttgctggttgccgcttttatcctgcagctcggacggcaccagaacggtggtgacgcgtcgacctttatcgctgaaggcctgcattttttgctctttcaccagataggtgatcttgtcgcccttgatgttgctgtcgagctgttccagataagcgttgcccgtcagcacgacgtaatcgttctgcagctcgtagcgcattttcgacgcccggccttttaccggcttgccgttatcctgcatctgatagaaagtagccgggttaccgaaaccttcgatcacctctttgcctttctcgttgcctggacgggtgaccaccactttatcagcgttaatcttgatcgtcccctgggtcacgaccacgttaccggtgaaggtgacgacattgccctgcatgtccagcgactgctgatcggattcgatatggatcggctgatcggtatcgcccgtcttggcgagggccggcaggctggcggccagtaacgcgccggcgagcgcaatcttaaggctgagtttgtttgttctgaatttcataagaggttctcaccttttcaatcagctcggcatttttgctgcgaaggtttccacgcattttcaggccgctggaattaaatgtggtgccgtataacgtcaccatgtcatcggaggtaacgtcctgcgttaccagatttatctgggcgttatccgtcgtaattttgcgcagttgagaatctggcgcgagcgcattcacctcaacgtgcccgtaaagatagagcatccggtcattcgtcagcttcgctttgtctgctctgaccgaccaggtaggcaccttgttagtatcaaaggtggtcatcaccggtttggtaaaccaggagacctcctgatcggaaaaatattccacgtgctcggcaatcagccgatagctcagggcgccttccggactgtataccacggtgtcggtatgttcgcttttatacgtagggtcgttaggattgacctccggctgggccgtgtcgtccgtattcgccagattcaggccgataaggatcagcgcgagcagcgacagtaaaatgataacccaacgtctggttttactcatattgattgccctttggcctcatccaacttgccctgcgccaatagtaacaaatcgcagacttcgcgtaccgcgccgcgtccgccgttaatccgcgtgacataattcgcccgcggtagcagcagcggatgcgcatcggcgacggcgacgctaaggcccacttcggccatcaccggccagtcaataagatcgtcgccgatgtaggcgacttcttccggccgcacgtgcagtttgtccgtcagatcgcggaacgccagcagcttgtccgactgcccctggtacaaatgcgtgatgcccagcgtctgacagcgatcttctaccagtttagcttttcgcccggtaataatcgccacttcaatacccgaggtcagcgcgcagcggataccatagccatcacggacgttaaacgctttcagctcctcgccgtgattacccatatagataagcccgtcggataatacaccgtcgacatcaaggatcagtagacggatcttcgccgcgcgatcgacaaacgcctggcttaccggcccgtagcaggtcgctaactgagcatcagcattattcattattttttccttacttacactacgcccgcgcgcagcagatcgtgcatatgtaccacacccagcagatggtcgccatcggcaaccagcacgcaggtgatatgacgggattgcatcaggtttagcgcatccaccgccagagtgccggggcggatgcggatacctccccgggtcatgacgtcggcaatgctggcatcgcgcatatcaacgccggtatcgaagacccggcgcaggtcaccgtcggtaaaaataccgatgatgttcatatcgtcatcgcagatagcggtcatgcctaaatttttacgcgtgatttccagcagcgcatcgcgcagggtcgcctgcaggccgacgtgcgggatttcatcaccggtatgcataatatcattgacccgcagcaacagcttacggccgagtgcgccgcccggatgcgacagggcgaaatcctcagcggtaaagccgcgggcttccagcagggcgacggcgagggcatcacccatcaccagcgcggcggtggtgctcgacgtgggcgccagtcctaacgggcaggcctccttcggcactttcacgcacagatggatatccgccgcgcgcgccatgctgctctccggccggctggtgatacagataagcttcacctgctggcgcttgaggaccgggatcagcgcgaggatttcattcgattcgccggagttcgacaacgcaattaccacatcctgaggggtgaccatacctaaatcaccgtgcgccgcttcgccggggtggacaaaaaatgccgaggtgccggtactggcgaaggttgccgccattttgcggccgatgtggccggatttgcccatccccatcaccacgactttcccgccgcagcggaaaatcgtttcgcaggcatgggtaaagtcttcatttatgtattgatcgagctgggccagaccttcacgttcaatttccagcacctgacggcctgcctgttgaaagtcaaaatccgtgggcaaatctatttgcgacatgatgttatcccgaatcattcaacgaagagcggtgctgtccaaaacagcatcgccaaccaaaccacaaagccgccgaccagcagcgcgccaaccagtcgtcccggctgctgctgacggcgccagcacagcactgcgaagatcaggctgaccagcagcatcacgccataatcgcgagtgaaggcttcggtcgcaaagctccccggcgcgatcagcgccggtaaacccagcaccagtgcgatattaaggatattggcgccgatgatattgccgatggcaatatcatcttcccctttccgcgccccggcgatggcggtggccagctccggcaggctggtgcctatcgccaccaccgttaggccgacggtcagttcgctgatggcgaaatagtttgccagcactgtactgttatccaccaccatgcgggtcgccatcggcatgacgatcatcgctacccctaaccagagcagggcgaccggcagcgacccttcgcgtggcagctccgccagctgttcgcgggtcaggctatcgcttccctggcgctccgccaggcgagcgattttgatggtgaacagcagccacagaagcgctaacgccagtaaaaatagcccgtcgagacgggtcagttgtccatcgtagagcaccagtcccgccagcacgctgaccagcaacattagcggtaattcgcggcgcagaatatcagaatgcacggtaaatggcctgagtaaggcggcgagaccgaggatcaataagatattggtgatattagatccgagcgcggtgccgaccgccagatcggtctgcccgtgcagcgaggccgcggtggcgaccatgatctcaggcaggctggtgccgatactgaccactgtcatgccgatgatcagcggcgggatccccaacatacgacacaggatggaggcggcatagaccagacgatcggcgctgtagacaaccagcaataaaccaataattaacagagccgtcgctaagagcatctaaagtcctttcttcaggtataatcgtcgcctcgctgggttatccctacgcagcgtaacgaattcttaattttgactttatgtgtgccaaaagtaaaacaaatgccagctttcgctaacctgtgcaggtaagattctgtaaaaatgttgtgattgtggcgcaagaaagggccatgcttgcccgtcaggtgtttagtaaggatgattttatgagccaaactcaggcgaatttagttgaagtgcgcggtatccgcttttcacgcggcgatcgtgtgatcttcgacgacatctcgctgtcggtgccgcgcggtaaaattactgcgatcatgggaccttcggggatcggcaagactaccctgttacgcctgatcggcggccagatcccgccggacaggggagagatcctgtttgatggcgagaacgtgccgcagatgacgcgttcgcgtctttatacggtgcgtaagcggatgagcatgctgttccagtccggcgcgctgttcaccgatctcaatgtctttgacaacgttgcctatccgctgcgcgaacatacgcatttgccgcctgcgctgctgcatacgacggtgatgatgaagctggaagcggtggggctacgcggtgcggcgaagttaatgccttctgagctttccggtgggatggcgcgccgcgccgccctggcgagagccattgccctggagccggatctgattatgttcgacgaaccgttcgtcgggcaggatcccatcactatgggcgtgctggtgaagctgatttctgaactcaacagcacgctgggtgtcacttgcatcgtggtttcgcacgatgtgcccgaggtgcttagtattgcggactacgcgtatatcgtggcggataaaaagattgtcgcccacggtagcgcccagtcgctacgggagaataccgatcctcgggttcgtcagttcattgatggtattgccgacggtccggtgccgttccgttatcctgctggcgactatcaccatgatttattaggcatagggagttgagcgactcatgctgtttaatgcgctggccgcgctaggtcatcgcggtattaaaaccaccgcgacgtttggacgcgccggattaatgcttttcaacgccgttgtcggcaaaccagagtttcgcaagcacgcgccgctgctggttcgtcaactctataacgtcggcgtcctgtcgatgctgattatcattgtatcgggcttgtttatcggtatggtgctcgggctgcaggggtatctggtgttaaccacctacagcgcagagaccagtcttggcatgctggtggcgctgtcgctgctgcgtgagctggggccggtggtcgccgcgctgctgtttgccggccgcgccgggtcggcgctgaccgccgagattggcctgatgcgggccacggaacagctctccagtatggagatgatggcggtggatccgctgcgtcgcgtcatttccccacgcttctgggccggtgtcatttcgctgccgctgctgacgattatcttcgtcgcggtagggatctggggcggtgcgctggtgggtgtgagctggaaaggcattgacggtggttttttctggaccgcgatgcaaaatgccgtcgactggcgaatggatctggtgaactgcctgattaagagtctggtgttcgctattacggtaacctggattgcgttatttaatggttatgacgctatccccacttccgccgggattagccgggcgacaacgcgtaccgtggtgcatgcgtcgctggcggttctggggctggattttgtgctgactgcgctgatgtttgggaattgagttcatgcaaacgaaaaaaactgaaatctgggtaggggtgttcttactggtggcgctgctggcggcgctgtttgtctgcctgaaggcggcgaacgtcacctcgctacgcaccgagccgacttatcgcctttatgcgactttcgataacatcggcggcctgaaggcgcgctcgccggtgcgcatcggcggcgtggtagtggggcgggtagcggacattacgctcgatccgaaaacctatctgccacgcgtggagctcgatatcgatgagcgctacaaccatatcccggataccagttcgttggcgatccgcacctctggcctgctgggcgagcagtacctggcgctgaacgtcggttttgaagacccggacctcgggacgactatccttaaagacggcggcactatccaggacaccaagtccgccatggtgctggaagatctgattggtcagttcctttataacagtaagggcggcgacaatcagaattctggcaatgataaggccgaggcagaaggtcatactgacgcgacgccggcagccggcacgacgcattaatttcaggagaaatacgatatgtttaaacgcttactcatggtcgccatgctggtgattgccccgctgaccgccgtccaggccgcagatcagtccaatccgtataagctgatgaatgaagcggcgcagaaaaccttcgatcgcctgaagaatgaacagccgaagattaaagctaatcctaactatctgcgcgacatcgtcgaccaggagttattgccgtatgtacaggtgaaatatgccggcgcgctggtgctgggccgctattacaaagaagcgacccctgcgcagcgtgaggcctattttgccgccttccgtgaatacctgaagcaggcctacggtcaggcgctggcgatgtaccatgggcagacttaccagattgctccggagcagccgctgggcagcgcaaccatcgttccgatccgcgtcactatcatcgacccgaacggtcgtccgccggtacgtcttgacttccagtggcgtaaaaatacccagaccggcaactggcaggcctacgatatgatcgcggaaggggtgagcatgatcaccaccaaacagaatgagtggagcgatctgctgcgcaccaagggcgttgatggcctgaccgcgcagctgaaagcgatctctgcgcagccgatcaccctggaacagaaaaaataatgagcgggcagctgagctggactcgcgagggcgagacgctggcgctgcacggggagctggatcaggatctgctggtcccgctctgggaggcgcgcgcccaggcgacggcgggaacggcgatcatcgatctcagtcagaccacgcgcgtggacaccgcgggcctggcgctgttagtgcattttatggcgctgattcgccgtcagggccgggaagcgcagctggtcggcaagagcgaaaacctgcaaacgctgatcggtctttacaacctgcctgccgatctgatctgataatcttttcagtgccttagcactgaagctattccgaaagccctggcaatcttttcgccggggctttttgcttgtttaagaccgcgccactttcctctaagatgttgggctgttttcactatcagataaatttgagcccatggaaaatcatgaaattcagaccgtgctgatgaacgcactccccctccaggaagtccacgtctctggcgatggcagccactttcaggttattgctgtgggtgagatgttcgatggcatgagtcgggtgaaaaagcagcagagcgtttacgcgccgctgatggaatatattgccgacaaccgcatccatgcgctgtcgatcaaggcctttactccgcaggagtgggcgcgagaccgcaaactcaatggcttctaagctgtgggggatcccctgcagcgtatgtgaatttttaatagagaacagaatcaatggataaattccgtgttcaggggccgactcgccttcagggtgaagtcaccatctccggggcaaaaaacgccgccctgccaatcctcttttccgcgctgcttgccgaagagccggtagagatccaaaacgtacctaagctgaaagacatcgataccaccatgaagctgctgagccagctgggcgcgaaggtcgagcgcaatggttcggtatggattgacgccggcccggtcgatgtattctgtgctccgtacgatctggtgaaaaccatgcgcgcctctatctgggcgctgggcccgttggtggcgcgtttcggtcaggggcaagtttctctgcctggcggctgcgctatcggcgcgcgtccggtcgatctgcatattagcggtctggagcagctaggcgccgagatcaaactggaagaaggttatgtcaaagcctcggtcagcggtcgcctgaaaggcgcgcatattgtgatggataaggtgagcgtcggcgccaccgtaaccatcatgagcgcagcgacgcttgcggagggaacgacgattattgaaaacgccgctcgcgagccggagattgtcgataccgccaacttcctgaacgcgctgggcgcaaaaatcacaggccagggtagcgatcgcattaccatcgaaggcgtgcagcgcctgggcggcggcgtctaccgtgtgctgcctgaccgtattgaaaccgggactttcctggtggccgcggcgatttccggcggcaagatcctctgccgtaacgcgcagccggataccctggatgccgtactggcgaagctgcgcgacgccggggctgacatcgaaacgggcgaagactggatcagcctcgatatgcacggcaaccgtccgaaagcggtcaacgtgcgtaccgcgccgcacccgggcttcccgaccgatatgcaggcccagttcacgctgcttaacctggtagcggaagggaccggcgtgatcaccgaaacgatctttgaaaaccgcttcatgcacattccggagctgatccgtatgggcgcgcacgcggagatcgagagcaataccgctatctgtcacggcgtgaagcagctttctggcgcgcaggtgatggcgaccgatttgcgcgcgtcggcgagcctggtgctggccggctgtatcgctgaagggaccaccatcgtcgatcgcatctatcatatcgatcgcggctatgagcgtatcgaagataaactgcaggccctgggcgccaatattcaacgcgtgaagggcgagtaaccgcgtcctgacagcgccccgggacgttgttccggggcgctgtcgagcaatcacatcacttgtcgatcttcttctgacgcatcatctgcgttctgtcgataaactcatgagtcaccgggtcgtggtagcgtgacggccagatgacccacggctgcgtttccagcgctgtggcgataatcaattcgcctttcggccaggggcgggtcagggcgttcgccagcgttgaagaacttagtccgtgccgtcgcgactctgccgccagcgatgttccccgtttacgtaatcccgcaacaatatctgcgggatgccagtcgatgaacttatccataaattctcctggtgttaaaggtccagatcgtcccacatgggcgatagagacactatacccgcgtactatgtagggttctaacaagttctgttaaagcgccggaatattcagaatctatcaagatattcggaattttagggagagaaatggcattttactggaactttcccgcgcgtcgcgcgggaaaggaggggggattaatgatcgcgctggactgcaatatgcgccagcccaatcaaggcttcgcgccagggcgtgtccgggaggatctgcagcgcggcaatggctttgtcagcttcttcttcggcacgcttctgcgtccattccagcgaaccgcaggtcgccatcgtttccagcacagcatccagtagatggcggccgttgccttgctcgatcgcaccgcggatcatcgctgattgatcgggtgtgccatggtgcatggcgtgcagcagcggtagcgtgggtttaccttcgttcaggtcgtcaccgacgtttttaccgagccgctcgccgtcagagctataatcgagtaaatcgtcgattagctggaaagcggtgccgagatagcggccataatcctgcaacgcgcgctcttcttccgcagtgcagtcggccagcagtcccgcacactgcgaggcagcttcaaacagacgcgccgtcttgctgtagataacgcgcatgtagttctcttcggtgatatccgggtcattgacgttcatcagctgcagcacttcgccttcggcaatgacgttcaccgcttccgacatgacctcaaggatcttcagcgagcccagctgggtcatcatctgaaaggcgcgggtatagataaaatcgccgaccagcacgctggcggcattgccaaacgccgcattggccgtggctttgccgcgacgcatatcagactcatcgacgacgtcgtcatgcagcagggtggcggtatgaataaattcaatcagcgcggcaatggtgacatgcgcgctcccctgatagcccaccgcgcgtgcggcgagcacagcaatcatcgggcgaatgcgtttgccgccgccgctgacgatgtaatagcctaactgattgataagctgaacatcggagttgagttgctcaagaatcgtcgcattgacacccgccatatcttgcgcggttaactcattgattttttctaaattcatcgcaaaagccgggccaaatgtcctgttaccatgaatccaggtgggatcacagaaggattaagacagaattaaaagaagatatgattgtactgaaaaattgccgtagataaacgttgtcgtgaaagttgtgttttttttctgcattgatcgctaatcgctcttgtcaaaggctcgcgttttgcgtaatattcgcgccctattgtgaatatttatagcgcactctgaatcacataaagaggtgcgcggaagcggagttttatatgtacgcggttttccaaagtggtggtaaacaacaccgagtaagcgaaggtcagaccgttcgcctggaaaagctggacatcgcaactggcgaagctgttgaattcgctgaagtgctgatgatcgcaaacggtgaagaaatcaagatcggcgttcctttcgttgagggcggcgtaatcaaagctgaagttgttgctcacggtcgtggcgagaaagttaaaatcgttaagtttcgtcgtcgtaaacactatcgtaagcagcagggccatcgtcagtggttcactgatgtgaaaatcactggcatcagcgcctaagacctgaggagtagatttaaatggcacataaaaaggctggcggctcgactcgtaacggtcgcgattcagaagctaaacgtctgggcgtaaaacgtttcggcggtgaagcagttctggcaggtagcatcatcgttcgtcaacgtggtactaaattccacgctggtaccaacgttggttgcggccgtgaccacactctgttcgctttgactgacggtaaagtcaagttcgaagttaaaggcccgaaaaaccgtaaattcatcagcatcgttgctgaataagtttttcgcgtcccggtaacggatgaaagccccgcaacacgttgcggggctttttacattcgtctaccggaaaatttttgcagggaaacaggcatgaagcagcaggctgggattggcattattctggcgcttaccaccgcgatgtgttggggagcgttgccgattgcaatgaaacaggttctcgaggtgatggcgccgcctacggtggtcttttatcgcttcctgatggccagcattgggcttggcgcgatcctcgcgatcaaaggcaaactgccgccgatgcgaatttttcgcaagccgcgctggctggtgttattagcgattgccaccggcggtctgttcggtaacttcatcctgtttagttcttccctgcaatacctcagccccacggcttctcaggtcatcggccagctgtcgccggtggggatgatggtggctagcgtcgtaattctgaaagagcgcatgcgcggcacccaggtggtgggcgcgttgatgctgctcagcgggctggtgatgttcttcaataccagtctgattgaaatctttacccgcctgacggactacacgtggggggtaattttcggcgttgctgccgctacggtgtgggtaagctacggcgtcgcgcaaaaggtgttattgcgccgtctggcatcacagcagatactatttttgctgtacactttgtgtacgattgcattattgccgcttgctgagcccggagtgatttcccggttaagcagctggcaactggcatgcctgattttttgcgggctgaataccctggtcggctacggggcgctggcggaagccatggcgcgctggcaggcggcgcaggtcagcgcgttaatcaccttgacgccactgtttacgctactgttttctgatttattatcaatggcctggcccgatgttttcgccagaccgatgttaaacctgattggttatctcggtgcgtttgtcgtggttgcgggcgcgatgtattccgccatcggtcatcgtctttggggacgttggcgtaagcgagaggcggtagtaccgctgccccgctcaggcgaatgatttacggagagtaaaatgaagtttgtagatgaagcaacgatcctggtcgtagcaggtgacggcggcaatggttgcgtaagcttccgccgcgaaaagtatattccgaaaggcggtccggatggcggcgatggcggcgatggcggcgatgtctggctggaagcggacgagaacctgaacaccctgatcgactaccgttttgaaaaatcgttccgcgccgaacgtgggcagaatggtcaaagccgcgactgtaccggtaagcgcggtaaagacgtgacggtaaaagtgccggtcggcacccgggttatcgatcagggcaccggcgagaccatgggcgatatgaccaaacacggtcagcgtctgatggtggcgaaaggcggctggcacggtttgggcaacacccgtttcaaatcgtccgttaaccgtacgccgcgtcagaaaaccatgggtaccccgggtgataaacgcgacctgcagctggagctgatgctgttggccgatgtcgggatgctgggcatgccgaacgccggcaaatccaccttcatccgtgcggtctccgccgccaagccgaaagtggctgactatccgtttaccaccctggtgccaagcctgggcgtggtgcgtatggacaatgaaaagagcttcgtagttgccgatatcccggggctgattgaaggcgcagcggaaggggcaggcctcggtatccgcttcctcaagcacctcgagcgctgccgcgtactgctgcacctcatcgatatcgatccgatcgacggctccgatccggttgagaatgcgcgcattatcatcggcgagctggagaaatacagcgagaagctagcctccaaaccacgctggttagttttcaacaagattgacctgatggacaaggccgaagccgaagccaaagccaaagcgattgccgaagcgctgggttgggaagagaaattctacctgatctccgcggccagccagcagggcgtgaaagagctgtgctgggacgtgatgaccttcatcatcgaaaacccgatcgtccaggcggaagaagagcagaagccggagaaagtcgagtttatgtgggacgactatcaccgtcagcagcttgaagaggccgaagccgaagcagaagatgacgaagactgggatgacgactgggatgaggacgacgaagaaggcgtcgaattcatctacaaacgctaatcctgacttctctggatcaaaaagggccgcatctgatgcggcccttttgttttaattgttctggtacaaatctttatacaagcggctttcaaagcggaccagtgggatgcggcgattgcgctgatcagctggctccacggcgtatccggagagatattgcacgaaggccatcttttgtccgctggcggtagtgatgaagcctgcgaggttataaaccccctggagcgacccggttttcgccgaaactttaccatcgacgcccgcctgatgaagaccggcgcgatactgcagcgatccgtcatggcccgccagcggcagcatggagatgaagttgagctcggtatcgtgctgggcgatatactgcagcacctgcatcatggtcgccggggcgatcaggttgtggcgcgacaggccagagccgtcggcgatgatagtgttgccgagatcgaccccagcctgttgacgcaggatctgccgtacggcatcggagcccgcccgccaggtgccaggtacgccgaaccgggcgtggccgatggtgcgaaagacggtgtcggcaatcatgttgtctgacttcttcagcatgatccgcagcagatcgtgcagcggagccgactggctggttgccagcacggtgccgggctcattggccagcgtctggcgcagcagcgtgccgctgtaggtgatccccgcctgggccagctcggctttgaggatcgctccggcatagctggcgccatcctgaatggcgaaggccagaggcagcggctcgctacgctgcggcaggcagccggtgagagtatagcgattgagatcgcccggcaccacgtcgagctcgcaatactgggcttccgatgagccacgcgccagcgttcgtacctggctgaacatggtgaccggataataggatgcaacgcgaatgaaggcgacatcgcccggtttctgcgcgctatacagcgagacagagaagcagttacggtcgacaatcgccgccgccggcggggcgctgaagcactgcgtcaggtcgttccacggccagccgggcgctttgtcatggctggcgaagaccgaggtatcgatgagcacattgccttcgatacgctgcacgccggcttttttcagcgtcgccaccatattgcgaatatcctgccgtttaagcgtcggatcgccgccgaagcgtgcaatcaggtcgcctttcagcacgccgccgtcaagggaacctttggtttccagcgtggtggtaaagcgaaaatcgggccccagttgcagcagcgccgccagcgcggtgatgaccttttgcgtactggccgggagcgccatttgctggctgtgatagtcgatttccggcgtcgatgcgccgaccttttgcgccataaaggcaaggttcgcaccggcgggaagctggttgatgtactcgtcaatattcgccgcctgagcgctaagcgctataccggcggtcaatccgatgataaatctgggaaatcgcataatctcgcgctaacaacctgaagccaggccgtcatactacggtgcaacgcccagtaaagtaaacgatgacccataatgaacttcggggtaaaatacccatcaaatgaaaaattgctgctgacctggggagtgtttcccgggtcggtttctttttgctcgtgtcctgcccgtgggcaggacaggtggcggagcggagctatccgttccctgaaggaatgataaagaggtataactaatgcaagcgattccgatgaccttacgtggcgctgaaaaactgcgcgaagaactggattatctgaagtctgtgcgtcgtcctgaaatcattgccgctattgctgaggcccgtgaacacggcgatctgaaagagaatgccgagtatcacgccgcgcgtgagcagcagggtttctgcgaagggcgaatcaaggatatcgaagcgaagctgtctaatgcgcaggttatcgatatcaccaaaatgccgaacaacggccgggtgatttttggttctaccgtcagcgtgctgaacctcgataccgacgaggaacagacctaccgcatcgtgggcgatgacgaagctgattttaagcagaatctgatctccgtgaactcgccgatcgcccgcggtctgatcggcaaagagcaggatgacgtcgtgactatccgtaccccgggtggggaagtggaatacgaaattaccaaggttgaatacctgtaaggcgtatttcccgctacgatgtttatagattgtaaagaaaggaaaaaggccgcatagcggccttttatcaacgtcaggagcatggcattttgctcgcctggccgcagaaatccctcgttttacacaaagttgtgtcgagattcaggatattcttagcgtggcagcgagattttacgctctggtgttgggcggtacagaaccagcgttttaccgatgacctgtacgttacaggcgccggtttcgcgtacgatggcttccacgatcaaggcttttgtttcgcgatcttctgaggcgatcttcaccttgatgagttcatggtgccctaacgcttgttcgatctcggccagtaccccttcggtcaaaccattgttgccaagcataactaccggcttgagcggatgtgccagacctttcaggtgctgtttttgtttagtactcagattcatcgtatttttttgcttacgttgggattgaaaacgggtcattctaccgccatctcccatatatcgccaaactaccgcgtcgatttttacgcagtaaagtacgatgaacccgaacgggaatgttaaatgacaggtaaaaagcgttctgccagctcaagccgctggcttcaggaacactttagcgataaatatgttcaacaggcacagaaaaaggggttacgttcccgtgcctggtttaaacttgatgaaatacagcaaagtgacaaaatttttaagccggggatgacggtagtcgacctcggtgctgctcccggtggctggtcgcagtatgcggtcacgcagatcggcaacagcggccgcatcatcgcttgcgatcttttaccaatggatccaatcgttggtgtggacttccttcagggcgattttcgtgatgaattagtcctgaaagcgttacttgagcgagtgggcgacagtaaagtccaagttgtcatgtccgatatggcgccgaatatgtgcggaacaccggcggtggatattccccgggctatgtatctggtagaactggcgcttgaaatgtctcgtgatgtattagcgccaggtggtagttttgtagtgaaggtgttccagggcgaaggcttcgatgagtatcttcgagaaattcgctccctgtttacgaaggtcaaagttcgtaagccggactcttcccgcgctcgttcgcgtgaagtgtatattgtagcgaccgggcgtaaaccataaccggcagatttcaaacgaaagtttgaaagaaactggatatagagtatcctgacgctgtttttaacacagttgtaataagaggttaatcccttgagtgacatggcgaaaaacctaatactctggctggtcattgccgttgtgctgatgtcagtattccagagctttgggcccagcgagtcgaatggccgcaaggtggattattctaccttcctgcaagaggtcaatcaggaccaggttcgcgaagcgcgtatcaacggacgtgagatcaacgttaccaagaaagatagtaaccgttacacgacttacattccggttaacgatccgaagctgctcgataacctgttgactaaaaacgtcaaagttgttggcgaaccaccagaagagccgagcctgctggcttccatcttcatctcctggttcccaatgctgctgctgatcggcgtctggatcttctttatgcggcaaatgcagggcggcggcgggaagggcgcgatgtccttcggcaaaagcaaagcccgtatgttgacggaagaccagatcaaaaccacttttgcagacgttgccgggtgtgacgaagcgaaagaggaagtcggcgagctggtagaatacctgcgtgagccgagccgcttccagaaactgggcggtaaaatcccgaaaggcgtcctgatggtcggccctccgggtaccggtaaaacgctgctggcgaaagcgatcgctggtgaagcgaaggtaccgttctttaccatttccggttctgacttcgtcgaaatgttcgtcggtgtgggcgcttctcgtgtgcgtgacatgttcgaacaggctaagaaagccgcgccttgcatcatcttcatcgatgaaatcgacgccgtcggccgccagcgtggcgcaggcctgggcggtggtcacgatgaacgtgagcagaccctgaaccagatgctggttgagatggacggctgcgaaggtaacgaaggtatcatcgttatcgcggcgactaaccgtccggacgttcttgaccccgcgctgttgcgtccgggccgttttgaccgccaggtggtggttggcctgccggatgttcgcggtcgtgagcagatcctgaaagtgcatatgcgtcgcgttccgctggcgccggatatcgatgcggcaatcattgcgcgcggtaccccgggcttctccggtgcggatctggccaacctggtcaacgaagcggcgctgtttgctgcccgcggtaacaaacgcgttgtgtcgatggttgagttcgagaaagcgaaagacaaaatcatgatgggtgcggaacgtcgctccatggtgatgacggaagcgcagaaagagtctactgcttatcatgaagcgggccacgcgattattggtcgcctggtgccggagcacgatccggtgcacaaagtgacgattatcccgcgcggtcgtgcgctgggtgtgaccttcttcctgccggaaggcgatgcaatcagcgccagccgtcagaaactggaaagccagatctccaccctgtacggcggtcgtctggcggaagagattatctacggtccggaacatgtttctaccggtgcgtccaacgatattaaagtggcgacgaacctggcgcgtaacatggtgacccagtggggcttctccgacaaactcggtccgctgctgtatgcggaagaagagggtgaagtcttcctcggccgtagcgtcgcgaaagcgaagcatatgtccgatgaaaccgcgcgtatcatcgaccaggaagtgaaatcgctgattgagcgtaactacggtcgtgctcgccagctgctgaacgacaacatggacattctgcacgcgatgaaagatgcgctcatgaagtatgagaccatcgatgcgccgcagattgacgacctgatggctcgtcgcgaagttcgtccgccagcgggttgggaagaacctggttcttctaacaactctgacaacaatggcacgcctcgtgcgccgcgtccggttgatgaaccgcgtacgccgaacccgggcaacaccatgtcagagcagctgggcgacaagtaagctaccgctgttgatgcttgtttaaccttaaaaccccgggcgtccgctccggggtttttcttttttaacctcttcagtctcagggattttgtgatgaaacttgtagcccagggctcaaccctcgatctctctcacccccacgtgatgggtattctaaatgtgacgcctgactccttctccgatggcggcgcccataattcgctgattgaggcggtgaagcatgccaatctgatgatcaacgccggcgcgaccatcattgatatcggcggtgaatcgacgcggccaggggcggctgaggttagtgtggaagaggagcttgcgcgggtgataccggtggttgaagccattgcccagcgctttgaggtatggatctcagtggatacctccaaggcggaggttattcgccaatcggccagggccggggcgcatatcatcaacgatattcgttcgctgaccgagcccggcgcgctgcaggccgccgcggaaaccggactgccagtgtgtctgatgcatatgcagggacaaccaaaaaccatgcaggaggcgccgaagtatgaggacgtcttcgccgatgttgagcttttttttaatgagcacattgtgcgctgcgaacaggcggggatcgcaaaagaaaaattgctgctcgacccgggattcggtttcggtaaaaatctctcccacaattaccaactgttggccaggcttggggagtttcatcactttggtctgccgctgctggtcggtatgtcacgtaagtcgatggtaggtcagttgctgaacgtcgggccgtcggagcggctgaacggcagcctggcgtgtgccgtcattgcagcaatgcagggcgcgcagattatccgcgtccatgatgtcaaagaaacggtagaagcgctgcgcgtggtggaagccaccctcgccgctaagggaaaaaaacgttatgagtaaccgcaagtattttggcaccgatggtattcgtggccgcgtcggcgatgcgccgatcactccggagtttgtgctcaagctgggctgggcggcgggcaaagtgttagcgcgtcacggttcgcgtaaaattatcatcggcaaggatacccgtatttcgggctatatgctggaatcggcgctggaagctggactggcggcagcggggctctctgcgtcgttcaccgggcctatgccgacaccggccatcgcctacctgacgcgcgccttccgcgccgaggcggggattgttatctctgcttcacataaccctttctacgacaacggcattaaattcttctccattgagggcaccaaactgccggatgatgtcgaagaggcgattgaagccgaaatggagaaagagctcacctgcgtggattcggctgagctgggcaaagccagccgtatcgtcgatgcggcggggcgctacattgaattttgtaagggtacctttcccaacgaactgagcctgggaacgctgaaagtggtggtggattgcgcgcacggcgcgacctatcacatcgcccctaatgtcttccgcgagctgggagcccaggttatcgcgatgggctgcgagccagatggtctcaacatcaacgaagaggtcggcgccactgacgtgcgggcgctgcaggcgcgcgtgctggcggaaaaagccgatctgggtattgcctacgacggcgatggcgatcgggtgattatggttgaccacgaaggcaataaagtcgatggcgaccagatcctctatatcatagcccgggaaggattgcgtcaggggcagctgcgcggcggcgccgtcggcacgctgatgagtaatatggggctggagctggcgctcaagcagttaggcatcccgtttgcccgcgcgaaggtcggtgaccgctatgtactggagatgctccaggaaaaaggctggcgcatcggtgcggaaaactccggccatgtgatcctgctggataaaaccaccaccggcgatggcattgtcgccagcctgcaggtggtcgcggcgatggtccgcaaccacatgagcctgcatgacctgtgcagcgggatgaaaatgttccctcagctgctggtgaatgtccgctttaccgagggcagcggtaatccgctggagaatgagcatgtcaaagcggtgaccgcggaagtggaggcggcgttaggaaaacgcggccgtgtcctgctgcgtaaatcgggtacggagccgctaatccgcgtgatggtggaaggcgagcatgaagatcaggtgcacgagtttgcgcaccgcatcgctgaggcggtaaaaagcgtttagctttgccggctaagtggttaaaaaggcggcgcttgccgccttttttatgatcgaaaattggctttttgctgtttttttctgcagttgatacaatgtgtcgaaattgcccttgcgaaggtcattcgctttggttagtattcacacccgcttcagtgggaaacgttaaaacgtcccgctttattggtcgaagcacttggtatgcggcgaatccgcaaggaacaggttgattatgtacgaagctcttttggttgttttccttattgtagcgattggccttgtaggtctggttatgctgcagcaaggtaaaggcgctgatatgggagcctccttcggtgcaggcgcttccggcacactgtttgggtccagcggttctggcaactttatgacccgtatgaccggcatcctggctgcgctgttcttcatcatcagtctggcgctgggtaatatcaacagcaacaagaccagtaaaggaagtgagtgggataatctgagcgcgccgaaaacggagcaaactcagccaactgcgccggctcagccgaccagcgatatcccgcactaagtattctgtaccgaggtggtggaattggtagacacgctaccttgaggtggtagtgccctaacgggcttgtgggttcgagtcccatcctcggtaccaatattccagaaaaaagacgctgaaaagcgtctttttttgtttttgtccccgctggccatttatttataaacatctcttcgctggttgcctccttttactgtcgttaaagtcgcctcgtcaaattaacagaggtgaagtgacacaatgaacaagatcgggttgcttatcgtcgccggcgtgctcggtttagctgggtgcagttcaacatcgccctcccaaacggtggagacgattaatgcgctaaccgtaccggtatcgcccagtgagtctgggactacagcgaatcatgcccaggcggtgaggcgctatttccaggacaatacggcactgattagtcgccttaaccattcgttgaaaagtcattatctgcaggacgtggagcgccgcgatgtgttcgacagacacagcgaggcgtataaggtgtatggcgccctgacccgcctggagcagatggcgtccatgaatgaggtttaccgcaaagagaataatgttgcgggcctacaagagatcaaccgcgtactgaaaagcgtgccgctgaccagctgagaatgaaacagggactgccgaccggcaatccctgtgaagagttaaaagcggaagttaaccccggcgtaagcgccgtcggccagcgtgttatcgcgattgccatctttccctgccatatcaatatagcgatagccagcttcgatattcagagatgggagcacgttaaggcgtaccccggcattggcctccacataatcctcaacgccgctggacattgagtccggtgagtaatagccctcgccgaaaagcgtgaaatactgaccaagggggagttcagcgccaccaccggcggcgatggcgtaaccttcatcaccatcttttggattcagatagaccgccttaccgcccagggtcatcagaaaagggccaaggttaaagttataacccattcccagtcctacactatctccgtcgttgtcgctatgggcccactgagaactgaacgtcatacccggttccccggcgccaaagctggcggacagattggtaaactcggcgccagcttctccatgcaggttaacggctgcgcaggcagcgctgctggctcccaaagcgatcgttacggcaaccatttttgcagcaatagacttcattattaaattccttcagataaaaaaaagcccgatatgggcgttcgggcataattaacgggttcgtgcatctcattgttatggtcgcggcaggcgagggggcaactctcgctaccgccgcacacgtctggccgatttccgctggcatatcctgagccggtgcagacccggcggttaacgccgtttgtggtcgtctgctggcgaactcagtaatagattgtcttccgggaaacccaggcgcttagcataaaatttttgttcttttagcggtaacggttattggtttaaatttaaacatcttccccgctgcagcaaataacaataaatgataggaggagtgcgggtcagaatttttcaggaagtgagacgatattttgtaaataaccgccgcgggcaaaggtaatataaccgcctttctttaatgctgacaatacattgagaatactgctacgcgacagaagggtcctgtcctgaatatactcaagaatagatactcgctgtcgggtctcttcgcttaatagcatcatctccagcaaatggttacggatgaccgaataggtacgctgctgcaggaccagatcgtcacgatacaccatatacgaggtatgataagccaacaggctggtcacctcttcccacaggttatgctgacgaaaaagcgccgaagccaggtcatagtcgatccgtagcagttcgcatgatacctcggctcgcaggctgtggctgcggctgggctgcagcatttccgtcacgccgaaaagatgcggctcatagacggtcaccatcagtagcctgtcggaattacgaataatcgacagctcgccttttttaaaaataaagagctgggttttgcctttatattcccatgtcagtctttttctggcgatcgcgttaacgggtgtcgcgtgtggctcaagtacatcgatcagtcggtcaatggtcttttgcggcctgatcggcggtttaatattcatgatgtgtatcaccagatatgaattaatcaattgaggctattatagtcaacagttttgctggtctggcgataaggaaaaaatgcgtcatggcattttttttacgttggtgggtcattcaaaataaaaagccggcggtgatccgccggcggaaagcaacattgtcaggcgattatttgcctttgttttccagattttcaacctgcggtaaaccggttgccgaggaggcgctcagcaggccagactgtgcatagccgaacagcttctcgcgggtatcggtgatgtccagattacgcatggtcagctggccgatacggtcttcggcagtaaacatggaatcgcctttttccatggtcagacgctccgctttataggtcaggttgtctgataccgtattaaggatcgagtagtcgttaccgcgacgcagttcgagggtgacttcgccggtgatctggctggcgacccagcgctgcagcgaatcacgcagcatcagcgcctgggaatcaaaccagcggccctgatacagcaggcggcccaactggcgaccgtgggcgtgatattgctcaatcgtatcttcgttatggataccggtcagcaaacgctcgtaggcaatatgcagcagcgccatccccggagcttcataaatgccgcggcttttcgcttcgataatccggttttcaatctggtcgctcatgcccaggccgtgacgaccgccgatgcggttggcttccagcatcatctcgacgtcatcggcaaaggttttaccattcagcgccaccggatggccctgctcaaagcgtacggtgacctcttccgcagggatcttcacgttttcgtcccagaacttcacgcccataatcgggttgacgatcttgacgctggagttcaggaattcgagatctttcgcttcatgggtcgcgccgagcatattggagtcggtggagtaggctttctcgaccgacatcttgtaatcaaagccgcaggcgatcataaattcggacatttcgtgacgaccgccgagctcattgataaagtcgctgtccagccacggtttgtaaatctgcagttcagcgttggtcagcaggccgtaacgatagaaacgttcgatatcgttgcctttataggtgctgccatcgccccaaatgttaacgccgtcttctttcatcgccgccaccagcatggtgccggtgaccgcgcggcctagcggcgtggtgttgaagtaggtcaacccaccggtggtgttatggaaagcgccacactgaatcgcggcgatcccttctgcgaccagctgtttgcggcagtcgatcagacgggcgccttcagcgccgtactctttcgcgcggcgcgggatagcatcgtagtcgtcttcgtccggttgacccaggttagcggtatatgcataaggcacggcgccttttttgcgcatccataacagcgcggcgctggtatccagtccaccagagaaagcgataccaatacgttgaccaaccgggagatgcttgagaatcgtcgtcataaaataaaaccctgctcgatagactgtggtgagttcgacccaacaaccttaactgcatttttatgcattaattgtgagtattcatttaaccatcttttactggcgacaggaagtgcttcatcatctttttgctaaaaaagcctgaaataccagcacaaacggcaatcgggggcgctaaaaagcatgttgacaaaatatactaatcgccgttacaattcatctcgattttatgtcccgtcttcggtaccaaatcccagcagtatttgcgtcttttgctcaaaaagagtaaaatatgccacgtttcaggcgcggggtggagcagcctggtagctcgtcgggctcataacccgaaggtcgtcggttcaaatccggcccccgcaaccactttcccattaagtactttttcaaatatactgtgaggactaggtgtccttcgtagccgaatttgaaagaattcttgcggaaggtgttccagatcgccatggcgatctcagggttcagttatctaaagccccgatttatcggggttttttgttatctgacttcagaataactgggctatacgccctttttttatgtcttgggggtgggtttgtccacattagagcaaaaattgacagagatgctcactgcgccggttgaagcgcttggctttgagctggtcggcatcgaatttattcgcggtcgcacatccacactgcgcatctatattgatagtgaagatggcatcaacgttgatgattgtgctgatgtgagccaccaggtaagcgccgtcatggatgtcgaagacccgatcactgtcgcttacaacctggaagtctcttcgcctggtcttgaccgtccgatgttcaccgccgaacactatcaacgtttcaccggcgaagaagttgcgctggtgctgcgcatggcggttcagaaccgccgcaaatggcagggcattatcaaagcggtagacggtgagatgatcacggtaaccgtcgaaggcaaagatgaagtgttcgcgctgagtaacatccagaaggcgaacctggttccccacttttaacagtctggattgaggtgaaaggccccgatgaacaaagaaattttggctgttgttgaagccgtttccaacgaaaaagcgctgccgcgtgagaaaattttcgaagcgctggaaagcgcgctggcaacggccaccaagaaaaaatacgaacaagagatcgacgttcgcgttgaaatcgaccgcaagagcggcgatttcgataccttccgtcgttggctggttgtagaagaagtcacccagccgacgcgcgagatcacgctggaagcagcgcgtttcgaagatgaaagcatgaacgtcggcgactatgtcgaagatcagatcgaatctgttaccttcgaccgtatcaccacccagaccgctaagcaggttatcgtgcagaaagtccgcgaagccgagcgcgcgatggtggtcgatcagttccgcgagcacgaaggtgagatcatcaccggcgtggtgaaaaaagtgaaccgcgacaatatcacactggatctgggtaacaacgctgaagccgtgatcctgcgtgaagatatgctgccgcgtgaaaacttccgtccgggcgaccgcattcgcggcgtactgtacgctgtccgtccggaagcgcgtggcgcccagctgttcgtcacccgttccaaacctgagatgctgatcgaactgttccgcatcgaagtgccggaaatcggtgaagaagtgctggagatcaaagcggcggctcgcgatccgggctctcgtgccaaaatcgcggtgaaaaccaacgacaagcgcatcgacccggttggcgcttgcgtcggtatgcgcggtgcgcgtgtgcaggccgtgtcgactgagctgggtggtgaacgcatcgatatcgtcctgtgggatgataacccggcgcagttcgtgattaacgctatggcgccggcagacgtcgcgtccatcgtggtggatgaagataaacacaccatggatatcgcggtagaagcgggcaacctggcgcaggcgatcggccgtaacggtcagaacgtccgcctggcttcacagctcagcggctgggaactcaacgtcatgaccgttgacgatctgcaggctaagcaccaggcggaagcgcatgccgctatcgataccttcaccaaatatcttgatattgatgaagatttcgcgacagtgctggttgaagaaggcttctcctcgctggaagagctggcctatgtgccgatgaaagaactgctggaaatcgacggtctggatgaagccaccgttgaagcacttcgtgagcgtgcgaaaaacgcactgactacgctggcgctggctcaggaagaaagcctgggagataacaaacctgccgatgatctgttgaatctcgaaggtctggatcgtgccctggcattcaaactggctgcccgtggtgtttgtacgctggaagatctcgccgagcagggcgttgatgacctggctgatatcgaagggatgaccgacgagaaagctggcgagctcatcatggccgctcgcaacatttgttggttcggcgacgaagcgtaataaactgtagcaggaaggaacagcatgacagatgtgactattaaagcgctggcctcagagattcagacctctgtggatcgcctgatacagcaatttgctgacgcaggcatccgcaaatcggctgatgattctgtgacctcgcaagagaaacaaactttgttgacgcacctgaaccgtgaacacggctcggcgccagacaagctgacgttacagcgtaagacgcgcagtacgttaaatattccaggtaccggtggaaagagtaaatcggtacaaatcgaagtccgcaagaaacgcacctttgtgaaacgcgatccgcaagaggctgaacgcctggccgcggaagagcaggcgcagcgtgaagcggaagagcaggcccgtcgtgaagctgaagaagcagcgaaacgcgaggcgcaattaaaagctgaacgtgaggccgcagaacaagctaaacgtgaagtcgctgataaagcgaaacgtgaagctgcggaaaaagacaaagtgagcaatcaacataccgacgaaatgaccaaaaccgcccaggctgaaaagatccgtcgcgagaacgaagccgcggaattgaagcgcaaatcggaagaagaagcacgccgcaaacttgaagaagaagcgcgccgtgtagcggaagaagcacgccgtatggctgaagaaaacgaaaaaaattggtctgaaacctcagacagcccggaagatagcagcgactatcacgtcaccacatcacagcatgctcgtcaggctgaagatgataacgatcgtgaagtcgaaggcggtcgcggccgtagccgtagcagcaaagcggctcgtccggcgaagaaaggcaacaaacacgctgaatcgaaagctgatcgtgaagaagcccgcgcggccgtgcgcggcggtaaaggcggtaagcaccgtaaaggttccgctctgcagcagggcttccagaagccagcgcaggccgttaaccgtgacgtcgtaatcggcgaaaccatcaccgttggcgaactggctaacaagatggcggtgaaaggttctcaggtcatcaaagcgatgatgaagctgggcgccatggcgaccatcaaccaggtcatcgaccaggaaaccgcacagctggttgccgaagagatgggccacaaagttatcctgcgtcgtgaaaacgaactggaagaagccgtaatgagcgaccgtgacaccggcgcggcggctgaaccgcgcgcaccggtcgtgaccattatgggtcacgttgaccacggtaaaacctcgctgctggactacattcgttctaccaaggttgcctccggcgaagcgggtggtattacccagcacatcggtgcttaccacgtcgaaaccgacaacggcatgatcaccttcctggataccccgggccacgccgcgtttacctccatgcgtgctcgtggcgcgcaggcgacggatatcgtggttctggtggtggcggcagacgacggcgtgatgccgcagactatcgaagctatccagcacgctaaagcggcgcaggtaccggtggtagtggcggtgaacaagatcgataagccagaagccgatccggatcgcgtgaagaacgaactgtcccagtacggcatcctgccggaagagtggggcggcgagagccagttcgtccacgtttccgcgaaagcgggtaccggcatcgacgacctgctggacgcgatcctgctgcaggctgaagttcttgagctgaaagcggtccgcaacggtatggcgagcggcgcggtcatcgaatccttccttgataaaggtcgtggtccggtagctaccgttctggttcgcgaaggtactctgcacaagggcgacattgttctgtgcggcttcgaatatggccgtgtgcgcgcgatgcgtgacgaactgggtcgcgaagtgctggaagcgggtccgtccattccggtggaaatcctcggcctgtccggtgtgccggctgccggtgatgaagtgaccgtagtgcgtgacgagaaaaaagcgcgtgaagtggcgctgtatcgtcagggcaaattccgtgaagttaagctggcgcgtcagcagaaatctaaactggaaaacatgttcgctaacatgaccgaaggcgaagttcacgaagtgaacatcgtactgaaagcggacgtacagggttctgtcgaagcgatttccgattccttactgaaactgtctaccgacgaagtgaaagtgaagatcatcggttccggcgtaggtggtatcaccgaaaccgacgctaccctggcagcagcatccaacgcgattctggttggcttcaacgttcgtgccgatgcctctgcgcgtaaagttatcgaagcggaaagcctggatctgcgttactactccgtcatctataacctgatcgacgaagtgaaagcggcgatgagcggcatgctgtctccggaactgaaacagcagatcatcggtctggctgaagtgcgtgatgtcttcaaatcgccgaaattcggcgccatcgcgggctgtatggttactgaagggacgatcaaacgtcacaacccaatccgcgttctgcgtgacaacgtggttatctatgaaggcgagctggaatccctgcgccgcttcaaagatgacgttaacgaagtccgtaacggcatggaatgtggtatcggcgtgaagaactacaacgacgttcgcgttggcgatatgatcgaagtgttcgaaatcatcgaaatccagcgtagcatcgattaatcatttgatggctaagcagccggggaagcgaagcgccacccggcaatcattttaaaaaggggcttttggccccttttttgtctttattctggagaacttattatggcgaaagaatttggtcgcccgcagcgtgtggcccaggagatgcaaaaagagattgccatcatcctgcagcgtgaaattaaagatccgcgtctgggcatgatgaccaccgtttccggtgtggaaatgtcccgtgacctggcctatgccaaggtgtatgtcaccttccttaacgacaaagatgaagccgcggtgaaagcgggcatcaaagcgctgcaggaagcttctggctttatccgctctctgctggggaaagcgatgcgtctgcgcatcgtaccggaactgactttcttctacgacaactcactggtggaagggatgcgtatgtccaacctggtcaccagcgtggtgaaacacgacgatgagcgtcgtgtgaacccggacgacagcaaggaggactgatgagtcgtcctcgtcgtcgcggccgcgacgtgcatggcgtattgttgctggacaagcctcagggcgcctccagtaacgatgtgctgcaaaaagtaaaacgtatttataacgccaaccgcgccgggcataccggcgcgctggatccgctggcgaccggtatgctgccgatctgccttggcgaagcgaccaagttttcccagtatctgctggactccgataagcgttaccgcgtgatcgccaaacttggccagcgcacggatacctccgatgccgacggtcaggtggtggaagagcgcccgctgacttttagcgacgaacagctggcggcggcgctggacagcttccgcggcgagacgcagcaggtgccgtcgatgtattcggcgctgaaatatcagggcaagaagctatacgaatatgctcgccagggtattgaagttccgcgggaagcccggccgataaccgtctatgagctgctgtttattcgccgcgaaggcgatgagctggagctggagatccactgctcgaaaggcacctacatccggacgattatcgatgatttaggtgagaagctcggctgcggcgcgcacgtgattttcctgcgtcgcctggcggtaagcaaatacccggtcgagcggatggtgaccctcgagcagctgcaggcgctggtcgatgaggcggcggcgcaggatattcctgccgctcagttgcttgatccactgctgatgccgatggacagcccggcctcggattacccgctggttaatattccagaaacctccgcagtctactttaagaacggcaacccggtacgtcagtcaggcgcgccgcttaacgggctggtgcgggtgatggagagcgagtccggcaagtttctcggcatgggcgaaattgacgatgaaggccgcgtggccccgcgtcgtctggtggtggaatacccggcgtaagcgcttttcttgcgataaaagcctgctacgagtagaatatcgccgcttaacgtccgctaacgtgttttaacattttcgggcgttgcatcaggggtcgctgaattagagatcggcaccctttctttcttttaatttttggagttataaaatgtctctaagcgttgaagctaaagcaaaaatcgtttctgagtttggtcgtggcgaaaacgacagcggttctaccgaagttcaggttgcactgctgaccgcacagatcaaccacctgcagggccactttgcagagcacaaaaaagatcaccacagccgtcgtggtctgctgcgcatggtttctcagcgtcgtaaactgctcgactacctgaaacgtaaagatgttgcccgttactctgcgctgattgagcgtctgggtctgcgtcgctaattctgcgagtttcagaaaaaggggcctgacggccccttttttcgaccgggcggcagcaattcattcaaaactcatgtattgttgctagtaatgatcttcatgcagaggttcgcgcggctaatgagaggcttcatccgcaggggcgggtaaaggttgtcattagtcgcgaggatgcagaagatcgggtcaatagacgctatgtcgtggatatggcgtgatttatagataaaaaggatagaattttgcttaatccgatcgttcgtaaattccagtacggccagcataccgtgaccctggaaaccggcatgatggcgcgccaggcaacggccgctgtgatggttagcatggatgacactgcggtattcgttaccgttgtgggtcagaaaaaagcgaagccaggccaggactttttcccgctgaccgttaactaccaggagcgtacctacgctgccggtaaaatcccgggtggtttcttccgtcgtgaaggccgtccaagcgaaggcgaaaccctgatcgcgcgtctgattgaccgcccggttcgcccgctgttcccggaaggcttcgttaacgaagttcaggttatcgccaccgtcgtttccgttaacccgcaggttaacccagacatcgtcgcgatgatcggtgcttccgctgcgctgtcgctgtctggtattccgttcaatggcccaatcggcgctgcgcgcgtgggttacatcaacgaccagtacgtactgaacccaacccaggaagaactgaagtccagcaaactggacctggtggttgccggtaccgaagcggccgtgctgatggtggaatccgaagcggaactgctgagcgaagaccagatgctgggcgcggtggtcttcggccacgagcagcagcagattgttattcagaacatcaacgacctggtgaaagaagccggtaaaccgcgttgggactggcagccggaagcggtcaacgaagcgctgaacgcgcgcgtggctgcgctggctgaatcccgtctgagcgatgcttaccgtatcaccgacaaacaagagcgttacgctcaggttgacgtgatcaaatctgaaaccatcgccacgctggttgctgaagatgaaaccctggacgctaacgagctgggtgaaatcctgcacgccatcgagaaaaacgtggttcgtagccgcgtactggccggcgagccgcgtatcgatggccgtgaaaaagatatgatccgtggtctggacgttcgtaccggcgttctgccgcgtactcacggttccgcgctgttcacccgtggcgaaacgcaggcgctggttaccgcgactctgggtaccgcacgcgatgcgcagaacatcgacgaactgatgggcgagcgcaccgactccttcctgttccactacaacttccctccgtactccgtaggcgaaactggcatggtggggtctccgaagcgtcgtgaaatcggtcacggtcgtctggcgaagcgcggcgtactggccgtgatgccgactattgaagaattcccgtacaccgtgcgcgtggtatcggaaatcaccgaatctaacggttcctcttccatggcttccgtctgcggcgcctctctggcgctgatggacgcgggcgtgccggtaaaagccgctgtggcgggtatcgcaatgggtctggtgaaagaaggcgacaacttcgtcgtgctgtctgacatcctcggtgacgaagaccacctcggcgatatggacttcaaagttgcgggttcccgcgacggtatctctgcgctgcagatggatatcaaaattgaaggtatcaccaaagaaatcatgcaggttgcattgaaccaggctaaaggtgcgcgtctgcacatcctgggcgtgatggagcaggcgattaacgcgccgcgcggcgatatctctgaattcgcaccgcgtatccacaccatcaagatcaacccggacaagatcaaagacgttatcggtaaaggcggttctgttatccgtgccctgaccgaagagaccggtactaccatcgagatcgaagatgacggtaccgtgaagatcgcagcgaccgacggcgacaaagcgcagcatgctatccgtcgtatcgaagagatcaccgctgagatcgaagttggccgcatctacaatggtaaagtgacccgtatcgttgactttggcgcattcgttgccatcggcggcggtaaagaaggtctggttcacatctcgcagatcgctgacaagcgcgttgagaaagtgactgactacctgcagatgggtcaggaagtaccggttaaggttctggaagttgaccgccagggccgtgtccgtctgagcattaaagaagcaactgaacagactccgtctgccgcagcgccggaagctccggctgccgagcagggcgagtaaggttgccgttagccctccgtttttgcggagggcgttttacgggcaggacgcctcgtttgcagccggggaacaggacgttcatccaatcgttgtcttcgggagtgggaaatgaagccttttttgcgctggtgtttcgtggcgacagctctcacgctggcaggatgcagtagcaccgcctggcgtaaggacgccgtcctcgcagtaccattgcaaccgactttacagcaagaagtgattctggcacgcatggaacaaattcttgccagtcgggctttatccgatgacgaacgcgcacagcttttatatgagcgcggagtgttgtatgatagtctcggtctgagggcactagcgcgaaatgatttttcacaagcgctggcaatccgacccgatatgccggaagtattcaattacttaggcatttacttaacgcaggcaggcaattttgatgctgcctatgaagcgtttgattctgtacttgagcttgatccaacttacaactacgcgcacttgaaccgcggtatcgccctgtattacggcggccgggctaagttagcgcaagatgatctgctggcgttttatcaagacgatcccaatgatcctttccgtagcctgtggctttatatcgccgagcgtaaactcgacgagaagcgggcgcttgaagcactcagagagcgcttaaacaagtcggataaagagcaatggggatggaacattgtcgagttctaccttggcgacattagcgaaaaagagctgatgactcgtctgaaggcagacgcaacggataacacctcgctcgctgagcatctcagtgaaaccaacttctatttaggtaagtactacctaagtctgggggacaaggacagcgctacggcactgttcaaactggcggtcgccaacaacgtacacaactacgttgagcaccgatacgcattgttggaattatcgctcttgggccaggagcaagatgacctggcagaatcggaccagcaatagctgacgaacacatcagcccatagttttttgcttgccatcaccttcgcgggtgagggcgttgttgttcgttaatacacctactttgagccggttcacacttttcaatgaaaattaccgtaaattttcacgatgagttatgtagactggccgccattaattttgaggcacacgtactacatggctgaattcgaaaccacttttgcagatctgggcctgaaggctcctatccttgaagcgctcaccgatctgggttacgaaaaaccatctccgatccaggctgagtgcattccgcatctgctggacggccgcgacgttctgggtatggcccagaccggtagcggtaaaaccgcagcattctctttaccgctgctgaacaacatcgatcctgagctgagagcaccgcagattctggtgctggcgccgacccgcgagctggcggtacaggttgctgaagcaatgacggaattctctaaacatatgcgcggcgtgaacgtggttgccctgtacggcggccagcgttatgacgtgcagctgcgcgccctgcgtcagggtccgcagatcgtcgtcggtaccccgggtcgtctgctggaccacctgaagcgcggcaccctggacctctccaaactgagcggcctggtactggatgaagcagatgaaatgctgcgcatgggctttatcgaagatgtagaaaccattatggcgcagatcccggaagggcatcagaccgcgctgttctccgccaccatgccggaagctatccgtcgcattacccgtcgctttatgaaagagccgcaggaagtgcgcattcagtccagcgtgacgactcgcccggatatcagccagagctactggactgcctacggcatgcgtaaaaacgaagcgctggtgcgtttcctggaagcggaagactttgatgcggcgattatcttcgtccgtaccaaaaacgcgaccctggaagtagctgaagcgctggagcgtaatggctacaacagcgcggcgctgaacggcgacatgaaccaggcgctgcgtgagcagactctggaacgcctgaaagatggtcgtctggatatcctgattgcgactgacgttgcggcccgtggcctggacgttgagcgtatcagcctggtggtgaactacgacatcccaatggattctgaatcctacgttcaccgtatcggccgtactggtcgtgccggtcgtgctggccgcgcgctgctgttcgttgagaaccgcgagcgtcgtctgctgcgcaacatcgaacgcactatgaagctgaccattcctgaagtggaactgcctaacgcggagctgctgagcaagcgtcgtctggaaaaattcgccgcgaaagttcagcagcagctggaaagcagcgatctggatcagtaccgtgcactgctggcgaaaatccagccgacggcggaaggtgaagagctggacgtggaaacgctggctgctgcgctgctgaagatggctcagggcgaacgttcgctgatcgttccgccggacgcgccgatgcgtccacgtcgtgaattccgcgatcgtgacgatcgtttcgaccgtcgtggcgaccgtaatgatcgcggcccgcgcggcgatcgcgaagatcgtccgaagcgtgagcgtcgtgacgtgggtgacatggagctgtatcgcattgaagtgggtcgcgatgacggcgttgaagtgcgtcatatcgttggcgcgatcgccaatgaaggcgatatcagcagccgttacatcggtaacatcaagctgttcgcttctcactccaccattgagctgccgaaagggatgccgggcgaagtgctgcagcactttactcgtacccgtatcctgaacaagccgatgaacatgcagctgctgggcgatgcgcagccgcgcaccgaacgtcgtggcggcggtgagcgtcgcgaaggcggccgtggcttcggcggcgagcgtcgtgaaggcggccgtggcttcggtggcgaacgtcgtgaaggcggtcgtggtgaaggacgtcgtttcagcggcgaacgtcgtgaaggccgtgcgccgcgtcgtgacgatgcatccgcgccgcgccgcgatgactcagccggtcgccgtcgcttcggtggcgatgcgtaatcaacgccgcccgctagcgtaaactaaataatacagccccgatcgtcatgattggggctttttttattccctttgtactcgtgtactggtacagtgcgtcatgctcaacgtgagcgaagtattttcgactggagaattcggtaaatggcgacactaaccactacggcaacccgtccgtctctgtttggcggcgtggtgattatcggcggcacgattatcggcgcgggcatgttctcgctgccggtggtgatgtccggcgcgtggtttttctggtcgctggcggcgctgatcttcacctggttctgcatgctgcactccggtttgatgatcctcgaggccaatcttaactaccgcatcggctccagcttcgacaccattaccaaagacctgctcggcaagggctggaacctggtgaacggtgtatcaatcgcctttgtgctctatatcctgacctacgcctatatttcggcgagcggttcgatcctccaccacaccttcagtgaactgtcgctgaaggtgccggcgcgcgcggcgggcttcggctttgcgctgctggtggcgtttatcgtctggatgagcaccaaagcggtgagccgcatgacggctatcgtactgggcgctaaggtgatcaccttcttcctgaccttcggtagcctgctcgggcacgtcgagccgacgacgctatttaacgttgcggagaagaatgcctcctatgcgccatacctgctgatgacgctcccgttctgcctggcctcgtttggctatcacggcaacgtgccgagcctgatgaaatactacggaaaagatccgcgcaccatcatccgctgcttaacctacggtacgctgctggcgctgggtctgtacgtggtctggctgctggtgacgatgggtaacatccctcgtccgcagtttatcgacattgcgcagaagggcggcaacattgatgtgctggtgcaggcgttgagcggcgtgctgaatagtcggagtctggatctgctgctggtggtgttctcgaactttgccgtcgccagttcattcctcggcgtgacgctggggctgttcgactacctggcggatctgtttggctttgacgatagcgcgatgggacgctttaaaaccgcgctgctgacctttatcccgccgatgattggcggactggtcaaacccgatggtttcctctacgccatcggctatgctggcctggcggcgacgatctgggcggcgattgtaccggcgctgctggctcgcgcctcacgcaaacgcttcggcagcccacagttccgcgtctggggcggaacgccaatgattgtgctgatcctgctctttggcctcggcaatgcggttgtacatatcctgtcgagcgtcaatctgctgccggtttatcagtaaagctattgcccggtggcgcgacgtccaccgggctgacgtgtgtgttaccccaacagctcctctttcacctgcatcgctaaatcgaaagaatgcagacgcgcctggtggtcgaagatctggccattgaccatgatttcgtccgcctcggtttcacgcagaatcgactctagcccatggcggactttagttttatcgccgaccagcgacatgctcagtgcctgctgcacaccatactgctcggatgctgaccacagctgatgcatattttccaccggcggcggcaactgcccggtctcgccgcgacgcagcttcacaaacgcctgctgcatggaggtgaagagaaactccgcatcgcggttgctgtcggcggcgatgatattgatacacaccatcgcgtacggtttttccagccgcgccgaaggtttgaaattgctgcgatacagatgtagggcctggaacaacatatccggcgcgaagtgcgaggcgaaggcaaacggcaggccgagctgcgccgccagttgcgcgctatagaggcttgagcccagcagccatactggaatgcgctccccgtagccgggaaccgggcgcacgtgcgggttcggatcgcgggcgtcaaaccagtccaccagttccgctacatcgcgcgggaaattatcgacatcgccgctcatatggcgacgcagggcgcgcatggtcggctgatcgctgcccggcgcgcggccaaggccgaggtcgatccgcccggggtaaagggtgttcagggtgccgaactgctcagctatcaccagtggagagtggttaggcagcatcacgccgccggacccgagatgcagggtggtggtgttggcggcgagatagccaatcagcaccgaggtcgctgcgctggcaatgccgaccatattatggtgctccgccagccagtagcgatgatagccgcgcgattcggccagccgggcgagatccagagagtgggtaaaggcttctttggcagaagatccttgcgggatcggcgccagatcgagcaccgagaatggaacagatttgtcagtcataaaggctcactttgctacagcatcgtcatcagattgaaggtcttcttccagcctggcgcatcctggacgcgccagccagaaaagctgcatctttaataatgcattaaaatctgagcactgttgttaacaaagtgagcggtttatcaggcctgaagcaccagtcctggcaatcgtttccagtagccgttgcaatcgctattgctggtgagatccagcggcgcagcgccgttttcgttggcgcggaaggcctcgagcatggcgaaggtctcgttgcccatcggcgacaggcgcaccatatccaccaggccgtgcatggaggtcagctcattgcccaggttatagacgtagccgctcatggtctgaataccattgagcacgaacacctgctggttctcctgcgacagcatgctgcgcccggtagggtacttgatgcagcaggtttcgcactcgtcctttggccggtcttccgagcgggcggtaaagcagcgcgcggaataagccagcggcagatggccgtagctcagcacttcgacttcaaactggttgcggatacccagctcttcgcactgggtcagtaaattagccagccagtcgcgggagagttccaccggcatgcaccagcgcaccatgccctgtttccgcagcaggcgcagggtaacggcgttgtagcagttcagcgcatgcccggcgacgaacggtagcttgcgttcggcgcagagatttaccacgcccaaatcactggcctcaatcagaaattcgccgttatcgacatagcgcttcagctcgcccagttcagaagaggcctgcaccagcgcgagagtggagagcaccacctgcttgccgctagcggccagcgttttcgccatttcgatccagtcgccaactttggtggcgcggcgtttgctgcataccgcttcgccgagataaatggtgtcggcgctgcagtttgccgcctgctggtaaaaatcttccagcgtctcttttggccagtagtacagcaccggccctaatgaatatttcatgtttctcactgccatttacggtgataagcgccaagggtagtttgtgtcccctcggacatggcgcccagggtctccatccaggcggactgcggtacgaaattctgcggatcggctttgcagcgatcgatcgcctggcgccagactttcgccacctgggtcacgtaagccgggctgcgctgacggccttcgattttcaccgaggcgatattggcggccatcaattccggcaacagttccagagtgttgaggctggtgggctcctccagcgcgtgatagcgctcgccatcaaccaggtagcggcctttgcacagcgtcggataaccggcattttcgccatcctgataacggtcaatcagcacttcattgagacgcgattccagcccctgcggcgtttgctgccagcgtacgaagcgggcaggcgaacaggcgccgacggtgttgggcgattcgccggtcaggtaggaagagagatagcagcggccttccgccatgatgcacaggctgccgaaggcgaagacttccagcggcaccggcgtggcgcgggccaactgtttcacctgatgaatagacaacacgcgcggcagtacgacgcgcgcgacgtcgaagttgcgatgatagaagcgaatggcctcttcattggtggcggaagcctgcaccgaaacgtgacgctcaatgtgtgggtaacgctccgcagcgtactccagcatggcgatatcggccagaatgagcgcatcggcgcccaattgagcggccatatccactgctcgctgccagcgggcgtagccgtcgggatgagcgaaggtattgatggcgatatgcagcttacgacggtgctgatgcacaaagctgacggcttcctgcagtttcttttcggtgaaattaaggccggcaaagtggcgggcgttggtgtcatctttcagcccgatatagacggcatcggcgccgttttcgatggccgccttaagcgccggaaggttaccggctgggcagagcagctccataatttttcctgaaaaatgcggcccgtcagggacgctgaatggttaacgagcagggattttagttaaccttctggtgacaatttttgatttgaggcagttaaaagtgtattggcggcgccaataactggcggccgtcatcgcgtttttgttgatttacgccgctatgttgtttatgtgatatggcacaatagcggaactattgcattcatggagtaaagcttgtgttggataaactgcgttcccggctggtccactttggcccgtctttaatgagcgtgccggttaagctggcgccttttgccctcaagcgccaggtgctggagcaagtgctgagctggcagtttcgccaggctctggcggagggggagctggagtttcttgaggggcgttggttaagtattcatgtgcgtgacatcggtctgctgtggtatacctcggtagtcgatggtcgactggtggtcagccagcaggccgacgccgacgtcagcttcagcgccgacgccagcgatctgttaatgatcgccgcgcgcaagcaggatccggatacgctattcttccagcgtcgtctggtcattgaaggcgatacggagctggggctgtatgtaaaaaatttgatggacgccattgagctcgagcagatgccaaaagcgctgcgcgtgatgttgctgcaactggcggattttgtcgaagctggactgaagagcccgcagaaacctgaacagacatcggtaggtgaggcatgctgattcgagtggagattgggattgatgcaccgggaatcgacgcgctgctgcgtcgtaccttcggccgcgatgccgaagcgcagctggtgcacgatctgcgtgaagatggactgatcacgctgggggtagtggcgacggatgatgaaggccaggtgatcggctacgttgccttcagcccggtggcggtggaaggtgaagagctgcagtgggtcggcctggcgccgctggcggtagatgaacgctaccgcggacagggcattggtcggcagctggtttatgaagggctggactcgctgaatgagtttggctacgccgcggtggtgacgctgggcgacccggatttataccgtcgcttcggctttgaatcggccgcgcgcttcgatctccgctgccgctggccggacagcgccgaggcgttccaggttcaccgtctggcggatgacgccctcgacggcgtccatggccaggtagaatacagcgagcactttaatcgtctttaagccttgccagcagggtttcgaaggcatcctctccggcaacgaggcgctctttttcgcgcttcgttagctgcttgacgcgatattccagtcgcaatgcaagtgagtgttcaccaacttcgtggctaaaggccagctgcaggtcgcctttgccgcgcaacgcctttgcgccttttcccgcctgatgctggcgaaagcggcgtggcacgtcggtggtgatgccggtataaaggcgattatccgcggttcgaatgagatacagaaaccagcacacggtcacaaagtcactatggtaaggtgtgtgcaccatagcataatggagaagaaagatggatacgcttgccgccattggtcgctggctgagtaaacagcacgtcgtcacctggtgcgtctcccgtgaagacgagctgtggtgcgcgaatgccttttacgtctatgacccggataccgtggccttttatctgctcagcgaggagcacacccgccatggccagatgaccggacagagggcgaaggtggccggcacggtcaacggccagccaaaaaccgtggctctgatccgcggcgtgcagttcaaaggcgagatccgtcgtctgagcggtgacgaagaggcgcgaatgcgccagcgctacgtcaagcgcttcccggtggcccgcatgctgtcggcgccggtatgggagattcgtccggacgaaatcaaatttaccgacaacacgctgggtttcgggaagaaattacactggcggcgtgatgccggcgccgagcaggcgtagcgcttcgcgattgaaggccggcagatcgtccggcgttctgctggtgaccagctgttcgttatcgaccaccacctcctggtcgtaaaactcgcccccggcgtttttcacatccaccacaatcggtttcaccgccgtgagcttacgtccgcggatcacatcggcgctgatcagcagctgcgggccgtggcagatggcaaacaccggcttaccgccgttgacaaaatcgcgggtaaaggtgacgaagcgttcatcaccacgcagctggtcgggagagtagcccccgggcagcaataaggcatcaaattcacccggtgtgacgtcatcgatggctctgtcgatggcgacctcggcttctccctgcttacccttcaccgttttgccagcctgcttttcgatcgtgatgacctgatgcccggcgagcttaaaggcttcggcgggagaggtaaattcagaatcttcaaagtcgtcggtaatgaggacggctatctttttactcatgcttcctccactgtctggatggtcaatgaggtaattccatgatgatggtggatacttaccttgtaaggtattaagcctggaacatgagcccgaaagtgcaaggcggagaattctgtaaaggagaaccaatgagtcaggtattattaaccggcgcgaccgggttagttggcggtcacttactccggctgctgcagaatgagccccgtataagcaccatcgccgcgccgacgcgtcgcccgctggcgccagcgaaaggtgtttttaatcctcacgatccccagctgaccgatgccctggcgcaggtggttgacccggtggatatcgtcttctgttgcctgggaacgacgcgccgggaggccgggagcaaagaggccttcgtccatgctgactacacgctggtggttgataccgcgctgaccggcaaacgactgggtgcgcaacatatgctggtggttagcgcgatgggcgccaacgcccactcgccgtttttctacaatcgggtgaagggggaaatggaggcggcgctgattgagcaagactggccgcggctgaccatcgccaggccgtcgatgctgtcaggcgagcgggaaaaaaagcgggccaatgagaccttcctcgcaccattgttccggctcttgccggggaactggaaatccattgcggcccgcgatgtggcgatcgccctgctggcggaggcgctgtcgcccacccacgaaggggtgcgaattctgacatcatcggaactacgggagcgcgccgcgcggcaggctgaatagcggtttgcaaacgcaggcttccggcgtagtattcacggcttcaattcatatccacatttcttgctggggaatgctatggctggtcagtcttcatctcaggcggcgtcaccatttcaatggtggaaacccgcgcttttctttctcgtcgtgattgttggtctgtggtacgtcaaatggcagccgtactacgggaaagccttcaccgctgcggaaacccacagtatcggtaaatctattctcgcccaggccgacgctaacccgctgatggcggcgtgggactatgcgatggtttacttccttgccgtctggaaagcggcggtgctcggcgtgctgctcgggtcgttgattcaggtactcattccgcgcgactggctgctacgcaccctgggacaatcgcggtttcagggcacgctgctgggagcgattttctcgctgccgggcatgatgtgcacctgctgcgccgcgccggtcgcggccgggatgcgcaaacagcaggtgtcgatgggcggggcgctggcgttctggatggggaacccgctgctcaacccggcgacgctggtgtttatgggctttgttctgggctggcagtttgcgctggttcgcctggtggcgggcctggcgacagtattaactgtggcgacgctggtgcagaaatgggtgaaagaggcggcgacgcagccggtagcggtgcctgctgcaccgtcggaagcgactcagggcggcttctttagccgctggctgcgggcgctgtggacgctgttctggaacacgatcccggtttatatcctcgcggtgctggtgctgggagcggcgcgcgtctggctgttcccgcacgccgatggcgtggtggataatacgttgttctgggttatcgcgatggcgatcgccggctgcctgtttgtgatccctaccgcggcggaaattccgattgtgcagacaatgatgctggcgggtatggggacggcgcccgcgctggcgctgctcatcactctgccggcagtgagcgtgccgtcgctgattatgctgcgtaaagccttcccggccaaagcgctgtggctgacgggcggactggtggcgctgtgcggggcgattgtcggtgcgctggcgctggtgtagtttgccgtaaacgtacgcatagccggattggatgccgggtggcggctacgccttacccggcacacaacgtacagggggcggtagcccggctaagcgcagcgccagccgggaaactgcagctttatttaatgtaggtaaaggcggtggtcacccgggatacgccgcttacccggctggcaatatccgccgccgcccggccttcgcggtcggtcaccagccccatcaggaagacttcgctgttttccgtggttactttcacgttcgaggatttgacctgatcggtgctcaggagctgcgaacgcaccttggtggtaatccaggtatcagacgaggcggtgcctaaaccaatcggctggccctggcgcacttcattaaacacttccgtggtcccttccacgcccatggcgatttgcttggcgcgcgcggagaggtccggcgtcggcgactggccggtcagcaggactttgccctgataagcggtgacgttgatacgggcctgtttcttaatctgttcatctttcgacaaggcgctattgacgcgcagttccagggtactgtcatcgacctgggttcccaccgtacgcgggtccgttgcggctttggtgccgactgctgccgttccgactaccgcggcggcaacgcagccctgcagcagtagtgcagaaagcaggatggcgaggggcgagagagccttcatgtgttctccttaatcgtcctggtgtggaaaaagagtgttatctatcaaatcgcacagacagttgacggtcagcatgtgcatctcctggatacgcgcgctgcgatgggaggggatgcggatttcgacatcctgttgacctaacaggcccgccagctcaccgccgtcatagccggttaacgcgacgatggtcatgtcgcgggtcacggcggcttccaccgccttgacgatgtcccgactatttccgcgcgtagagatcgccagcagcacatcgccggcgtgtcccagggcgcgcacctgcttggcgtagatctcgtcatgcaagcgatcgttagcgatggcggttaagaccacattatcggtatttagtgcaatggcaggtaaaccagggcgttccgtttcaaagcgattaatcatgctggcagcaaaatgctgtgcgttggcggcggaggtgccattaccacaacagaggattttgttgccgttaagcagggactggacgagcgtcatcgccgcccgggagatggcgtccgggagtgcttccgctgcggcaatttgggtttgaatgctttcggtaaagcaggctttgattctgtcgagcacgggatcccttacttctggtattacgctattcgccaaaggcgttttttagccattggatgtcgtttccggtgaaggctaccacatcgaaacggcaatccacagtctcaaagctcccattctgtcggcagagccacaaacgggcggctttaagcagtcgttgttgtttttgcggagtgacgctggctgccgcatcaccgtaccgggcgctacggcggtagcgcacttcgataaaaacggtgaccgtgccgtcgcgcatgataaggtcaatttcgccgccacgctcgcgggcattggcggcgataaaacgcaggccctggccttccagccagcggcgcgcctggttttcccaggcatcgccggtctgtttgcttagctggccggaacgatttttccctgctggtacttgagccatgacagtttcctgttaatcacgcaatcctggttggccgtcagatcgccggtattgccgttcagctcgaagccaggcgtctggcgcatttgcgtgaagtgatttgccagtgaccaggcgtcagcgcccatggcatacagacgcgccagcgagtagtcattacgcaccgcggacagcgcctgctgcattagcgacggattgctgccggccagcattgggatctcactatactgcaagccttccatctccagacggaaatccggccccgcggtgccctgggcgctgcgcgagctggcgtacagggtgacattgctctggctgccgttgcgcatggcgatcatcggtttgatataggcaatctgttccggggtggcgaggatataggccgcatcgacgctgccgccgctgcttaccggcatctcatccgcactgccgaggatgctgttctgcgctgatggcagggtggagaccggggtgccgctcagcgcaatgcccccgccgccgttcacgccggcgcgcagctcggccgtggatccaaaacgctgctgcaggacgctggcgccgcccagcttcagccactcgtcggcaaaagcgctaaccacacgatcgcccagcgcgccgcgcggaaccagcagcagcggggtctgtttcccctgttggtggatatgtcgggcggcgtcacgcgcttcgtcttccggagaaagcgcgaaatagcagaggttagcgcggctttcgactttttccggctggttgagggccagcacattgagcggcgtgttgctcttgataacctcttcaacgttttctttcagcaacggcccaaccaccagggtggcgccatcctgctgcgcctgggcgagcagctggcttatcggctggctggtggtgtcgtaaattttcagttccgcagaagggttagcggcggttgcgaccacgggctgcggctgtgcggccggcgcggtaaccggctgggtggccggggaagcggtagtctgcggcgtggtggatgttgccggcgcctgggctgccggttccgcagcaggcgctgcctggtcctgcgtcggggcctgaaccggatccgcgcggcttccggtggcggtaagatcgctgatttctgcctgcgacggactcaccacatcatcattaccggagacattcgccgcctgggcgacctgggcgggaaccgcgctgcccgtcaccgacggcgcgccgtttttggcggcttcaaagccctgctggattgtgcggccgaagatcgacgcctgaccgtttagcggcagaaaaagcgcaatcttgttgatggacgcaggcttatagttttgcatattcacaagcgccgtcggcagcattttagcgcccgggttttgcggatagcgcgtctgccagtctttaacgcccgctttcagtagcgtcggatcgttgcggttgtcaaaccacatccgctgcagatccagccagccctggaggatattttcatcggcgttgatcaccagcgcattggcctggtcctggggcatcgaggtgagtgcttgccaggtcgcatcaatatttttctgacgctgtttggcgtcactcagcagcggctgctgggcgattaaggcgcgcagcagggtcagcgatggtttgccctggctggcatcgatttgcgcctgccagtagcgcgcctgttgaggctgctcaaggcttgtcggatcgatcttagccagcagattacgggcggcctgataatcgttctgcgccagcttcacttccaccgccagcagcgactgttcacgggcctgagtgctgttcaggttcgccggcagctggttaaacaggtcgatagcctgctgcttcttcccttcctgcagtagtgcacgaatggcgagtaattgccagttggtcttgctatcattcgtgctttgctgcatctgctgtaagtagaaactggagttggcctgcgacgtaccctgcataaacgccgcgctttgatcctgcgtgtgggtgccgcagccagcaaaaataagagtcgccagcaatacgggcaggcagcgcgcgggcttagaacgaagaaatgttgacggtaccataagtgtccagtgatatttttttggctcaatgctcaatattaaatcggcaatacggacgagacaatgaaacaacacgaatcagcggataattctcaggggcagctctatattgtgcccactccgataggaaatctgtctgatatcacgcagcgtgcactggaagtgctgcaagccgttgatttaattgcagcggaagatacccgtcataccggtttgctgctgcaacattttgcgataaacgcccgtttgtttgcgcttcacgaccataatgagcagcaaaaggcggaaaccctgcttgccaaactgaaagaagggcaaaacatcgcgctggtttccgatgccggcacgccgctgattaacgatcctggttaccatctggtgcgcacctgccgcgaagcgaatattcgcgtggtgccgctgccgggcccctgtgcggctatcgccgccctgagcgccgccggcctgccttccgaccgtttctgttatgaaggcttcctgccggcgaaatcgaaaggccgccgcgataccctgaaagcgctggaagaagagccgcgcacccttattttctatgagtcgacccaccgtctggtggagagtctggaggatatctgcgcggtactgggagaatcccgctatgtggtgctggctcgtgagctgaccaaaacctgggagtcgatccatggcgcgccgattggtgagctggtggcgtgggtgaaggaagatgaaaaccgtcgcaaaggcgagatggtgctgatcgtcgaaggtttcaaggctcaggaagaggcgctgccggcggccgcgctgcgtactctggcgctgctgcaggcggagctgccgctgaagaaagccgccgcgctggccgcggaaatccacggcgtgaagaaaaatgcgttgtataagtacgccctggagcagcagggggagtaaacgatgagccgttaccaaccgccgtttagcatcacaccctcggtcctcaaccttgtcgttgagattggggaattgcttgggcattggtcggcgaaacgtggacaagcatcgccgttgctgcgtaaagaaaaccgcattcgtactattcaggcgtcactcgcgattgaacataatagcctgagcatggaacaggtaacggcgctgctggaaggcaaacgggttctggcgccggctaaggatattcaggaagtgagaaatgccattcgtgcttatgaattaatgcccggatggcatgcggcaaacattagcgatcttctgacggcgcataaaacgctgatgaccgggctggttgatcgtccaggcgctttacgtggcggaaacgtcggcatttatcgcggtacgcaggtgatacatatggctccgcctgctgcccaggtcccaagattgatcgctgatttactcagttggctggaacacaccgagctacatcctttaattgccagttcagtttttcactacgagtttgagttcattcaccctttcgctgatggcaatggtcggatggggcgtttatggcagacgttgattctaagccagtggcgtcaggaattggcctggctgccggttgaaacgctgatccaccatcagcaagaacgttattacgacattttaggtgcttgtgataaaaccagtgattgcacgctattcgtgacctggatgttgcaaaatatcctggcggcgctgaaagaaggtctggaaacttcattcatcgtgtcggaagaaatgtcggaagaaatgtcggaagaaatgtcggaagaaatcgacgtcaaattagccccaccggaaaacgcaattttgcgtttgctaaccgaaaagccggaattaacggcgagagcgctggcggagatcttggggatatcagcacgtacggttgagcgtcatctgcaagggctacaggcgaaagggagattgattcgcataggcgccaaaaaaggtggaagctggctggttaagtagaaccagccgccatgatgttccactcagcgtgcaattacactatcttcagttccacctttttgctgcttaacgctgcacggtcattttcactaatgccgtcgtcggtgatcacgcagtctatcttttccatcggcagtacctggttaaagccccggcgattgaatttgctggcgtcgagcacggcgatcacctgatgcgcggcggcggccatcacgctgctgatggagtagccttcgttaaaggtggtgatgccattggtggcgtcgataccgtcggcgccgacaaacatcaaatcggcgcaaataccttgcagcgaacgttcggcaatcgtgccgtgcatcgaatgcgttttgtgccgcacggtaccgccgcacaccaccagggtgatatctttattttctgccagagtaaacgcggcgggcaggctgttggtgatgacggtgatattggtcatccgtactaatgcttcggcgataagaagagtggtgctaccgctatcgaggatcaccgtcataccttcacggatcatcgctgccgcggcatgggcgatgcgctttttgggatcgctggcaagctgatagcggtcttcaagcaccacttcctgattctcggcgtcggtcaggtcgctacccgcacgggcggcgccgccgtgaaaacgggttaacagtcctttttcttccagtaagcggagatcggcgcggatcgttacctcagagatgccaaagagattcgaaaggtctagaaccaatacgctaccctgcgtattcaccatatcgacaattttgttccttcgttcaaatgagttcatcttgatttgcctgataattaactcatctcagtgtaatcgaagggtaacgaaaggtgaacgataattttcgaaaggttggatgagccagcgctgatggctggctcgggcggtcaagagagtttgagcaggattttgccttgcattggcgcgccgttgagcgcctgcactgcacgagcgaagctttctgcgtcgccacgatgggcgatcagcggcgccagctgcaggcgtttttcagtcagcagacgggtggccgtttgccactcttctcccggccacgggccagagtagttcatccagctacccacaatattcaactccttacgcagaatctgcccgaaggtggctgccgggagggttaaatcgtgatgaagcgtgccaaccagcgccagctgcgcccgcggaccggcggcctcaatcgccagcgcgacggtctgcggcgtaccggcggtctcgaggactaactggtcgaactgaatggattccagcgcctgctgaatcgcctggccgctcatctcgcgactgttgaacacatgggttgcgccgagggttttggccagctccagcttctgcggattgatatcgatcgccgtgacgctgttggcgcccagttcgcgggcgcactgtagcgccagcaggccgatggtgccggcgccgataataatcacgtttttaccttcacagccctgcgccagatgaaaagcgtgcaggccaacggttatcggttctataaacgcgccatcatcaattggcatctggtccggcaggcggaacaggttggcgcgctttaccaccacatattcggcgttgccgccttcgctgcgtgagccgacgaactgatactgtttacataaagagaaatactcgcgctggcattgcgggcactggaagcagggcagcagcggcacgcaggcgacggcatcgccgggctgcaggtcggttaccgccgcgccgtaggattccacataaccgctgaattcgtgccccagcgtaatagggtagtaatgcgcccctttggcgaaaatgcgcgggatatcggagccgcataacccggaactgaccactttgaccaggacatcgttttccgtttgcagcgtggggatagggcgttcttcaacgcagacgttcccctcagcatggattaccactgatttcataacattctccagctataagattcaggggagcgaacgctccccttttagatcaagacatgcctgtactttgttgcggggcagcgcttttttctgctttttccgcggcgatgaagccgcgagcgcgacgccaggtcagtaaaacgccggccagatagatgatgccgatgaccgcgaagccaaccacattttgccaggtaaagagctggatcagcagccaggtaatcggcgaaccaccctggtccattgaggccaccatgccgccggctttcagggtcccggcgtttgccgccagctgggtgtgcaggccaatggtctgggtggcgatccacagggtgattcccataatgatgaccccggaaatcaacgtgcggaacagattgccctgatgtacagccactgccatcgctacgaagaagccgatggtggccaggtcaccaaatggcagaacctggttgccagggaccacgacggcgataagaatggtcagcgggatgaaaatcaggctggccgagactaccgaggtatgaccgagcagcagcgccggatcgagaccaatcaggaattcctggccgccgaatttagcctgcagacgtttacgcgcctgtttggctatcggggtgaggccatccataatcggtttgatcacccggggcatcagcagcatcaccgctgcggttttcaccgccagctgaagaatgcccttcaggtcgtaacccgccagcgcgccaatcaccagccccatgacgaagccaacggtaaccggttcaccgaaggggccgaagcgtttctgaatgtcatcggcgctaaagtgaatacggttaagaccggggatcttgtcgatgatggtatccacgaggacggcaactggccctaaatacgccgaactgccgtgcgggatcgcaataccctcgaggccgaagaaatcgcgggtatctttggcaaaccaatcgcccagcttatacacaaaagcagcatgcaccaccacgccgagaatacctatccagtacgacccggtcgcgatatgcagcattgcgccggtaaaggtcatatgccagatgttccagatatcaacattcaccacgcgggtcatacgggtaaccagcatcacgatattgaccgcgatggccaccgggatcgccaccagggcgatttgcgacgcccaggtcatcggtgatgaacccggccaaccgatatcgatcacgtgaagattaatctggaaatgctccgccatcgcctttgccgccgggccgatggagtcgagcatcaggccaatgaccaacccgatgccgacaaacccgatcccgatatgtagaccggatttaaaacaatccccgagcttcatccccagtaatttggagaagataatgatcacgatcggcagcatcaccgtcggaccgagatcgaggatataacgcatgatttcgctaaacatggcgtttactccgcgaggatgccgaggattttctgttgtaaggcttcaatgccgacgcccgagacgaatggcatgccgtgcaccaccggaatgtcgccgaaggtccgctccacgcgcgcagtggtgcagatcaggtccgccccgtccatgtaggtttcgatttcattgacccggcactgcaccaaatccagttcaatattgtggtctgcacacagctctttaatctcttctgccgccatcgtggaggtggcgacggcaccgccgcaggcgacgataactttacgtttcatagggtaccccttttattatcagtatcttatgaagccacggcgctaagctcgggctcaaggattaattgctggaaccgcaccggcagccgatcgtcggaagcggcgagcagtgcctccagcgtgtgcggattttgtagctcactaaataaccggcgcagcagcttcagctgtgccgccgggttttcaacaatcagcgcgatgatgagcgaaacgtcgatttcgccgtcgtcgtcagcgcgctgaaaagagaccggcatgtccggacgtatcaggtaaatggccggtgatttcgcgtggatcgcttcgcagtgcgggatagcgacagcatgcttctccagggcgatgccggtgggaaaagtcgcttcgcgttcgagcagggcggcgggatagctgtcatgtacgacgcctcgcgccagcatctctgcgccaatgtgttccagtgcctgctgactggaactgaaatgaatgccggtacgaacaaacagttgactcatatatcctcttaacttcacgcggtttcagaagaacagccgtagcgataggcacgcaggacatcctggattttgtcgaggatcagcgcgtgcggctcggcgttcagttcattcagcgacagtcgttcaaactgcaccggcatatactggctgataagccccagcggtagcttagcgtcggtcagattagcgataagtttctcaacgctttggcgaatacgcggatgcggccagtaataacggatacggtcggaaaggctgaagtggatatcgaccatcgcctggctccaggtggggcgatagtattttttccagtagccgggttcgttaagcatcacttcgtcgatcacctccatcacgcgactgcgagactccggggcgatcagctcattttccatttgggcgagggcaaagatggcttcacgcagggcaaaggtgagcgccgggccgactttcagaatggcgaagtggtcgcggaccagcgcacgataagcctggcgggtttggtagtcggttgagtgcgcttcgtagaccatcggggtgctttcgatccaggcggagagcgctttcgcttcctgcggctggtaatgaatgatttgcgtatggtcgaactccacgccgggctgcacgacgatggcgataactcgctccagcgcggcgtcgagccccagcttacggaaggcggcttcatgggtttcgagcgtcgcggcggcatcctgcgcccgggtgacatgtacgctgccgatggtgctggcctcgccgccgggaaccggaacttcggtcccgatgacgtaggtcaggtggcgcttttgctcatcgctggcggtctcctcggcagcctgacacaggcgagcggcgcgctcagcaaccacaccaggatccagcggcaccggatcgtcagcacaggacattgatgcatcgagatggattttactaaagccggcggcgacgtaggctttgatcaggtcgattgatttttccatcgccacggcggccggttcgtcttgccagcagttcggtccaagatggtcgccgccaagaataatgcgctccgccggaaaaccgacggtacgcgcgatgttgtagacgaagtcgcggaaatcggccggctgcatgccggtgtagccaccaaactgattcacctggttggacgtcgcttcgatcagcaccttattgttggtcgacaggtcgaaacgtaacgccgcttcgataaccagcggatgcgccgaacatactgaacagatgccgatatgttcgcctgacttatggcgagtgataatgtctttcatttacaacctccgttttctttcgaatatattcgttatgttttgttttggtcgcaaatggctttgttttgatttgtgatctgcatcgataaatagtgttgtaacgcagtgaaaggtatcgtctttcgagacaaaaacgccctgaccaggaagacagggcgtttttaattaattgaaaattaactaaatattcgggatagccagctgcgtttcgttttgacggcttcctgggagacctgctgcggctgggcggcaatttcgccgagaccggcgttaaaagcgtcaccaatggcttttaacgcctgctgcgcatcgttgccgctggccataaagtgcagacgatgaccctgtttggcgcccagcgatacgacgcgcatcagattcttggcatcaacaatggcggagcgcgtatcaaggttttcaacccggatttgcgatcgccactgcttgacggctttcaccagcaccgcgctgggacgggcatgtagcccgtgcggattacgcagggtaaaggtggcctcttcgtcaaattgcggcgcgggttgtggttcttcgcctgctggcagaggaatgtcgccggcgagaatttccagcaccgcctggggggtatcagcgcgcgtcagcgcctcaggtactcgatcatcgcccagagcatgggtgagctggcgcaaaatatcgagatgctcattgtcctgagccgcgataccgacaatcagataggcggtttgctcctcaccccagtcaaccccctgcggacaagccagcaccttaacgcccgttttaagcactgcgtcgcgactgtgcggcgtaccgtggggaatggcaatgccgttgcccagataggtgctgatttgcccctcgcgctcgcgcatgccttgtagatagtctgcccgcgtatgtccggcatgggtcagggctgcaacgacacgctgtagcgcctcgtcttttgttttgacctgacgatcgaaacaaatatcggcagaagtcagttgcatagcttgctccttatttcatggcgccagcaagagctgtcgctttgtcagtgcgtttttgccacagccgccagcatcccagcataagtgccccgcaggcggaaccggcgagaatgcacagcacccacatcaacggtttactgaccagcggcaggattaagaagccgccgtgcggtgccggaacctgaatatgcaggctgtagctgagtaccgcagaaattgaggaggcgatcatcatcatcgggatcacccgcagcggatccttggcggcaaagggaatcgcaccttcggtaatgtgcgtacagccgaggatatagttgaccatcccggcggcgcgttcctcctcgctaaagcctttcggaaagaacgtggtcgccagagcgatgaccagcggcggcgtgatgcaggcggcagatacaccggccataaaaaagtagttaccttgacccagcagcaacgtaccggtgacataggccgctttgttgaccggcccgccgaagtcgaaggagcacattgcgcctaccacgatccccagcaggatcgggttggcttcctgtaaagagctgagccagttcatcatgccattgttgatcgctgccaccggctggccgagcaggaccatcatcacgccgatcaccaggacgcctatcagcggcataataaagatcgacttcagcccttcgtactggcgcggcagaccgtcgagcagatgacggatcagcagcataaaatacccggcggcaaaaccggcgatgatcccaccgaggaatccggcgccggtggcgttcgccagcagaccgccgacaaaaccggcaaccatgccagggcggccagatatcgaccaggcaatgtaggcggtaaacaccggcaccatgatcgagaacgcctgctgaccgactttcatcagcgtggcggcaatcacgttatactgcggtgaattcgggtcggcggagtagataccccataagaaagaaacagcgattaagatcccgccggcgacaacgaacggtagcatgttggaaacgccgctcatcagatgtttgtaaatctgtcggccgaacgattctcgctcatatttctcgtctggatccgttgccgcggagaatccctgacgacgcggcgcctgaccgttaacgactttattaattaattccgccggatggtgaatggcttctttaaccggcacctcaataaccggtaaaccattaaaacgttcggcattaacatctttatcggcagcgataatcacgccataaatatccttcaggtcttccgacgtaatggcgttttctacgccggaagcgccattggtttcgacttttatttcaacatttaattttttcgctgcggtttttaaggcctcttcagccataaatgtatgagcaatacctgtagggcagccggtcacggcaataatttttttcataatcggacctttataattggacgatctgaagttgttgtaataattcttgcgtacggtttaatttacccagcccggcggaggcggccacatcagcgccggtggcgctggccagcgccagggcctggggaatatcgtctgtgttaagccaatggctgaggaatgcacccagcgcggcatcgccggcgcaggccgagctgaccagttcgattttcggtgccgagcagaaccacagttgcgcgccgttcgaaaaatagagcccttgcgcgccaagggtcagcagaacattgcgagccccgagctggtggagcgtttgcattgcttcgcgtacccgccgggggctgctgacatccagaccaaagatctctttcagctcgtcgtcattgggtttaatcaatagtggacgccactctaacagctggcgcagcaccgggtggctgatatctaagatgacttcacaccctttctgctggcacagcaccagaatctcgctatagaaccggctctctattcccggtggcagactgccgctgataactaaataatcaccgggcgcgacgcactgtaaatggtgaagaatttgttcttttccttcatcatcaatccgcgcgccgggatttaccagtttgtattcatcactgccgtcgttaataaatatatttatacgggtcggttcagcgacccatgccggtgtgacattaatatgctgtttgcgtagttcctcaacgatatagcggccggtaaaaccgccgaatatgcccatgacatgggttggctgctggtaatgatgtaataccagcgagacgttaacccctttaccattcgggcaatattccgtttgccgggtgcggttgactgccgccggctggagcggatcgcaaaagatattcatatcgatcgcggtattcagtgtcagggtgtggatcacagcaaggctccttcgatccgctgattacagttgtccttcgcagccacaaacgtgaatgactttgcgaacgacctctttcattgccgctttcgccggtttcatatagtgacgaggatcgttggcgcccggattttccaggaagtaggctttcagcgcatccgagaaagcgatttttagttcggtggcgacgttgactttgcatacgcccagagaaatggcgcgacgaatatcactatccggcaggccggaagcgccatgcagaaccagcggaacgtcaacgcagtcgcgaatagccgccaggcgctcaaaatcaagcttcggttcggcggtgtaaaggccgtgcgcggtaccgatggcgacggccagcgaatcaataccggtacgagcgacaaattcgcgggcctgttcggggttggtatagagcgcatctttagcatcgaccaccagatcgtcttcaactccgcccagacggcccagctcggcttcaacgctggcatcatagcggtggctcaactccaccacgctttttaccagtgccacattctcctcgaacggtgagtgagagccatcgatcatgaccgagcggatccctgcctgcactttgcgcgtgatatcagccagatcctcgtgatgatcgaggtgcagggcgagcgggagatcccacttttttgccagatcgcgggcgatcgccaccacgttgccggtgccggcatagctgtaggtaccgggggtgccggcaaggatcaagggggagcgcaactcagccgccgtttcaacaacgacctgcatggtttcgaggttatggatattgaaagccggcacggcataactctgtcgctgagcttttaatagcatgtttttactggaaatgatgtacattttagtcctctgttttcatcttgtaagttatttttggttaataaccttcagtttgaaagtaatgtaacgatcgtctcgccttttaggtgtgatccaccgcacacaatgatgaattgatttttaaaatgaaagttaatagtatttataaggtttcttttttaaagtttgagttggtaaggtgccaatttgtaactacatgattaatatcgatttgctgattgatggcgggatagggctacagccgcggtttgacattgcaagagggaaatttaaaaatgaaagttattccaggagaaaataataaggcataaaccgtggcaaaaccgtcaaccagcttgctgaaaaggcgcttggacatcgcagagatcgttcgtaagaacggcgagatcaaagtcgacgatctggcagaaatgctggctgtttccggggtgacaatccgtaacgatctcaactacctcgagcagcagggctacttgaaacgctcttttggcggggcgatttataccgcccaggctggcgcgccggttgcgatgacccgagaagcgcctgccgtcagagataaagcgctggagacggaaatggctcgccaggtggcggcgcagatagaaaatggcgaaacgctgtttctaggccagggttccattttgcgtaaagtgatcccctttctggccaacagagaagagctttgcctgctattaaatgatctgggccacgtcgcgctggcgcaggagtttttaaatggggaaaccgttctgcttggcggggtgttgtccggtcaggggcggattgtggagggcgaactggcgctgaaggcgttgggtcattaccgcccttcacgtgcgctgatagcggtggaccacattgctgaagacggcacgctaagcgtgcgtaacgaggttacggcacatttgttaagcgaagcggtggcccagagtaaacgagtcattgcgattgtcgcttcccggccggtctatggcgagaaacgttatgctgtgggtgaattacagcagatcagcagcgtcgtgacccctcaggtcgtcgcggcagagtaccatgcctgcttcctcgccgcgggtttgaccaacagctataccaacaatgaatgcctgacatggctcaacacggctttgcataagacaaaccaggagcggtgatgaacgtaaccatttgcaccatcggcgagctgctggtggagtttctcgccaaggaagagaatcaggggttttcccgtcccggtgaattttgggggccctatcccagcggggcgccggcaatatttgccgatcaggtggcaaagctgggtttcggctccgtgttgtttagctgtgtgggcaacgacgcatttggcgagatgaatattgcgcggctggagaaagacggcgtcaacgtcaacggcatcgctatgctgcagaaagcgactaccggtagcgccttcgtcagctatcgtagccaggcgcagcgcgattttatttttaatatgcctaacagcgcctgcggtctgctgactgccgaccacattgacgaagcgttgctaaatcagtgtcagcattttcatattatggggtcatcgctattctcgtttcgtattatcgatgcgatgcgtaaagcgattgaaaacattaaaggccgcagcggcacagtatcgttcgacccaaatattcgcaaagagatgctgaacatcccggagatgtcgcaggcctttgaatatatcctcgactacaccgatatcttcctgccgagcgatggcgagctggattactttggtctcaatccggaacgcaatgagcaggtcctggttgataagctactgaaacgcggcgtgaagcatgtggtgattaaacgcgggccgcgtggcgcaagctactttagtgccaacgagacgcaccatgtcgccggcttcagcgtgccggtggtggatccgactggtgccggggattgctttggcgccacttttgttagtctgttcctcaatggcgccacgccccgggaggcgctgagatgggcaaacgccagcggctcgctggcgattagccaacgcggccccatggaaggcacctcgacgcaggcggagatcagcgcttttcttgccgcccagcatccctaaccaacaagcccggatagatccgggctaaaagtggttaaatccttacgctctcgatcaggttaccggcgccgggttaaataccgccagctggttgtgcaggccccattgatcggagaaggtttttttgcgtccgctggcgacgtcgagaataaattcgaacagcttccgcccgacatcctcaatcgtctcttcgccagtggcgatggtcccggcgttaatgtccattaagtcataccagcggttggccagctcggtacgggtcgccatttttatcaccggtaccgccatcagtccgtacggcgtaccgcgaccggtggtgaatacctgcaccgtgatgccagaggctacctgctgggtgccgcagacaaaatcgctggcgggggttgcggcgtaaatgaggccgcgtttggtcggacgctgacccggagagagcacctcaacgatggcgcttttccctgatttggcaatcgaccccagcgctttttccaccacgttggccagaccgcctttcttgttgccgggggaggggttagcgctgcggtcggttttgcccatatcaagatagttatcgtaccaggccatctcttccagcagacgtttaccgacctcttcgttaatcgcccgcggggtcaacagatgaatggcgtcgcgtacttcggtcacttccgagaacatcaccgtcgccccgcagcgcaccagcaggtcggacgcgtaacctaccgccgggttggcggtcacgcctgaaaaggcgtcgctgccgccgcactgcatcccgaccaccagctcagaggccgggcaggtttcccgctggcgctggttcagtttcgccaggtggcgctcggcgacctgcagaatgtcatcgaccatcgatttaaaaccaacatgcttttcatcctgcaggctgacgatgctggcgctgtccaccgggatacttttgacgtcttccgtgccctgcagcaggcgttccggctgcagcttctcacagccgaggccaatgaccatcacctcgccgccgaagtttgggttgagggcgatattatgaatggtgcgaatcggcactaccgccgccggcgcattaatcgccacgccgcagccgtagagatgattcaggcccaccacgccatcgacgttgggatagtttggcagcaggtcgcgttcaatgattttcaccacgtaatcgaccacgccagcgacgcagtgcacgctggtggtaatacccagcagattcttggtacccacgctgccgtcagcattgcggtagccttcgaaggtgtaaccttccagcggcggtagcggttcaggcactttagtggccagcggcagggtattcagcggcggggcggtgggcagctccaccagcgactcgtcaatccagcttccctgcgggatatcgcgtacggcatagccaatgacttcgccgtagcggatgatttcaccatgggcggggatatccaccagggcaactttgtgaccctgcgggatatgctcgacgagcgtcaggccgtccgggaaacgcgttccggcggttaagccgcgatcgttgacaataatcgccacattatctgtcgggtcaactttaatataaaacgcggtcggcgattgttgtcgaattgcaatgtcagccattgtccagtcatctccaaacaggtgctaataataaaataaaacgctaattcatttgctacatatcagtatgatggaataaaggatgtcagctgagttgattttaaaatgtgatcggcatcactcctttttatgacgctaacctctgcaggacaggcaatcgtaagaagtgtggattagcgcccatgacttatggcatgagcacaattatggctttaaataataactttatattgtgggtatgcatagtgtctggcgggggcgtgctgattatactgagtcatgtttttgaggtgatcgatatgcgaatagacagtttcaatatcgtcttttaaataaatcagaaaccacttaaaacaattataaaaggtgttctgtgcccgaggaatgtctaaatgattttggattctacattagatgaaaaaaaaggaataccgacccgctatttaattctgttgatgatatttgtggtgacggcagtgaactatggcgaccgcgcgaccttgtctatcgccggtactgaagtcgcgaaagagctggggctcagcgcggtgtcgatgggatacattttttccgccttcggctgggcttatctgctgatgcagatccctggcggctggctgctggataaatttggctcgaaaaaggtttattcatacagtctgtttttctggtcactgtttaccttcctgcaaggctttattgatgtgttcccgctcgcctgggccggggtctccatgttctttatgcgttttatgctgggcttttccgaagcgccctcgtttcccgccaacgcccgcattgtggcggcctggtttccggccaaagagcggggtacggcttcagctatctttaatgccgctcagtacttctcgctggctctgttctcgccgctgctcggctggctgaccttcgcgctgggctgggaacatgtctttaccgtgatggggataatagggtttgtgctcaccatcatctgggtgaagtttgtgcataaccccaccgatcatccgcgaatgtcggccgcggagctgaaatatatctcagaaggcggcgcagtggtcgatatggaccataaaaaagaggccaccccggcggccgggccgaagatggactatatccgccagttgctgactaaccgaatgatgttaggcgtatttttcggtcagtatttcctgaataccattacatggttcttcctgacgtggtttccgatctacctcgtgcaggacaagggaatgtcgattctgaaagtggggtttgtggcttcgattccggcgctgtttggctttgctggcggtgtactgggcgggctgttttcggattatctgattggccgcggctgcacgctgacttttgcgcgtaagctgcctattgtgctgggaatgctgctggcgtcgtccatcatcctgtgtaactacacggccagcacgccgctggtcattacgcttatggcgctggcgttctttggcaaaggctttggcgcgctgggctggccggtcatctcggatgtcgcgccgaaggagattgttggcctgtgcggcggggtattcaacgtctttggcaatgtggcctcgatcgccacgccgctggttattggctacatcgtgagcgaactgcactcatttaatggcgcactgatttttgttggcggctccgcgctgatgatgatggtctgctacctgtttgtggttggcgatatcaaacgtatggaattgcagaagtaagcaacgattaacgcaaggtaaaaatcatggataacgcaatttttccgaacaaatttaaggccgcgctggcggcgcatcaggtgcagattggctgctggtgcgctttggctaacccgattagcaccgaggtgctgggtctggcggggttcgactggctggtgctggacgcggaacacgcgccaaacgacgtcaccacgctcattccgcagctgatggccctgaaagatagctccagcgcgcaggtagtccgtgtgccgaccaatgaacccatcatcatcaagcgcatgctggacatcggcttctataacttcctggtgccgtttgtcgagacggctgaacaggcggcgcaggcggtggcttcgacccgttatccgccggaagggatccgcggggtctccgtttcccaccgcggcaatatgtttggcaccgtgccggactatttcgcccagtccaacaagaacatttccattctggtgcagattgagagccagaccggagtggaaaacgtcgaggcgattgccgcgaccgagggcgtggacggtgtgtttgtcggcccgagcgacctggccgccgccttaggccatttgggcaatgccgcccatcctgaggtgcagcgcgctatccagcatatcttcgccagcgcgaagaagcacggtaagccaagcggcattctggcgccagtggaagccgatgcgcgccgctatctggaatggggcgcgaccttcgtcgccgttggcagcgatctgggcgtcttccgttctgcaacccagaaacttgccgacgcgtttaaaaaataatcaccaggatgaagagagagaacattatgacaatcaaagtaggttttatcggtcttggcattatgggcaaaccgatgagcaaaaatttgctgaaagcgggttactcgctggtggtgtctgaccgtaacccggaagcgattgccgacgtgatcgccgctggcgctgagaccgcgacgacgccgaaagcgattgccgaacagtgcgaggtgatcatcaccatgctgccgaactctccgcatgttaaagaggtggcgctgggtgaaaacggcattattgaaggggcgaaaccgggcaccgtagtgatcgatatgagctccattgcgccgctggcgagtcgggaaatcagcgaagcgctgaaagccaaaggtattgatatgctggatgcgccggtgagcggcggcgaaccgaaagccatcgacggcacgctgtcggtcatggtcggcggcgataaagcgatcttcgataaatactacgatctgatgaaagcgatggccggctccgtagtgcataccggcgatattggcgcgggcaacgtcaccaaactggctaaccaggtgattgtcgcgctgaacatcgcggcgatgtctgaagcgctgaccctggcgactaaagccggcgtcaatccggatctggtttatcaggctattcgcggcggtctggcgggcagtaccgtgctggatgcgaaagctccgatggtgatggaccgtaacttcaaaccgggtttccgtatcgacctgcatattaaagatctggccaatgcgttggatacctcacacggcgtgggcgcccaactgccgctgacggcggcggtgatggagatgatgcaggcgctgcgcgcggacggtctcggcactgcagaccatagcgcgctggcgtgctattacgaaaaactggcgaaagtggaagtcactcgctaacaagaagggcgccctgcgcgccctgttatgcttgccttgcgcggcactgtcaggctacaaaattatgaaaatcgtcattgccccagactcttacaaagaaagcctttctgccagcgaggtagctcaggcgatagaaaaaggatttcgggaaattttccctgatgcacagtatgtttccctgcccgtcgccgacggcggcgaggggacggtggaagccatgattgccgccacccagggaaaggaacatttcgcatgggtaacgggtccgctgggtgagagagtgaaggcctgctggggcatgtccggcgacggcgtcaccgcgtttattgagatggcggcagccagcggtctggggctcgttccgcccgacaaacgtaacccgctcatcaccacttcacggggtaccggggagctaatattacaggcgctggagcatggtgcggaacggatcattatcggcatcggcggtagtgcgaccaacgacggtggggcgggtatgatgcaggcgctaggcgcccgcctctgtgacgccgagggacaagagatcggccatggcgggggcagtttgagccgtctgagccggatcgatctttccgccatcgatccgcgcttacgtgacaggatgatccacgtggcctgcgatgttaccaatccgctggtaggcgagcgtggggcgtcgcggatctttggcccacagaaaggggcgaccgaggcgatgatcgtcgagctggatcgtaatctggcgcattatgccgacgtcattaagacgtcgctgcaggtggacgtgaagtcgatccccggcgcgggagcggccggcggcatgggtgcggcgctgatggcctttctcaatgcggagctgcgcagcgggattgagatcgttaccgaggcgctgaagctggaagaacaaatccatgactgctcactggtggtcaccggggaagggcggctcgatagccagtctgttcacggtaaggtgccggtgggggtggcccgggtggcgaagaaataccgtaagccggtgatcggtattgctggcagcctgactcacgatgtcggcgtggttcaccagcacggtatcgatgccgtattcagcgtgttaacttccgtttcgacgctggaagaggcatttcgcggggcgtttgataatatttaccgcgcgtcgcgtaatattgctgccaccctgcaggttgggatgaccactgagggatgacaacgggcggtaaaccctctatactgcgcgccgaagctgaccagacagtcgccgcttcgtcgtcgtcctccttcggggggagacgggcggaggggaggaaagtccgggctccatagggcaaggtgccaggtaacgcctggggggtgtcacagcccacgaccagtgcaacagagagcaaaccgccgatggcccgcgcaagcgggatcaggtaagggtgaaagggtgcggtaagagcgcaccgcgcggctggtaacagtccgcggcacggtaaactccacccggagcaaggccaaataggggttcataaggtacggcccgtactgaacccgggtaggctgcttgagccagtgagcgattgctggcctagatgaatgactgtccacgacagaacccggcttatcggtcagtttcacctttttatgtcaaaaccccgcttcggcggggtttttgctatctgaacccgtgacgcggatgaataactgtccacgacgctataccaaaagaaggcggcttctcggtcagctaccgttatttaaccaccttaggattctgtagcgtcgggatcgtggaatcttgcacctgatgaacctggccgacgatcgtagcgacgctgccgttgcttaaagcctctacgtctgcgctgttatgcgagccaaaattaaaggtaagacgtttatccgttttattctgttcatctcgcatggtcacgataaaatagtagctgccggcgataccgctcttccgacgaatgtcgacaatcaccccgcgtaccttgacccatttacccagataatcgctgctggccttcgccgggttgagagtaaacggctgcaggaactgagccactgaatacgtctgcatcgaagcgacggcgtcatctccaggttgaaataatttgtctcccgcggaataaaaggctttagaagccaggccgcagccgcttaacagcgagatgacaaaaaccagcggtaatacgcgaaaacgtaataacatctcaatctccttatctatttttaaatgatatccttgatgcgctggataacgtaatatgcgctaattaaattaaaggaaaagtcaccactgtcaaatattttgcttgctgttgaaattaaaataaaacctggtgatgttagggcgtcaactatataagttaacacggtattcatattttatatgttttagtgaagtatattagtgctgtggatatatataatgtttggctatcattttttacatttattcactgcgccctggaaaataataatccgctatttctgccacctttacttcaggaaaaaaaatgaaattgataacccgtattgcctttgccacgctgttgaccaccggtttctctatcacggctcaggccgcagacgttaaggcggcgccagcaccggcgcaggatcctattgttcagcacttaaaacttaccaacgatcaggtcgcgaaaattaaaagcctgcatcagcagttggagagtaatgtccagcagatttcccaacaggaaattaaagacggggctctgataaacgtgattgattccggtaaatgggatgaaaaagcggtcaacgatcagctggcggccttcagcaagattgatcagcaggtgcgttattaccgcgtgaagtactattttgaggtgaataaggtactgacgccggagcagcgcacgcaggtgaaaaaagatcttgccgacgcgctgagtgaataatgccatcggcccctcgcggggccgatatcttcttcaggccattaatgaaaatcaacccagccattttgccgtttcaggcgagactttcttcatcccgcaggcggatctccgcttcggcaacaatggcttccagttcgctaagcatctcatcataaccaaagctggcggccccggcgacttgcggttgcaccggggctaacggcgttggtgacgccttttttctgtttttcttcttactcactgacagactccatcacttccgttgttacaccggtaaatctatcagcaaagcgcgcagcggcgtatcggcgacgagggtaatgttagcttcgtcacgaataaatgcgccgtcaccgcaggtgagagcctgcttttgctgttcctgtgcgacggcatggacggagccgtgaatcgactgcaggtaggcgcgtggaccatgtaattgcacgttgatctgctcacctttctccagcgcgatatggtagacccaggcctgttggcgaagctggaggctgttatccccgccctccggagaggccagcagctgcagcgtcgcgtctgcgacattgattttctgctgcagcgggttttcccgctgcgggcaggcatcaagccaaagttgcattcgcgttaacgactgctctttactcagattatgctcgctatagctcacgccaggctgggtggcgatcagcagcgcttcaccggctttggcctgcacgtggttgccgtcgctgtcgcgatactccgcttcgccttccagaatcaggttcaggatatcgacttttgggtacgttctggcctggaaggaagcgccgggcgccagcacttcctggttgaggacgcgcaaggatgcgaagcccagtaatttcgggtcgaagtagtggccaaaggagaaggtgtagcgggcctgcagccagccgaagtctgcttgtccgcattgtttggctgttcgggtagtaatcatgttcttgacctctctttacactaaatcaatggtaaaggtatggacgctgtattgttagccagatattctgcccggtatgttcaaatttcctgaatgagaaagcgatggccaaagagagagcattaacgctggaagcgttacgcgtgatggatgcgatcgaccggcgcggaagcttcgctgccgcagctgatgagctgggacgcgtgccttccgccctgagctacaccatgcaaaaactggaggaggaactggacgtggtgctgtttgaccgctcaggtcatcgcacgaagttcactaacgttggaagaatgctgctggagcgcgggcgcgtgctgcttgaagcggcggataaactcaccaccgatgctgaagccctgtcgcgtggttgggaaacccacctgacgatcgttaccgaagcgctggtgcccactccggatctgtttccgctgattgagaaactggcgactaaatcaaacacccagctgtcgattatcactgaggtactggccggcgcctgggagcggctggagcaggggcgggcggatatcgttgtcgcaccggatatgcattttcgttcctcttcggagattaactcgcgcaaactctattcggtgctcagtgtgtacgtcgcggcgccggatcacccgatccatcaggagccggagccgctctctgaggttacccgcgtgaaataccgcggcgtcgcggtggcggataccgcgcgcgagcggcccgtcctcaccgttcaactgctggataaacagccgcgtttaacggtgagtacgatagaagataaacgtcaggcgctactggccggactgggcgtggcgactatgccctatccgctggtggagaaggatattgccgaaggtcgcctgcgggtcgtcagcccggaatacaccaatgaaattgacattatcatggcctggcgacgggacagtatgggcgaagcgaagtcctggtgtctgcgtgagatccccaagctgtttgccggcagatagtgatgaagaccctcctcccgctagcgggaggagcaggaagattagtaggaaaagggtttcggatcgggcccgaagcgattattgccttcggtgccgcgctggcagttaaagatcaggatcaccagccagccgatgaccgggatcaacagcagcaatagccaccaggccgaacgatcggtgtcatgcagacggcgaaattgcaccgcccaccacggtaaaaagaccagtacgccatagatagtggtcagaatgccttcgccgccagcccgctgccagcccagcattttatcgatgatgctcaatacgccggtcaggatgaggttgaccagaataaacatccagtactctttgcgccgcgcacggccgccaaatcctatatagttttttaataccttgagataccagtccatttctacgcctcaattaaccgtcaatcacttgttttttaagcgatcgcaataagaatagacgtgaatgaatggtgggtaaatatctgttttctgaattattgggcgccatcactggcgcccgacagatcaacggaagcgctgatcgcgaccgtgcggttcgttgagatcctgctgcggcccaatggaaataataccggtagggttaatggttttatggctgcggtaatagtggtgacggatatgcggaaaactcaccgtctcggcgatacccggcatctggtagatgtcgcgcaggaaaccgtacagattgaggtaatcactgatgcgccgtttatcgcatttaaaatgggtcacatataccgggtcgaagcgtaccagcgttgtccacaggcgaatgtcggcttccgttagctgattgcccgtcagatagcgatgctggccgaggatctgctccagccgctccagcgaggtaaagaccgcatccaccgcttcgtcgtaagcttgctggctggtggcaaagccggctttatacacgccgttgttgacgttgtcatagatccagccgttcagctcatcgatttgttcccgcagcgctggcgggtagtaatccccggcccgggcgccaaggccatcgaaggcggtattgaacatgcggatgatttctgccgactcattgctgacgatggtctgctgttttttatcccacagcaccggcacggtcacgcgtccggtgtagtgcgggtcggcgtgcagatacagctgatagagaaagtcatgctggtagagggtatcgccggtggcttccgggaagctatcgtcaaaggtccagccgttttccagcatcagcggattgaccacggatacggggagaaaaggttccagaccttttaatttacgcataattaacgtgcgatgcgcccacgggcaggcgagagaaacatacaaatgatagcgatccttttccgcggcaaaaccgccttcaccgctggggccagccgcgccgtcggcggtcagccagttacggaaggcggaaacggaacgtttaaaacgcccaccggtggattttgtgtcataccaggtatcctgccagacgccgtcaactaattgtcccatctttgctcctccttcagactacagatagcaaaagcgaggagtggtctcctcgcttttttcattcattcagtatagtgcgcttaccatttcttattcagtacacggtcaatactgaaggcgcccggtccggtaatggccagcagcaggtaaccgcccgcaatggtcaggttcttcatgaacatcagggagttcacgccttccgcaaagttgctatggaacaggaacgcggtcagcagcgtaaagcccgcagtgaacagcgcggtggtccgggtcaggaaaccgaacagaatcgccagaccgccgccgaactcaaggaggatggtcagcggcagcagcgcacccgggacgcccatggcttccatatactgctgggttcccgcataaccggtgattttgccccatcctgcagtgataaacagaatcggcatcagaatacgcgctaccaatacaccaacatcttctaattttttcatttgttactccagaaaacccaaagggcggcggttttttttttagtgcaatcccgcgtagttacgcggtgttgctgtcgatggagaggatagtagcgaggcggagagggaattgttagcaaggaaaactgtagatctatttcaaagtttctgagcaatcagtacgcggaggcgaaagtgtaccgaacgcgatgggccaccaccggtcctggtatggcgtgaggtaaagggcgtcgtagagaagggcgcgctacggaaaaggcgcatgttgctgcgaacagggtgcggtaacggacagggaaatggcagagcgtgggcgccagggaaagcgctcacgctcagggccgctagcgaactgccgactggcgcaggatcccgcgcaccaggcgccaggtgctccacagtccgagtccgcgtttggtccagcgcattaaaaaatgcggatgtcgtacggaccatacggccatcagaccgctgccaaccatcagccacgaacgtaaactcagcagcgtatgccagccgcggtcgaggggcgcagtcgcctcgtgccagtgacggcggcaggcgctgagctccagccgttgctgctggatctggcgcagcagctgcgtcttttgccgttcacgctcctgtcggccattcacgatttatcctcctccagaagggcacggtcgttctccagctctttacgcgttagacgcagcagcgtggagcggcgcgccttacgtagggttaggatacccacgatcgcggcggcaaggagcagcacaacggtggtggcgatcatcacgtgcaggcggtactgagcgtcaacggcccagataaccagcaccagcagactcatgaggccaaacgcggcaaacagcagcgtcagtccggtcatgatcagcagctggaagaggttggctttctcctcctccagctccacgacgaccagacgcagccgcgtttccaccatttcgaccagcagcgtgacgatgcgctgaccaatggagaaaacgcgctgacccggtccctgcgtgtgttgagtattcgccataatcagcgacgcgacagcaggacacccagcaccagcccgacggcggcgccaattcctaccccagtccacggattttcgcgaacataatcatccgctcgcgcggcggtctcacgagtttgacgaagaatcgcttcgctggtttcacccaaacgagcgcggctctctttcagcgcgctctcggctttactgcgcagtttacccatctcttctttcgacttgtccgccgaggaatttagtacttcctccagggtatccgccagcgttttcagttctgcacgaaggtcgtcagtcacattctctttagccatgtcgttctcctgtagcgtggtccgtgttgcgaaagttaatggtgattagtaatcccgagactccagcgtttttaactcctgttgcgcttcattgagtttatgctggcgtttgttaattttgtccgcatcgcctttcttccgggcttcctgcagatcgcgctgacgttcagcgatctcttcccgctgtttggcaattttttgctgatgatcggctttgagtttactgtcgctacagttttcccgaacctgacgtagcgcggtatttagcccatcaatgcgactttgattatgatgcttttcggcgtagctgatctctcgttgaatatcctgctctttttcctggcagggagaggcggctagggcgctggcgctaagtgaagtcaggaccagaagcagagcgatgcggtgtttcatggatagtaccttccattgtctgaggggatacccggaggatatacccgttcccgttggtgaacgtgaatgcgttgattcccgcaggtttaagcatagtaacaaatgcgggaaaccaccagactgggttaaaaacgcagtctggcggcagcttacccgaggcgatgcggcgcgtcgcgcaggcgggatagccaggcggtgggcgagttatcgtcctccagaagggcaataatataaccatgtggcagagcgcggccgagaacttctttcgccgccgcgccctgggcggtggaatcgaacttaatcagcagaccatccttctgcggcgtgatgcttttaaagcggatgccgttggcatcgagatgatgccagacggagaaaccgtccggcattccgataccctggccaaccgggcgtatcgccagcgtggcctcctgctgctgcaccgccagccaaagccagaacagggcgccgagcagaagagaaccacccagcagccagctgaactggcgcagggaagggcgtttcatgaccatcattagccccggcttctgtattttttcttccacagcaccaccagcgagccgatcagtccgaagaccaacagggcaaccggcaggagcatcaggcaggacatcagctgatcttcatacttgaggaataccggggttttacccagcagatagccaagcgaggtcaggatgagcacccacagcaggccgctcatccagttgaaaaactgaaaacgggcgttattaaggccggaaagcccggcgatggtgggcagcagcgtgcgtacgaaggcgataaagcggccaatcagcagcgcggagagcccatgcttatgaaacaagtgatgcgcacgctggtgatagtgcgaaggcaggtgtgacagccagttttgcacgatccgcgtattacccagccaacgcccctgaatatagcttagccagcagccgaggctggcggcggcggtgagcagcagcaaggtttccggaaaacccatcgcccctttggcgatcagcacgcccacgagcacgagcagactatcccccggtaaaaacgcggcaggcaataacccgttctcaaggaacaaaatcataaacaagacaaaatacagcatgcctatcatggagggattcgcgagcgtttcgtaatcctgagcccacaaggcattcaataactgggtaaatagttccattcacgattcctggtacatcggttaacggcacgtctgagcgcgtggcatatagggcgacaagatttttatgagattatggtcgctgcttaggcgctctgaacgcttccctgtataagactgaagtaagtaaatacctacccccagaacgacaaaatgcatctaattgtaacaaatcacctgactttccgtcagagaaattgcaacgtgttgctcgttgattttgctgattgcggagatgggaggcgagaggatttacacaggctgacactatatatgacttgcttactccagcctcactgtcagacaggcgcgcaggggggcgcgccggagggataaggccttatttcgcgccgttgactgcggtatcgagatgaacgactgggttttcggcaaataagtagcgatcggcattaaattcaaagtcatcgctggtttcgttaaacaacatttgcttggtattttccagatgctgccacatcgccagcttggcggcgttgggatcttttcgcagcagagcttttaggatctgatcgtggtcgtcgcaccagttatcgaccgtacgcaggtcgatatgctcatgcagctttttccagtaggggttatgcacgcgctgggtccacatcttttccacgatcgccgccagcgcgctgttctgcgtcgccagcgccacctggacgtgaaactgcaggtcccactcggagtcgcggaaacatttctcgttacgcgctttctcctgaatctccatcagcttcatgatgtcctgtttggtcacctgagtcgccgcgaattcggcaatattgctttcaattagctgccgcgcctgcagcagttcaaaggggccatagttggcgaactcaaggctttcatcggccacctgctggtatttcggatggttggagataacgtggatacccgaccctttgcggacttcgacatacccttccacttccagcatgataatggcttcacgaaccacggtgcggctgacgtttttttcatcggcgatgaagcgctcggcgggcagcttatcccctacaaggtagacaccttgttcgatgcgcgtcttcagctcagcggcaagctgctgatatagacggcgtggttcaatgatttccatattcgctcccggaagatggcgacaatattcgatttgttataccacttttacgcgctttccaccactggcaggcatgaaaaagccgcctgagaaggcggcttgatcggcgattaccttgccattcgatctaactctgcgtgaccggtttgcggctgctaagcggcgtcgagtcatcgtcagccggtttgtttttcagcaccgtccagataaccagcgcgcccagcaggtcaaagacggccagtaccgcaaacagcgggctaaagccgatggtgtctgccagcgcgccgacgaccagggcgaacatggtgctcgccagccaggcggccatcccggtcagaccgttggcggtagcgacttcgttacggccaaagacatcggaagagagggtaatcagcgccccggacagtgcctggtgagcgaacccgccgatgcacagcagggcaatcgccacgtacgggctggtgaacaggccgatcatccccgggccaatcatcagcagggcgcccatggtgaccaccattttacgcgacacgatcaggttgacgccaaaccagcgctggaacagcggcggcagatatccgccgacgatgcagccgaggtcggcgaacagcatcggcatccaggcgaacatggcgatctctttcaggttaaaaccgtaaactttgaacatgaacagcgggatccaggcgttaaaggtcccccaggccggctcggcgaggaagcgcggcagggcgataccccagaactgacggttgcgcaggatttgccacggcgacattttcttcgcgttattggtctgatgctgagactcctgaccgccaatgatgtagtcacgttcttcgtcagataattttttctggtcgcgcgggtgtttgtagaagataagccaggcgatggcccaggcgaagctcaataccccggagatgatgaacgccatctgccagctgtgcatgacaatcgcccacaccaccaacggcggcgcgatcatggcgccaatagaggaacccacgttgaagtagcccactgcgatagagcgctcttttgccgggaaccactctgagctggccttcaggccggcggggatcattgcggcctccgctgcgccgactgcgccacgggccagcgccagtccaccccagctgccggccagcgcggttgagccgcagaataccgcccaggcgatggcgaagaaggcatagccaattttggtccccagaatatcaaggacataccccgcgacgggctgcataacggtataggcagcggaataggctgcaatgatataggagtactgttgggtcgaaatgtgtaactcttccatcagcgtcggcgcggccgccgctacggtgttacgggtcaggtagcccagcacggtgcccagcgtcaccagcgcgatcatgtaccaacgtaaccctttaattttacgcatgtaaacctcatcgtctgttatctttccgcatcaggtgcggcctttaccgagcgcaataagcggccgggaaagcgaaacggaggattcaggagggtagtcccctctggcctgaaccttaccatcagttgttatgttgaaagtcggtatccattccgtataagccgatgccataagcaccggtaatgcattccgtcggtttatatgttgcgacggcagaaagataacttgtcatacaactttaaaagttgagagctgtcacaaaagtgggaaagttagtgtggtctttatcccttgcctggaaagccagagatggcgcgctctggcgaggtgttttgctccagggcggtcatttttttatcgacgtttattgatctaactcacgaaaaacagttcggtctgtagaaattggtgtgataactttgtcagcattgtagtcaatcatctgaaaggctcccacactggagcgaagaggacacgcgaatgacatcgtttatgactgaagattttctacttgataccgagtttgcccgccgtctgtaccatgattacgccaaagatcagccgattttcgactaccactgccaccttccgccgcagcaggttgccgaaaactatcgctttaaaaacctgtatgacatctggctgaaaggcgatcactataaatggcgcgcaatgcgcactaacggcgtgccggagcgtctgtgtaccggtgatgcgtccgatcgcgagaaatttgacgcctgggcggccacggttccgcacactattggcaacccgttataccactggacccatttagagctgcgtcgaccttttggtattacaggtaagctgttgtcgccatccaccgccgatgagatctgggaccagtgtaatgatttgctggctcaggatgccttctccgcccgcggaatcatgaaacagatgaatgtgaagatggtcggtaccaccgacgatccgattgattctcttgagcaccacgcggctgtcgccaaagacaactcctttgacatcaaagtgctgccgagctggcgcccggataaagcgttcaacatcgagttggcgaccttcaatgattatatggctaagctgggcgaggtatccgataccgatattcgccgcttcgctgatctgcaaagcgccctgaccaaacgtctggatcattttgccgcacacggctgcaaagtctccgatcatgcgctcgacgtggtgctgtttgccgaagcgaccgacgccgagctggatgaaattctggcgcgccgcctggctggcgagacccttagcgaacacgaagtggcgcagtttaaaaccgcggtgctggtgttcctcggcgcagagtatgcccgtcgcggctgggtccagcagtaccacattggcgcgctgcgtaacaacaacctccgtcagttcaaactgttagggccagacgtcggcttcgactcgatcaacgatcgtccgatggcggaagagctgtctaagctgctgagcaagcagaacgaagaaaacctgctgccgaaaacgattctctactgcctgaacccgcgtgataacgaagtgctgggcaccatgatcggtaacttccagggtgaaggcatgccaggcaagatgcagttcggctccggctggtggttcaacgatcagaaagacggtatggagcggcagatgacccagctggcgcagctcgggctgctgagccgcttcgtcgggatgttgaccgacagtcgcagcttcctctcctacacgcgccacgaatacttccgccgcattctgtgccagatgatcggccgttgggtggctgccggcgaagcgcctgcggatatcgcgctgctgggcgagatggtgaaaaacatttgctttaacaatgcgcgtgactatttcgccattgaactgaactaaggccagaggtcggttgatatgcaatacatcaaaatccattcgcaggataacgtcgcggtcgcgctgacggatatcgctgccggtagcgtggtgacgattgataatgactcggtcaccctcggccaggatatcgttcgcggccacaagtttgcactgcgcgctatcgcgaaaggggaaaacgtcgttaagtacgggttgccgattggccatgcgctggcggatatcgcgccgggcgagcatgttcatgcgcacaatacgcgcaccaatctcagcgaccttgacgcgtatcgctatcaaccggacctggttgcccaaccgccacagcctgcggatcgcgaagtacagatttatcgtcgcgccaacggtgacgtcggcgtgcgcaatgagctgtggatcctgccgaccgtcggctgcgtcaacgcgatggccagacaaatgcagaaccgtttcctgaaagagacgtatggcgctgaggatatcgatggggtacatctcttcagccacacctatggctgctcgcagcttggggacgatcacatcaacactcgcaccatgctgcaaaatatggttcgtcacccgaacgccggggcggtgctggtggttggccttggctgtgaaaacaaccaggtggaggcctttcgcgagacgctgggcgagtttgacccgcagcgcgtgcactttatggtttgccagcatcaggacgatgaagtggaggcggggattgagcatctgcatcagctgtatgaagtgatgcgtcaggataaacgccagccgggcaagctcagcgagctgaagtttggcctcgagtgcgggggatcggacggcctgtcgggcattaccgctaatccgatgctgggccgcttctcagactatgtgatcgccaacggcggcactaccgtgctgaccgaagtgccggagatgttcggcgctgaacagttgctgatgagccactgccgcgacgaagcgaccttcgacaagctggtgaccatggtcaatgactttaagcagtactttattgctcacgaccagcctatttacgaaaacccctcgccgggtaataaggccggagggatcactaccctcgaagataagtcgctgggctgtactcagaaagcgggctccagccaggtggtggatgttctgcgctacggcgagcgcctgaaggttcatggtctgaatttactgagcgcgccgggcaacgacgcggtcgccaccagcgcgctggccggcgccggctgccatatggtgctgttcagcaccggtcgcggcacgccgtacggcggctttgtgccaacggtgaagatcgccaccaacagcgagctggcggcgaagaaaaagcactggatcgactttgatgccgggcagctgctccacggcaaaacgatgccgcagctgctggaagagtttgtggatgccattgtagccttcgccaacggtaaaccgacctgtaatgagcagaatgacttccgcgagctggccatctttaaaagcggtgttaccctgtaaaggcgtatttgcgttggcgcccagaggcttggtttgtgtatcggcctgatagcgtagcgccatcgggctcgtaacagcggcgtttcagccagtgaagcgccgtttgtttttttcagtcagggagcttacatgaccgcgtattggctggcccagggggtcggcgtcatcgcctttcttatcggcattaccacctttatcaaccgcgatgaacgccgtttcaggctacagctggcggtctatagcgctattatcggcgttcattttttcctgatgggcgccgggccggctggaatgagcgccgggctcaatgcgcttcgcacggtcatttccttacgcacccgtagcctgtgggtgatgacagtctttatcctcctgacgttgattctcggcctgggtaaactgcagcatgccatggagctgctgccgatcattggcaccgtcgccagcacctgggcgctgtttcgctgcaaagggctaaccgtccgctgcgtgatgtggtgctccaccgcctgctgggtcacgcataatctgtggttgggttccattggcgggacgctgatagaaggcagtttcctgatcgtcaacgggctgaatatcattcgcttccgccggatgcaaaagcgcggtatcgatccgtttaaggttgaaaacgcagtacaggaagagagtccctccgcccgatagcggaggggaaaggcgttatccgcgcagggcgtttttcgccagctggtcgtcttccgccatgcaggccgcggcggtaaacagggcgtcggtggaggagttcagcgcggtttcgcaggagtcctgcagcacgccgataataaagccaacggcaaccacttgcatcgccacatcgttcgggatcccaaacatattacaggccagcgggatcagcagcagcgagccgcccgccacgccggaggcgccgcaggcgcacagcgaagcgaccacgctcagcagcagcgccgtcggcagatccaccggaatattcagcgtatgcaccgccgccagcgtcagcacggtgatggtgattgccgcgccagccatattaatggtcgcccccagtggaatagagaccgaataggtgtcgcgatccagattcagcttctcgcacagcgccatattcactggaatgttggcggcggagctgcgggtgaagaacgcgtaaacgccgctttcgcgcaggcaggtgagcaccagcggataggggttgcggcggatcttccagaacaccagcagcggattaatcaccagcgctaccagcagcatacagcccaccagcaccagcagcagctgggcatagccccacagggtctcgaaaccggtggtcgccagggtggaagataccaggccgaagatccccagcggcgcaaagcggatcaccactttaacgataaaggtcaccgcgtgggagacgtcgttgatcaggtttttggtggtgtcgttaccatgacgcagggcgaagccaagccccaccgcccacaccagaatgccgatatagttggcgttcagcagagcgtcgatcgggttggacaccatgctcatcagcaggccgcgcagcacctcaacaatccccgacggcggcgtgatgctgtcggcggcggtggttaagtgcagggtcgagggaaagagaaaactgaacaacaccgcggtcagcgccgcgctaaaggtgcccagcagatagagaaacagaatggggcgtatactggttttttgtccgtgctgatggttggcgatcgaggccatgacaagcatcaataccagcaccggcgctaccgcttttaacgcgccgacgaacagggtccccagcagaccgacggcgatagccgcaggcttagagaccagcgccaacagtacgccaagcaccaggccgattaaaatttgtttcaccaggctgccttgcgccaggcgggagagccaccctgatgagggagtgcgtgttgtcataattcattccttccagtgatgtagcaagccatcccagccacgtattattttttacgtttatgtcaggatgtaagtagatgtttgcatagtcgagtatacggaaagaaagactggcgggaagcgtaaaatactgtgattttaatatggatcttattttttaactgcgtagcaacataattgtgacatgagcaggtattctcgttacgagaacgtctgctatagctgattaccgcgccgccagcgagggccgacggcgcggtagcagattactctggcagtttgcgctgcttgtcgtgctgcctgttgacccaggcgttaatcagcagcgtgacggccaggatgccgcccaccacgcccagcgagatggcaaccgggatatggtagaagtcgacgatcagcatcttcacgccaataaacaccaggatcaccgacagaccgtatttgagcatcgagaagcgctcagcgacccccgccagcaggaagtacatggcgcgcaggccgaggatggcgaacaggttcgaggtcagcacgataaacggatcggtggtgaccgcgaagattgccgggatactgtcgacggcgaaaatcacgtcgctcagttccaccagaatcagcaccagcagcagcggggtggcgaacagcaccccgtttttacgggtgaagaagcgctcgctctcgattttatcggtcatccgcagatggctgcggatccagcgcaccagcggtttatcgccgatgccggagtcgtcctctttcgccagcgccatcttcacgccggtaaacagcaggaaggcgccaaagacgtacagcagccagtcgaactgcgaaatcagccagctgccggcgaagatcataatggtacgcagaacgatcgcgcccagtacgccatacaccaacacccggcgctgcagagcaggcggtacggcgaaatagctgaacagcatcaaccagacgaagacgttatcgaccgccagcgctttttcaatcagataacctgtgaggaaggctaaggcctgcggatcggcgacggcccggccctgggtttgcaccagataccaccagaaggcggcgttgaacagcagagaaagcgtgacccagaggattgaccagccagcggcctgtttcatggtcatgctatgcgaaccgcgtcgtccctgaagcagcaggtcgattgccaacatgatcgcgacaacgacagcgaatccaccccatagcaacggcgtgccgacagtattcatttgatattccttacataaaaacaaaacggctgacgtcggaagacggcagccgctgcgcttttatgcatagacctcgccttccggcaaggtctcacttacaacaaccaaagtacatcgcgatgggctttggttattgcccggcgaccggatgcggtattgcacgcatcgtaatgacgatcaaccggcaaggaagttactcccctttgcacgtaacaaaatatgtcacagggcggttttcgtcaatggcggccggtcaggcctttacactcttttacgccagcggctgcgtatcggccgggaagatcaccccggtctggcgacgaatttcgctggacagtttggcggtgatccggctcaccgccaggcccgggtgatccacatcctgtgtctccaccagccgcgcaaaggtctccgcctcatacagcatggtattaatgtgctggggctgcgtcaggtcctgggctttaccgccgcgcggcacaaacgccagcttctgacattcggagattttttcgatcactaacgcgccgtcttcgccctgaatttcactggggatcgcggaatcgctaactttggagtgatgcagcgtcacgtcgaagtcgccatagctcagcaccacggtgccctgggcgtctacgccgctgtccagcaggctggcggtggcaagaacggcctgcggctcgccccacagcgccacagcggacgccaggcaatagaagccgatatccataatcgaaccgttagagaacgccgggttaaaggtgttggggttttcgccgtcaaggtagcgctgatagcgcgaggagtactgacagtagttgataaaggctttgcgtagtttgcccactttagcgagcgtttctttcagtaggagaaagttaggcagactggcggttttaaaggcttcaaacagcaccacgttattttctttcgccagcgctatcgccgcctcgacttcctgcaggttcgacgccagcggcttttcgcaaatgacgtgcttcttatggctcaggaacagccgggtctgcggaaagtgcagcgagttcgggctggcaatatagaccgcgtcaacgtcagggctctgtgccagttcatcgagcgaggtaaacagatgctcgacaggatagtctttggcgaaggcttgcgcctgttcgaggctgcgggagtagatggcggtaagtttatatttgccggtttcatgggcggcatcgacaaactgcttggtgatccagtttgtgccaacaactgcgaaacgtatcataaacgttgacgaactccgttaaagggaacctgccgccactctatcatgccgtcatgacaaaaccagtgcgtcactacgcagaacgatttaacgaaaggtgcgtcagccacaggcgggtgtcgaactccagctggtggtactgcggctccatatggcagcacagctgataaaaagccttgttgtgatccttctctttcagatgcgccagttcatgaaccacgatcatccgcagaaaggcttccggcgcgtcgcgaaataccgtcgctacgcgaatttccgctttagctttcagcttaccgccctgcacgcgggaaatggcggtatgcaggccgagcgcattgttcagcacgtggatcttactgtcatacatcactttgttgatcggcgccgcgccgcgcagaaagcggtttttcaagtcctgggtgtactgatacagcgctttatcgctgttaacgtcgtgcccttgcggatagcgcttttgcagcacctcgccgaggcggtcttgctcgattaacgtggtcacctgcgccagcagcgattcaggatagccctgtaaataaatgagttttgtcatcgtcttatcattatgtctgtcaggagggcagttcagccacggtcatggtaaagaccagcggcgcggtaccctcattgcggtaaccgtgctctatttcggtgcgggccaccgccgattccccggccgccaccgtgcggcaggtctcgccaagcgtcagcgtcagcgcgccggcttccacgtgcagcagctcgaaggttgttgccgggtggccaggcgaggcaaaggcttcgccgggctgcatctcccagcgccacagctcaatcatattcggcccggcggtgccggcgaggagcctggcgctgccccccagcgggccttgccagagggtggggatctgctcggcgggaataatatgcaacgcgggttcgcttgacacattgacaatatccgccaccgagacgcccagcgcggcggcgagtttgcagaggatcgcaatgctgggattggcggcctctttttccatctcgaccagcatacctttgctgatgctggcccggcgcgacagctcgtccagcgacatttttttcgctttacggtaggccttcagccgcgtggcgacggcgcgacttacctggtcgacatcagatcctgaatcggtcgttatattgacttttacgttcattggtcactatgatgaaacaaattggtcattacaggattatcgaatgcgtagcgtaacgccgtcaatcgaatctgcggtcagccgcctggcgccgggctttcgggcattaagtattgtggtggagagcgcgccggtggccgatcccgccgtcgcggagcaggcgctggccgaggcctgcctggcggtgcagcaggatgatgtgccctgggcgcaagcgcacctggcggcatgggatgaagcgttcagcgccttcggcgcgaaggcgaaacgtaccccctgttcggcgcaggcgctgcgcaagcgggtgctgaaagaggggagcctgccggccatcgatccggtggtggatatctacaacgcgatcagcattcgctatgccgtcccggtcggtggggaaaatctggccgcctaccgtggcgaaccgcggctggccattgcccgcggcgatgagccattcgatacgctaaaatcggcagagccggtagtggaatatccggagccgggcgaagtcatctggcgggatgatataggcgtaacctgccgacgctggaactggcgacagggcgtgcgcacccggctggacagcggcgcgcagacgatgtggtttattctcgaaagcctgccggcgatgccgttgtcggccctgcatgaggcgggagagcggctggtaggttatctgcagcagctgatgcccggcgctcgcgcgtcgataacgctgctgcgagccgatgacgagggcgatctacgctgagcggcgatgatcagcgatctctcttcaactggacaggatttgcgtataaactcgcgggttttactattccggaggcggagaggcgatgagccaggcagagttaaacggtgagttattcacattagagcggttcccacctaacgctgaagaagaagcgcttcaggcatgggaagcggcggatgaatatctgctgcaacaggtgaatgacgtcgacggcctgacgctcatcttcaacgacggcttcggcgcgctcgcctgcgcgctggcggagcgcaacccggtcagtatcaacgactcctttatttccgagctggcgacccgccacaacctgcggatgaacggtatcgatgaagagagcgtgcgctttcaggatagcctgagcccgctaccggccgcgccggcgctggtgctgattaaggtgccaaaacagctggcgctgctggaacagcagctgcgcgccctgcgcgaagtagtcacgccggaaacccgcatcatcgccgcggcgaaagcccgtgatgtgcacaactcgacgctggcgctgtttgaaaaaatcctcggcaccaccaccacctcgctggcgtggaaaaaagcgcgtttgatccactgcgttttcaccgctcctgagcttgccgatgcgccgcaaacctacagctggaagctggacggcacgccgtggaccatccataaccacgccaacgtttttgcccgcagcgggctggatatcggcgcgcgtttcttcctgcagcatttaccgtctgatctagaaggcgagatcgccgatctcggctgcggcaacggggtgattggcctgcaggcgctggcgcaaaatccaaacgccagcgtgatgttcaccgatgagtcgcacatggcggtggcttccagccggttgaacgtcgagcgcaatctgccggacgatatcgcacgctgtgaatttatggtcaacaactcgctctccggcattgagcctgaccgctttacggcgattctgtgtaatccgccgttccatcagcaacacgctattaccgaccatatcgcctggcagatgtttaacgatgcccgccgcagcctgaaatacggcggcgagctgtacgtcgtcggcaaccgccacctcgattacttccgtaagctgaagcgcgcgtttggtaattgcacgacgattgcgacgaacaataagtttgtcattttgaaagcaacgaaggtgcgtaagcagcgctgattcttgtcgcggtttccccctgctcgcggctgtcgccttagccgggctagcgtgcgggattatcgtggtagcccggggaaggcgcatcgcgccgcccccgggacagggctaaatcgccagcgccagtttagtgccctgggcaatcgcccgacgcgcatccagctccgccgccacgtcgcaaccgccgatgagatgcaccgttttccccgccgcgcgcagcggatccgccagctcgcggcgcggctcctgaccggcgcagatcaccacctgatcgaccgccagcagttggcgctcgccgccgatagtgacatgtaacccttcatcatcgatcttttcatagctgaccgccgggatcattttcaccccgcgcgccagcagcgtcgcgcggtggatccagccggtggttttgccgagcccttcgcccggtttgctggctttgcgctgcagcatcacaatctgtcgcgggcttttactcaactgcgggccttcagcactcagccctcccgccgtttgcaggctggtatcgataccccattcgcggcagaactcgccgatatcctggctggtggccgcgcccgactggcttaaaaacatcgcggtgtcgaagccgatgccgccgcagccgataatcgccaccttcgcgccaaccggcgctttatcgcgcaagacatcaaggtagctcagcacttttggatgatcgatcccgtcgatcgccggcaggcgcggggcgataccggtggcgaggatcgtctcatcgaacgccagcagatcgtctgtcgtgacgcgggtgttcaggcgtagatcgacaccatgaagatcgagcatggtgcggtagtaacgcagcgtctcgtgaaactcctctttgccggggatctgtttggcgatattaaactgaccgccgatctccgggagcgcatcaaacaacgtgacgtgatgaccgcgggcggcagcgtttacggcgaaggccagaccggcaggcccggcgccgaccaccgccagccgtttaggcgcgttggccggcaggaccggcatcagggtttcatgacacgcgcgcgggttgaccagacaggaggtgactttgccgacgaagatacgatcgagacacgcctgattgcagccgatgcaggtgttgatctgatcggcgcgatcgtcctgcgcttttgatataaattcggcgtcggcaaggaacgggcgggccatcgataccatatcggcatcgccgcgggcgagaatatcctccgcgacctgcggatcgttaatgcggttggtggtgatcaacgggatcgacaccgcgcccttcagcttgcgggtgacccagctgaaagctccgcgcggtaccggcgtggcgatggtcggaatgcgcgcttcgtgccagccaatcccggtgttgatgatggtcgctcccgccgcttcaatcgctttggccagttcggtgacttccgccagcgtgctgccgtcgttgaccagatcgagcatcgacagacggtaaatgataatgaaatcgtggccggcgcgctggcgcaccgccttaaccacctctacggcgaaacgcatgcgcctggcataatcgccgccccattggtcgtcgcgctggttagtgcgcgcggcgagaaattcgttaatcagatagccctcagagcccatcacctcgacgccgtcatagcccgcttcgcgcgccagctgggcgcagtgggcaaaatcatcgatcagcgtcaggatctcatcgtggctcagttcatggggggtaaaacggttgatcggcgcctgtagcgccgagggggccaccagcgcgggctggtagctgtaacggccggtgtgcaggatctgcagagcgattttgccgccttcctgatgtaccgcatcggtaatatggcgatgatgcgccagatggctggcgtcgttgagtaccgcgccgccggccatggtgacgccagagggcgccggagcgatgccgccggtgacgatcagcgccacgccgtgacgggcgcgctcggcgtaaaaggccgccagccgctgcgcgccgtccggcagctcttccagcccggtgtgcattgagcccatcaacacgcggtttttgagcgttgtgaagcccagctcaagcggggcgaaaagcgacggatagcggctcatagtggcttccaatgtaaaattattgttatgtggtcggatgagttactaatttagccatcgtggagaaaaagggaaaaggggagtgcggtgattgtgatgggattcaaagaacggcgaagcgttgccccacaccccggccctctcccaaagggagaggggggaaaggcggagcggcaccggtagttagggtgagggggaagacacaacgcgctggcggcgctccagacccggcgcctgccacatcgacgttgtcagtccgctatcgacaaggccaagctgatcggcgtacaccgtctgccatttgctcatcatctcctgatacagctcgcgatgctgcggatttggggtgaaatcgcggtgccagctcactaaccgctctccggtgctggccatatcgtcatacatcccggcgccggttccggcggcgatggcgcagcccagagcggtggcttcgcggaccaccggcacccgcaccggcaggccggtgacgtcgctgaggatctggctccacagcgcgcctttagagccgccgccggcaaacaccaggctgtcgaatgtcaccccggagaactgcgagatctgcgcgaggttgcaggcggagacaatcgccgcgttctcctccagcgcgcggaacagggtcgctttattgcacttttccggatcgatggagaggttaataaacgacggcgcggcgtggtaccactgcttaaagtgcatagcgtcggaaaaaataggcatcacgccgtgggaaccggcggggacgcggctggccatctcctccagcagcgaataggcatcgacgccgagccgctcggcaatcagtttttcttcagcgcagaaggcgtcgcgaaaccagcgcatggtcaggccggtaaagaagctgatcgattccgcctgcgccatgccgggaatcacgtgaggattaacgcgaatattcatctgcggatcggtgcgcacctgcggcaggttgaccacctgctgccagaaagtgccgccgagtaccgcggtttgcccggcgcgcaccaccccaaggcccaggcagccgagctggacgtcgccgccgcccatcaccaccggcgtcccggcgcgcaggccgctctgctgcgccgccgcttcggtgacggcgcccagcagggtaccggtctctttgaccggcgacagcatatcggcgcgcagcccggccatatccagcagcgccggacgccagtcgcggctgaacagatcgagcatgccggtggtgccggcgtttgacgggtcgaccgacagctcgccggaaagcttcgccgccagccagtcgctgatcatggtgatggttgccgctttgcggtagatatcggggcggtggtgcgccagccacagcaggcgcggcatggcgctgagcgccagggtttgtcccgagacctcgtatacctcggattcgaagcgatagtcgtggatctccttaagctccgccacttcgcggctggcgcgggcatcgacgttggcgcaggcccagatggcctcgccgttgcggtcatagagaacgatgccttcgcgcatcgaacagcaggcgacggactgaatatcggcggcagagagccgggcggcgtcgagcgcctggcgaatgcactggcaggccagctgccagttggtggtaaggtcgaactccatcgagccggggacgttatcaacgctcaggtgtttccattcggcctggcctaccgccagctggcggccattaagatcgaaaataaccgcccgaatgctgccggtcccggcatctaacgctaacaggtaactcatgacatgcgcctcgctgttgtcgcgcggcgccaggccgtcaggaggccagggtaagcaccgcgcgtgctgttgtctcttccgttaccaggccattaatgcgcttgccaatcagagcggcataaatcgcctgcgctttttcttctcccccggcgacgccaacgatggtcggcagctgcgctagctcatcaagggtcacgccgagcagttcccgatggatctccagtccttctaccggcctgccgtcggcctgcaggaaataacctaaaatgtcgccgaccgcgcctttgcgggcgtacatcagctgttcgccctcgctgatatagccggagcgtaaaatggtggcgtcgcgccgctgatcgatggcgccgatgccaaccaccgccgcgtccgccgccgtcgccgcgaggatcacgtcgcgcacgctcgactcgcggcgcaggatctcggcgacctccgccgaagagacccgcagcggcgccgggataatgctgacgctgcaggcggcatccagctggccaataccggtcatatacgggccgacgccgccggagagggtcaccagccgcacctgctgcgagccgataaagccgctgagatgctgcaggcagctcatggtggcttcgccgaagccgaccgccagcagctgtcccggctgcagaatgcccatcagcgactgcgccgcgccgatccccagccgggtattcatcggcggggtgttgagcgccggcagtacgcgggcaatcttgaggccaaaacgctgctggagttcactttccagcgccagacagccctcatagcgcgagttgatctgcacgcggatcaccccggactggcggcctttctccagcaggcgggaaatcttcagccgcggcagccccaaacgctcgccgatgtcattttgcgtcaggccgtcgtggtagtagcaccacgccacccgcgccaccagctcttcctcggctaacgccagcccggcgtagcggttctcttccgtaatgcgtttttcgctcataaattgaactcttataaaaatttagatcatatgttcgctattgcgcggccggaaagtgtgagccgactggcaaaacggatctttcatcgctggcccattttttcctgaggatctaaagcgccaaactgtgatcttcgcacggttgtaaatatagttcaccgtctacgcttttgaacattattaaatttaaaaatcatttgttcaaacgaggcgcgacgatgaagccactgcttgaagctcgccagatccgcaaacagttctccggcgttgccgtgctgaagggcatcgactttacgctatgcgcgggccaggtgcatgccctgatgggaggcaatggcgcgggtaaatcgacgctgatgaagatcatcgccggcgtcgaaaccccggatagcggtgagctgacgatcggcgaccgcgcgtttgcgcgcctcagcccggcgctggcccaccagctgggcatttatctggtgccgcaggagccgatgctgtttcccaacctcagcgtgcgcgagaacattctctttcgtttgccgaagcgggcggataccgccgcgcgactgcaggaaaaactgcagcagctgaactgccagatcaacctcgatgccagcgccagcacgctcgaggtagccgatcaacagatggtcgagatcctgcgcggcctgatgcgcgaagcgcggatcctgatccttgatgaacccaccgcctctttaaccccgggcgaaacggagaggttgtttagccagatccgcgcgttacaggcgctggacgtggggatcgtgtttatctcgcacaaactgcccgaaatccgccagcttgccagccatatttcggtgatgcgcgacggggcggtagtgctgagcggcgagaccgcaacttaccgcgatgagcaactgattagcgctatgacgccggccagccgcgaccatacgctgagcgacacgcaaaagctgtggctggcgctgccgggcaaccgccgcacccaggcgcaggattttcccgtgctgcgggtggaggatcttaccggagaaggctttatcgatctcaatctggagatccgcgccggggagatcgtcggcctcgccgggctggtgggatccgggcgcaccgaatttgccgaaaccttatacggcctgcgtccaccgcgcgccgggctgatctggctggagaatcgcgagattagcaatgacagcacccgcgcccggctggccagcgggctggtctatctgccggaagaccgccaggtctcggggctgtttcttgatgcgccggtgcgctggaacacggtgatgttcaatcagccgtcgtggtggcagcaggggaaacgggaggcggcggtggttgagcgctatcaccgggcgctggggatcaagctggccgatggcgatcagccggtgcgcactctctctggcggtaaccagcagaaggtgctgctggcgcgctgtctggaggccaacccgctgctgctaattgtcgatgagccgacgcgcggcgtggatgtctccgcccgcgccgatatctatcagctgctgaaaagcgtcgccgcgcaaaatgtggcagtgctgatgatctcctccgatctggatgagttcatcggcctggccgaccgggtgctggtgatgcatcagggccgctacagcggcgagctggcgcggcaggcggtgaccgtcgatcgcatgatgaccctggccttcggagggcaggcatgaaaacgttactcaagaatcgcgaactgagcgccttctttgccatcgtggcgctctttgttgtgctggtggcgctcaatccggcctatttcagcctgcagaccctggcgatgattttcgccagctcgcaaatcctctgcctgctggcattgggcgcgaccctggtgatgctgacccgcaatattgacgtgtcggtaggctccaccgttgggctatgcgccatcgccgtcggcgtggcgctgaacaacggctacgggttggcgacggccatcgccttcgcgctggctattggcgcgctggccggggcgtttaacggcctgctggtggtggggctgcgcattccggcgatcgtcgcgacgctcggcacgctggggttgtatcgcggggtaatgctgctgtggaccggcgggaaatggatcgagggcttgccagacagcctgaaatcgctctcggagcctgcgtttatcggcgtgtcgccgctgggctggctggtgctggcgctgctgctggcgggcggctggctgctgtcgcgcaccgcctttggtcgtgatttttacgccgttggcgataacctcgccgccgcgcgccagctgggcgtggcggtcaaccgcacgcggatgctggcctttaccctcaacggtatgctggcggcctgcgccgggatcgtcttcgccgcgcagattggttttgtgcctaatcagaccggcagcggcctggagatgaaagccatcgccgcctgcgtactgggcgggatctcgctgcttggcggtaccggtacgctgctcggcgcgtttctcggcgcctttttccttacccaaatcgacaccgtactggtgctgttccgccttcccgcctggtggaatgactttatcgccggcctggtgctgctcggcgtgctggtgctcgatggccgcctgcgccaggcgctggcccgccatcagcgggcgctaaagtacagccgtttccagccgggtaacaaaggggggaaacaggttgcccgctttcccgaacgcaaaagcaaagaggtggcttaaatgaagctgaagcttaactgggaaagcgcgctgctggcgttgctgatcgtggagatcctgctgttcggcgcgctgaatccgcgcatgctggatctcaatatgctgctctttagcaccagcgactttatctgcatcggcatcgtcgcgctgccgctgacgctggtgatcatcagcggcgggatcgatatttcgctgggctcgaccatcggcctgtgcgccatcgccctcggggtgatgacccaggcgggctggccgctgtggctcgcggtatcgctgacgttgctcttgggactgctgtgcgggttattcaacgccgcgctgatccactacaccggcatcagcccgctggtgatcacgcttggtacgctgtatctgtacggcggcggcgcgctgctgctttccgggatggccggcgcgaccggttacgaggggattggcggttttcccgatagcttcaccgccttcgccaatttaaccctcgccggactgccgctgccgctggtgctgttcgcgattatcacctctttcttctggctgctgacccatcgcgggcgctttggccgccacctctttttactcgggcaaaacccgcgcgccgcgcgctatgccgcgctgtcggtgaacggcatcccgtacgtgctgtatggcctggttggcgtcgcctcggcggtcgcggcgctggtgatggtttcctacttcggctcggcacgttcggatttaggccgcgacctgctgatgccggcgctgaccgcggcggtgctcggcggggccaatatttacggcggctcgggatcgatactgggttccgcgctggcggcattgctggtggggtatctgcaacagggtttacagatggtcggcatccccaaccaggtgtcgagcgcgctgtcaggggcgctgttggttgtggtggtgatggggcgttcgctgagcctgcaccgtgaatgggtgcgcgcgacctggcggcgtcttttctcgcataaaacaatcggagcataaaatgaaattaaaactgatcgtgctggcgctggcgatgagcgtggttaccgcgaaggcggcggaccgcatcgcctttattcctaagctggtcggcgtcggcttctttaccagcggcggcaacggcgcgaaagaggcggggaaagcgctgggcgtggatgtcacctatgacggcccaaccgagcccagcgtctccggccaggtgcagcttatcaacaacttcgtcaaccagggctacaacgcgattatcgtttccgctgtctcgccggacggcctgtgtccggcgctgaagcgggcgatgcagcgcggggggaaagtcctgacctgggattccgataccaggccggagtgccgcagcatctatatcaatcagggcacgccgcagcagcttggcggcctgctggtcgagatggcggaaaagcaggtgacgaagcctactgccaaggtagcgtttttctactccagcccgacggtgaccgaccagaaccagtgggtgaaggaagccaaagccaaaatcgaaaaagaacatccgcagtggcaaatcgtcaccacccagtttggctataacgatgccaccaaatcgctacaaaccgccgaggggatcttaaaagcctatccggatctcgacgccattatcgcgccggatgccaatgcgctgccggcggcggcgcaggcggcagagaacctcaagcgtcagggcgtggcgattgtcggctttagtacgccgaacgtgatgcgtccgtacgttgagcgcggcacggtgaaagcgttcggcctgtgggatgtggttcagcagggcaaaattgcggttaacgtcgccgatcgattactgaaaaagggcgatcttaacgtaggcgacagcgttgaggtgaaagatatcggttcgctgaaggtcgaaccgaacagcgtgcagggctatcagtatgaggcgaagggcaacggtatcgtgctgctgccggagcgcgtggtgttcagcaaagagaacatcaacaactacgacttctgacggaggatgagatggcagatttagacgatatcaaagaggggaaggacttcggcatcgaccgcccgcagcagaatacgctgtataccctgaaaggctgcggctcgctggattggggcatgcagtcgcggctggcgcgcatttttaatccgcacagcaaccgcacggtgatgctggccttcgatcacggctacttccaggggccaacgaccgggcttgagcgtatcgacctgtcgattgcgccgctgtttgccgacaccgacgtgctgatgtgcacccgcggcgtactgcgcagccaggtaccggcggccaccaataagccggtggtgctccgcgcctccggcggcaattcgattttgagcgaactctccaacgaatgcgtggcggtggcgatggaagacgcgctgcggctcaacgtatgcgcggtggcggcgcaggtctatatcggcagcgaatacgaacatcagtcgatcaataacatcatcaaactggtggacgccggcaatcgctacggtatgccggtcctggcggttaccggcgtcggcaaagagatgacccgcgatgcgcgctacttctcgctggccagccggattgccgccgaaatgggggcgcagtttgtgaagacctatttcgttgaggaaggctttgaaaaagtgaccgccagctgtccggtgccgatcgttatcgccggcggtaaaaaactgccggagcatgaggcgctggagatgtgctggcgggcgatcgaccagggggcttccggggtggatatggggcgcaatatcttccagtccagcgccccgcgcgcgatgctgaaggcggtgaaaaaggtggtgcatgagaatctgaacgcgcgcgaagcgtatcagttctggcaggaagaaaaacagggagagctgaaatgaacgtcacgctggtggaaatcaatattaaacccgagcgggtggatgagtttctcgaggtgtttcgcgccaaccacgagggcgcgctacaggagccaggcaacctgcgctttgatgtcctgcaggatcctgaggtgaaaacccgcttttttatctacgaagcctataaagacgatgaggcggtgctggcgcataagaagacgccgcactatttagcctgcgtcgaaaagctggaggagatgatgtcgcagccgcggcagaagcgcagctttatcggcctgttaccgcaggtgtgagggttatccttcaccctctcagagggagagggtgaaggacactttattacgcttcttcaaccgaaacgcgcagggccgccagcgccttgcgcgccgccttcagcacctgttcgcactgctcaagggtgagcgtcagcggtggttcaatgcggatcgtcttggcgttgtttaacgtcccggcgaccagcacccgctgtctgaacatctcgctggcaaagtcgtagccaatctcgttatcaacaaactcgatagccatcagcatgcctttcccgcgcacttcattcaccaggtccggatactcctgcgccagcaggcggaaaccgtccagcagcatatcgcctttctgcgccgcctgcgccggcaggttttgcgtcagcagcacgttgatcgtcgccagcgccgccgcacaggccaacgggttgccgccgaaggtggtggtgtgcaggaacgggttatcgaagagcaccgagaagacctcttccgtcgccaccgtcgcgccgatcggcatcacaccgccgccgagcgctttcgccagacacagaatgtccggctggacgttctcatgctcgcaggcgaacatcttgccggtgcggcccatgccggtctgcacttcgtcgaggatcagcaatgcgccaaactcgtcgcacagtttacgcaccgccggcaaataccccgttggcgggaggatcacgcccccttcgccctgaatcggctcgaggatcaccgccgcgacgtcgtcgccggttttcttgcactcgctcagcatggtgcgcatggcgttgatatcgccgaacggcacgtggcggaagcccggcagcagcggcataaagggtttgcggaaggtcgacttggcggtggccgacagcgcgcccagcgatttaccgtggaaggcgccgctggtggcgatgaaggtaaatttaccgcgcggcgactgataggctttcgccagcttgatggccgcctctaccgattcggtaccgctgttgcagaagaaactgtactttagtttcccgggcgttaaggctgccagggttttcgccagcatcgcgcgtagcgggtccagcagctcctgactgtgaagcggttgtttcgcgagttgattctcgacggcggataccacaactggattacggtgccctacattgaagatgccaaacccaccaaggcagtcgataaactcctgtccctgggtgtcgacaagcgtatttaaccctcccgcttgccactctacggctccgtaatccccgccggctgtgaccgattttcgatactctaaaaaccccggattcacatgctctttaaagtattccctgacctcctggttaagtgctttcatttcctcatgatcaagcgtgcgcttttcaatgagattcagtgcgtgtgcgctgcaggccagagccgatgcgctggaaggtaacctgttcaaaatgtgctcctggggcggacgtatcacacgatactggattaagtattgcagggattacgccagttcggcagaagcggtgaaaatcgggataaatgcaaagtaaaagacgaattgtgtaaaatttaatctcattgcgccactattggcacgttttattcctgagctgacgagattttctgcctggcggcaatagacggggcgatccgccgtggtgcgagctgccccagcgcggggcagccggtgatgaaaaaagaggcttagtcgagctgagagatctccatcgccgcccggtcaataatgccgatgatctgcttgagctgggcggcactgctggcctgctggttcactttcaggtcgaggaccgctttgaagttttccagcgcgcgcttcatctgcggatcgcggcgcagctcgcagccgaccatccgcgcctgcaggcgctcctggatatgggccaggtgctcctggttctcggcgtgcagctgttttccttcctcgctgataaggattttcttgcgtccgttgtcgtcttccacgctgataaggccctggtcctggagcagatccagcgtcggatagatcacccccgggctggggctgtagttcccctgggtaagcgtttcgatctctttgatcagctcatagccatggctggcgctgcggctgaggatatccagaatgatcagccgcagttcgccgtggccaaagaaacgctggcgacgtccgccgccgcggcggccatggtcgccgtgttcgctagggtcaccgtggcgcccgcgtggcccacgcccttcttcatgatgatgtcgcatggttacctcctgctgttttgatatatctaatttatatctaaaaaatgaatgttcgcaatgctggttgctatttattttttaatatattgatatatataaaattattttctgactgtggattttgatgcggtttgttttgactatatcaaaaaaagacttgcattcttattagttggcaatcattatcatttgcatcaagtttagatatatctatttaccgttcacgaaggcaatcgatgatgacaaaaaccaaagcagacaagtacccgcagcgtgtccgcaatgagctgcgtttccgtgagctgacggtgctgcgcgtggagcgcgcaggcgcggcgttccagcgtatcgtgctgggaggcgaggcgctggaaggcttcgcctctcacggctttgacgaccataccaagctttttttccccgagccgggcgcggcatttaccccgccgcaggtgaccgaggaggggattgactggggggaaggcgtgcggcctgccacccgcgactatacgccgctgtacgatgccgaacgtcacgagctggcttacgatttctatatccacgatggcggtatcgccagccgttgggcgctggaagcaaaagtgggcgataagctggtgatcggcggcccgcgtggctcgctggtggtgccggaagattatgcctggcagctgtatgtttgcgatgagtccggcatgccggcgctgcgccgtcgtctgctgggattacgccagctgccggcgaggccgcaggtgacggccatcgttactatcgccgatgcgtcgtataaagattatctggcggatctcgacggctttaacatcgagtgggtggtgggccacaatccggccttcgtcgccgagcgtctggcgcaggtgaaggtgccggcggaggattattttatctggctgaccggcgaaggcgcggtggtgaaatcgctgctggcgcgctttgaagacgagagcatcgatcagcagctggtgcgttcccaggcgtactggcacagcaagtaaaaagccatcgtggtaaaacccggatagcggcgcgtcgcgccttatccgggctaccggcggtgccgttttttgtcgggtggcggcttacgccttacccgacctgctattcggcggtgttacatcgccccgataagcgcagcgccaccggggaaggcttagcgttccgccagcgccttaaacaccatcgccaccgcgtgggcgccggggtccatgttgccgagcaggctatcgctgttgagataggacgcgcgtccggcgccggctttgcttgactggcaggtgcgatccgccccggcctgcgccgcggcgaaagcggcctgcagattctccggttcggccagcagcgccgccagggccggctgcagagcgtcgatcatcgtccggtctccctcatcggcgccgccgtaaaacttcatctgttccagaccggcgttcagcgcctcggccacgctggcgccttgccccagcttctgcccggcagcggtgaagaagatagacatcaataccccgctggagccgcccatcaccaccgtcaggcgttcgccgatcagcgcgaagagcgttggcagatcgttcaggggcagctgctgacgctcgagccgctcggcaatctcgcgcgccccggcggcgaaggtggagccggtatcgccgtcgcctactttggcatccagcgcgttgagatgttcttcaagatcgatgagggcgccggtcacctgcgccacgtaatcgcccacctgtgggttggccgagggcgtaaaatccacccgggcgctgtcgagggtggacggcacgacgttgatagtccgcggctgcaccggcttctgccagctggcggtttccacatccgaaagcagcgctttctcaatactctcctccagcacgatggtggtcagcgagaagcctttcatatccagcgccgtcaccagcgaggccgggcctattaaccagtcaatgcgcgcctgcagcggggtgttggccagctcgcgggtcagaatcgccatctcagccaccgacacgccgccgaggttattgagcatcaccgccaggcggccggtttccggtagggcggcggtcagtttttccaccatcaggttaacgatctccgcactgttttgcgtggcgatcgtcgaggcgcccggctcaccgtggatgcccattcccagctcggcgtgaccggcctgatggcgcggcgcgctggcggcttcctgcggcaggtggcagctggccagcgccaccccgatgctggcggtatggctggcggcgtattgcgcttcgcgcaggacggtggcgaggttgaagccgcgctcggcgaaatagccagccactttatgcaccagaatggtcccggcgatgccgcgcggctgtttgttatccggcagcgaaatatcgtcgccgacgatcagcatctccacgttgtagccgagtcggcgcgctttctccgccgccagaccgaagttaagccgatcgccggtgtagtttttgacgatcagcaggcagcccgcctcgccggtcactgcctgaatggcggtgagcaccgcgtcgacgcccggcgaggcgaacagatcgccgcagaccgcggcggtcagcatgcctttaccaataaagccgacgtgcgccgggtcatggccggcgccgccgccggagatcaccgccacgttgtttttattcagatcgcgacggaccaccacccggatcgccgggtcgctctccagacgggcggggttattccacgggctggcgataatggtaccctcaatcacatcgttgacgaggctggcgcgctggttaaaaaagaattgagacatagtggttcctgaagagtaagcgaaaactcaccctccggaggcaggcccccggagcggtaacggtcaacgtgaattttagtcacggataaggcgctggtggcgcatatcgagcacgatagtctcgccgggctgcacgctgttcagcgcctcgccctgctggctcagccaggcgatccccgccgcgcgggcgataatcgcgccgtgagcctgttcgctgccatcgcgcaggcacaggcctttaacgaagctggcatccagctgtaagacggttgagggataaatgttgtcggcaataataattgttggctcgccgggcgtcggcactctctcctgaacgccctgcagatggcgcagggtgcgctgcaaaatatcttcgatatcgatatagcgcgcctgcaggtaggggtcatccagctggcgatactgctggctgagctccatcaacacctgatgccatgcccattccgccgtgcattgttcggtgagcagacgatcgttggcggcatcaaacagatcgtcatcgtcgagcagggtgtggtgcccggcgaagatcgccgcgatatcggcgtgaaatttattttccgccagctcggtcagggcgataagatccgccagcgtctggtcaatggcctggcgcaggcgctgctgctcgcgggcggcatcggcggcagccgggcggagcggctggatcagggccagcggatagcgcagggcagcgccttcgacgcgctcgggcgttgccggagccgctgccggttgcgccgcaggcgattcaccgaagttatcggcggccagcgcctgaaacgccgccagcgccgcgtcggcatccggaccgcgggccagcaggcgcagcttatcgttgcggcggacctgcaatagcgcgatttggttgaggctgtccggtttgacgcacttcccgtttttctccagcagcagatcggcgttaaagcccgccagcgcggcgaccagcttcgacgccggacgcacgtgcaggccgttatgattgttaataatgactgacaccgattttgtgtcgccgtcgtcggcaagcatcggcgccggcgcggcgtcagaagttggcgaaggtaaacccagctgaacccgcttggcctccagggcgctcatggcgtcggcgatcaccttgtcgatccccgcgccggaggcagcgctgacggtggccgccagcgccccttccaccagcggcgcggcgcacagtcgcaccttcgcggcaatcgccggatcgagcagatcgagggcggtttcggcgctgagcaacgcgctgccgatatccatcatcaccagcacgtgatcggtatcggccacggattcgatcgcctccatgactttaagcggatcggtgccgatcgggctgtcgggatcgtcgatcccggcggcgatcgccagtttgcagccatcgttgattaacatctgccgggccagttctccgacaccttcgcccagccgggcgctatgagaaacaataaccaggtttaccatcgcaatttccttactctttggcggcggcggccagcatctgaaccataaacagcaccgaggtcgcgccgggatcctgatgtccgatgctgcgctcgccgagatagctggcgcggcctttacgcgcctgcatagtgatggtggcgtgggccgcacgctcggccacttcgcaggcggcatccagcgcggcggcgatcgacaggtgctgctcgctggactggcgcagggagtccaccaccggcagccagacgtcgcacatggttttatcccctggctccgctttgccgcggttgacgacaccgtccgcaccttcgcggatcatcaggtacagctcgtcgagcgtcaggctctggtgggcctgggtcacctgcgcggcgcgaatgaagaaggtgccgaacagcgggccgctggcaccgccgacgttggagagcagcgtcatgccggtgtttttgaggataaagccaatatctttatcggcaatcgacggcagcttttcgaccactttactgaaaccgcggtgcatattgagaccgtggtcggcgtcgccaatctctttatcgaggccggtgagaaaatcgctctctttggtgaaaatatcgccgcagcggtacagccagtcgacgatttgcgttctgttcagtgacatgtcgtgctccttagtttccccagttcagcgccggggtgtgaaccggggcgtcccatagcgtcagcgtctcgtcatccactttcagcagagtgatggagaagcccgccatatccagcgaagtacagtagctgccgatgaggttgcgttcgatgatgatgccggacgcttcgcagcgctgggcgaggcggttatacacgccatacagttcggaaagcggagtggcgccgaggttattaaccagcgcgataacccggtcgccgttttgcagcgcggttttgctctgctgcacttcctgccacgcgcccttgacggtatcccactggcgcagcgtgcggctgtaagcgccgttttccagcagggtatcgaacatctcatcgacggtttggtccagcgagctgaagcggcggcggtcgatgcccggctcgccgtgaatgccgacgccgaactccatctcgtcatctttcagcgtaaaggagggttgcccggcagccggtacggtgcaggcgccgagggcgataccaatcgagtggccgagattgttcaggcggcggcccagttcagcgcaggcttccagcgagtcgccgcgctcggcggcggcgccgaccagtttttcgatcagtacggtgttggcaacgccgcgacgaccggcggtatagaggctgtctttcactgccacgtcgtcgtcgaccaccacggtggtgactttaatgccgctctcatgcagcagctcggtggcggtctcaaaattcaggatgtcgccggtatagtttttgataattagcaagacgccttcgccgccgtcaatttgcatcgcgcattcaaacattttgtccggcgtcggcgaggtgaagatttcccccggacaggcgccggagagcatgccctggccgatatagccgcagtgcatcggttcatgtccgctgccgccgccggagagcagggccaccttgccagccaccggcgcgtcggtgcgggtcacatacagcgggtcctgatgcagggtcagctgcggatgggctttagccagcccctgtaattgttcattcagtacatcttcaacacggttaatcagctttttcattattcagtgctccgttggagaaggttcgatgccgcctctctgctggcggaggcggtcatcgcgtaggggtatcgtctgacggtggagcgtgcctggcgatatgatgattctggctgagcggacgaaaaaaagaatgccccgacgatcgggtttcattacgaaacattgcctccttgttttgtttctttatggaacgtttttgctgaggatatggtgaaaatgcgagctggcgcgctttttttcttctgccataagcggcggtcaggatagccggcgaagcgggtgggaaaaaattttttgctgattttctgccgactgcgggagaaaaggcggtcaaacacggaggattgtaagggcattatgcggcaaaggagcggatcgggatcgcaatcctgacagagattagggttttttgttccaatatggaacgtaaaaaattaacctgtgtttcatatcagaacaaaaaggcgaaagatttttttgttccctgccggccctacagtgatcgcactgctccggtacgctccgttcaggccgcgcttcactggccggcgcggataacgccagggctcatcatgtctacatgcgcacttatttgagggtgaaaggaatgctaaaagttattcaatctccagccaaatatcttcagggtcctgatgctgctgttctgttcggtcaatatgccaaaaacctggcggagagcttcttcgtcatcgccgacgatttcgtaatgaagctggcgggagagaaagtggtgaatggcctgcagagccacgatattcgctgccatgcggaacggtttaacggcgaatgcagccatgcggaaatcaaccgtctgatggcgattttgcaaaaacagggctgccgcggcgtggtcgggatcggcggtggtaaaaccctcgataccgcgaaggcgatcggttactaccagaagctgccggtggtggtgatcccgaccatcgcctcgaccgatgcgccaaccagcgcgctgtcggtgatctacaccgaagcgggcgagtttgaagagtatctgatctatccgaaaaacccggatatggtggtgatggacacggcgattatcgccaaagcgccggtacgcctgctggtctccggcatgggcgatgcgctctccacctggttcgaggccaaagcttgctacgatgcgcgcgccaccagcatggccggaggacagtccaccgaggcggcgttgagcctcgcccgcctgtgctatgatacgctgctggcggagggcgaaaaggcccgtctggcggcgcaggccggggtagtgaccgaagcgctggagcgcatcatcgaggcgaacacttatctcagcggcattggctttgaaagcagtggcctggccgctgcccatgcaatccacaacggtttcaccattcttgaagagtgccaccatctgtatcacggtgagaaagtggccttcggtaccctggcgcagctggtgctgcagaacagcccgatggacgagattgaaacggtgctgggcttctgccagcgcgtcggcctgccggtgacgctcgcgcagatgggcgtcaaagaggggatcgacgagaaaatcgccgcggtggcgaaagccacctgcgcggaaggggaaaccatccataatatgccgtttgcggtgaccccggagagcgtccatgccgctatcctcaccgccgatctgttaggccagcagtggctggcgcgttaattcgcggtggctaaaccgctggcccaggtcagcggtttttctttctcccctccggcagtcgctgccggaggggttctctatggtacaacgcggaaaaggatatgactgttcagactcaggataccgggaaggcggtctcttccgtcatcgcccagtcatggcaccgctgcagcaagtttatgcagcgcgaaacctggcaaacgccgcaccaggcccagggcctgaccttcgactccatctgtcggcgtaaaaccgcgctgctgaccatcggccaggcggcgctggaagacgcctgggagtttatggacggccgcccctgcgcgctgtttattcttgatgagtctgcctgcatcctcagccgttgcggcgagccgcaaaccctggcccagctggctgccctgggatttcgcgacggcagctactgcgcggagagcattatcggcacctgcgcgctgtcgctggccgcgatgcagggccagccgatcaacaccgccggcgatcggcattttaagcaggcgctacagccatggagtttttgctcgacgccggtgtttgataaccacgggcggctgttcggctctatctcgctttgctgtctggtcgagcaccagtccagcgccgacctctccctgacgctggccatcgcccgcgaggtgggtaactccctgcttaccgacagcctgctggcggaatccaaccgccacctcaatcagatgtacggcctgctggagagcatggacgatggggtgatggcgtggaacgaacagggcgtgctgcagtttctcaatgttcaggcggcgagactgctgcatcttgatgttcaggccagccaggggaaaaatatcgccgatctggtgaccctcccggcgctgctgcgccgcgccatcaaacacgcccgcggcctgaatcacgtcgaagtcacctttgaaagtcagcatcagtttgtcgacgcggtgatcaccttaaaaccgattgtcgaggcgcaaggcaacagttttattctgctgctgcacccggtggagcagatgcggcagctgatgaccagccagctcggtaaagtcagccacacctttgaacagatgtctgccgacgatccggaaacccgacgcctgatccactttggccgccaggcggcgcgcggtggcttcccggtgctgctgtgcggtgaagagggggttgggaaagagctgctgagccaggctatccacaatgaaagcgaacgggcgggcggcccctatatcgccgtcaactgccagctatatgccgacagcgtgctgggccaggactttatgggcagcgcccctaccgacgatgaaaatggtcgcctgagccgccttgagctggccaacggcggcaccctgtttctggaaaagatcgagtatctggcgccggagctgcagtcggctctgctgcaggtgattaagcagggcgtgctcacccgcctcgacgcccggcgcctgatcccggtggatgtgaaggtgattgccaccaccaccgtcgatctggccaatctggtggaacagaaccgctttagccgccagctgtactatgcgcttcactcctttgagatcgtcatcccgccgctgcgcgcccgacgcaacagtattccgtcgctggtgcataaccggttgaagagcctggagaagcgtttctcttcgcgactgaaagtggacgatgacgcgctggcgcagctggtggcctactcgtggccggggaatgattttgagctcaatagcgtcattgagaatatcgccatcagcagcgacaacggccacattcgcctgagtaatctgccggaatatctcttttccgagcggccgggcggggatagcgcgtcatcgctgctgccggccagcctgacttttagcgccatcgaaaaggaagctattattcacgccgcccgggtgaccagcgggcgggtgcaggagatgtcgcagctgctcaatattggccgcaccaccctgtggcgcaaaatgaagcagtacgatattgacgccagccagttcaagcgcaagcatcaggcctagtctcctcgatacgcgccatggagaacagggcatccgacaggcgattgctgtagcgtttgagcgcgtcgcgcagcggatgcgcgcggtccatggccgtcagcaggcgttcgagccgacgggactgggtgcgcgccacgtgcagctgggcagaggcgagattcctccccgggatcacgaactgttttaacgggccgctctcggccatattgcggtcgataagccgctccagggcggtgatctcctcttcgccgatcgtctggctcaggcgggtcaggccccgcgcatcgctggccagttcagcccccagcacgaacagcgtctgctgaatatggtgcaggctttcccgcagcccggcgtcgcgggtcgtggcgtagcagacgcccagctgggatatcagttcatcgacggtaccgtaggcctcgacgcgaatatggtctttctcgatgcggctgccgccgtacagggcggtggtgcctttatccccggtgcgggtatagatacgatacattcagtttctctcacttaacggcaggactttaaccagctgcccggcgttggcgccgagcgtacgcagatgatcgtcgctatcggtgacgtgtccggtagccaacggcgcgtccgccggcagctgggcatgagtgagggctatctcgccggacgcgctgagcccgatacccacccgcaggggcgagcttctggccgccagggcgcccagcgcagcggcgtcaccgcctccgtcataggttatagtctggcaggggaccccctgctcctccagcccccagcacagctcattgatggcgccggcgtggtgcccgcgcggatcgtaaaacaggcgtacgcctggcggtgaaagcgacatgacggtcccctcgttaacactcagaatgcctggcggaaaatcgcggcaatctcctgctcgttgcctttacgcgggttcgagaacgcattgccgtctttcagagccatctccgccatgtaggggaagtcggcctcttttacccccagatcgcgcagatgctgcggaataccgatatccatcgacagacgcgtgatagcggcgatggctttttccgccgcgtcgagggtggacagtccggtgatattttcgcccatcagttcagcgatatcggcgaatttctccgggttggcgatcaggttgtagcgggccacatgcggcagcaggacagcgttggccacgccgtgcggcatgtcgtacaggccgcccagctggtgcgccatggcgtgcacgtagccgaggttggcgttattgaaagccatcccggccagcagagaggcataggccatgttttcccgcgcctgcagattgctgccgagggccacggcctggcgcaggttgcgggcgatgaggcggatcgcctgcatggcggcggcgtccgtcaccgggttagcgtctttggagagataggcctctacggcgtgggtcagggcatccatcccggtcgccgcggtcagggcggccggtttaccgatcatcagcagcggatcgttgatagagaccgacggcaggttgcgccagctgacgatcacaaacttcactttggtttcggtgttggtcaggacgcagtggcgggtgacctcgctggcggtgccggcggtggtattgaccgcgacgataggcggcagcgggttggtcagggtctcgattccggcatactggtacagatcgccctcatgggtggcggcgatgccgatgcctttgccgcaatcgtgcgggctgccgccgcccacggtgacgatgatgtcgcactgttcgcggcgaaacacggcgaggccgtcgcgcacgttggtgtctttcgggttcggctcgacgccgtcaaagatcgccacctcgatcccggcctcccgcagataatgcagggttttgtccaccgcgccatctttaattgcccgcaggcctttgtcggtgaccagcagggcttttttcccccccagcagctggcagcgttcgccgactacagaaatggcgttggggccaaaaaagttaacgtttggcaccagataatcaaacatacgatagctcataatataccttctcgcttcaggttataatgcggaaaaacaatccagggcgcactgggctaataattgatcctgctcgaccgtaccgccgctaacgccgacggcgccaattacctgctcattaaaaataactggcaggccgccgccaaaaataataattcgctgttggttggttagctgcagaccgtacagagattgtcctggctggaccgctgacgtaatttcatgggtaccttgcttcaggctgcaggcgctccaggctttattcagggaaatatcgcagctggagacgaaggcctcgtccatccgctggataagcagcgtgttgcctccgcggtcaactacggaaaacaccaccgccacgttgatctcagtggcttttttttccaccgccgccgccatttgctgggcggcggccagggtgattgtctgaacttgttggctcttgttcatcattctctcccgcaccagggtaacgctggcgcgaatagtcagtagggggcgatagtaaaaaactattaccattcggttggcttgctttattttagtcagcgttattttgtcgcccgccatgatttagtcaatagggttaaaatagcgtcggcaaaacgtaattaagggcgttttttattaattgatttatatcattgcgggcgatcacattttttatttttgccggcggagtaaagtttcatagtgaaactgtcggtagatttcgtgtgccaaattgaaacgaaattaaatttatttttttcaccactggctcatttaaagttccgctattgccggtaatggccgggcggcaacgacgctggcccggcgtattcgctaccgtctgcggatttcaccttttgagccgatgaacaatgaaaagatcaaaacgatttgcagtactggcccagcgccccgtcaatcaggacgggctgattggcgagtggcctgaagaggggctgatcgccatggacagcccctttgacccggtctcttcagtaaaagtggacaacggtctgatcgtcgaactggacggcaaacgccgggaccagtttgacatgatcgaccggtttatcgccgattacgcgatcaacgttgagcgcacagagcaggcaatgcgcctggaggcggtggaaatagcccgtatgctggtggatattcacgtcagccgggaggagatcattgccatcactaccgccatcacgccggccaaagcggtcgaggtgatggcgcagatgaacgtggtggagatgatgatggcgctgcagaagatgcgtgcccgccggaccccctccaaccagtgccacgtcaccaatctcaaagataatccggtgcagattgccgctgacgccgccgaggccgggatccgcggcttctcagaacaggagaccacggtcggtatcgcgcgctacgcgccgtttaacgccctggcgctgttggtcggttcgcagtgcggccgccccggcgtgttgacgcagtgctcggtggaagaggccaccgagctggagctgggcatgcgtggcttaaccagctacgccgagacggtgtcggtctacggcacggaagcggtatttaccgacggcgatgatacgccgtggtcaaaggcgttcctcgcctcggcctacgcctcccgcgggttgaaaatgcgctacacctccggcaccggatccgaagcgctgatgggctattcggagagcaagtcgatgctctacctcgaatcgcgctgcatcttcattaccaaaggcgccggggttcaggggctgcaaaacggcgcggtgagctgtatcggcatgaccggcgctgtgccgtcgggcattcgggcggtgctggcggaaaacctgatcgcctctatgctcgacctcgaagtggcgtccgccaacgaccagactttctcccactcggatattcgccgcaccgcgcgcaccctgatgcagatgctgccgggcaccgactttattttctccggctacagcgcggtgccgaactacgacaacatgttcgccggctcgaacttcgatgcggaagattttgatgattacaacatcctgcagcgtgacctgatggttgacggcggcctgcgtccggtgaccgaggcggaaaccattgccattcgccagaaagcggcgcgggcgatccaggcggttttccgcgagctggggctgccgccaatcgccgacgaggaggtggaggccgccacctacgcgcacggcagcaacgagatgccgccgcgtaacgtggtggaggatctgagtgcggtggaagagatgatgaagcgcaacatcaccggcctcgatattgtcggcgcgctgagccgcagcggctttgaggatatcgccagcaatattctcaatatgctgcgccagcgggtcaccggcgattacctgcagacctcggccattctcgatcggcagttcgaggtggtgagtgcggtcaacgacatcaatgactatcaggggccgggcaccggctatcgcatctctgccgaacgctgggcggagatcaaaaatattccgggcgtggttcagcccgacaccattgaataaggcggtattcctgtgcaacagacaacccaaattcagccctcttttaccctgaaaacccgcgagggcggggtagcttctgccgatgaacgcgccgatgaagtggtgatcggcgtcggccctgccttcgataaacaccagcatcacactctgatcgatatgccccatggcgcgatcctcaaagagctgattgccggggtggaagaagaggggcttcacgcccgggtggtgcgcattctgcgcacgtccgacgtctcctttatggcctgggatgcggccaacctgagcggctcggggatcggcatcggtatccagtcgaaggggaccacggtcatccatcagcgcgatctgctgccgctcagcaacctggagctgttctcccaggcgccgctgctgacgctggagacctaccggcagattggcaaaaacgccgcgcgctatgcgcgcaaagagtcaccttcgccggtgccggtggtgaacgatcagatggtgcggccgaaatttatggccaaagccgcgctatttcatatcaaagagaccaaacatgtggtgcaggacgccgagcccgtcaccctgcacgtcgacttagtaagggagtgaccatgagcgagaaaaccatgcgcgtgcaggattatccgttagccacccgctgcccggagcatatcctgacgcctaccggtaaaccattgaccgatattaccctcgagaaggtgctctctggcgaggtgggcccgcaggatgtgcggatctcccgccagacccttgagtaccaggcgcagattgccgagcagatgcagcgccatgcggtggcgcgcaatttccgccgcgcggcggagcttatcgccattcctgacgagcgcattctggctatctataacgcgctgcgcccgttccgctcctcgcaggcggagctgctggcgatcgccgacgagctggagcacacctggcatgcgacagtgaatgccgcctttgtccgggagtcggcggaagtgtatcagcagcggcataagctgcgtaaaggaagctaagcggaggtcagcatgccgttaatagccgggattgatatcggcaacgccaccaccgaggtggcgctggcgtccgatgacccgcaggcgagggcgtttgttgccagcgggatcgtcgcgacgacgggcatgaaagggacgcgggacaatatcgccgggaccctcgccgcgctggagcaggccctggcgaaaacaccgtggtcgatgagcgatgtctctcgcatctatcttaacgaagccgcgccggtgattggcgatgtggcgatggagaccatcaccgagaccattatcaccgaatcgaccatgatcggtcataacccgcagacgccgggcggggtgggcgttggcgtggggacgactatcgccctcgggcggctggcgacgctgccggcggcgcagtatgccgaggggtggatcgtactgattgacgacgccgtcgatttccttgacgccgtgtggtggctcaatgaggcgctcgaccgggggatcaacgtggtggcggcgatcctcaaaaaggacgacggcgtgctggtgaacaaccgcctgcgtaaaaccctgccggtggtagatgaagtgacgctgctggagcaggtccccgagggggtgatggcggcggtggaagtggccgcgccgggccaggtggtgcggatcctgtcgaatccctacgggatcgccaccttcttcgggctaagcccggaagagacccaggccatcgtccccatcgcccgcgccctgattggcaaccgttccgcggtggtgctcaagaccccgcagggggacgtgcagtcgcgggtgatcccggcgggcaacctctacattagcggcgaaaagcgccgcggagaggccgatgtcgccgagggcgcggaagccatcatgcaggcgatgagcgcctgcgctccggtacgcgacatccgcggcgaaccgggcactcacgccggcggcatgcttgagcgggtgcgcaaggtaatggcgtccctgaccggccatgagatgagcgcgatatacatccaggatctgctggcggtggatacgtttattccgcgcaaggtgcagggcgggatggccggcgagtgcgccatggaaaatgccgtcgggatggcggcgatggtgaaagcggatcgtctgcaaatgcaggtcatcgcccgcgaactgagcgcccgactgcagaccgaggtggtggtgggcggcgtggaggccaacatggccatcgccggggcgttaaccactcccggctgtgcggcgccgctggcgatcctcgacctcggcgccggctcgacggatgcggcgatcgtcaacgcggaggggcagataacggcggtccatctcgccggggcggggaatatggtcagcctgttgattaaaaccgagctgggcctcgaggatctttcgctggcggaagcgataaaaaaatacccgctggccaaagtggaaagcctgttcagtattcgtcacgagaatggcgcggtggagttctttcgggaagccctcagcccggcggtgttcgccaaagtggtgtacatcaaggagggcgaactggtgccgatcgataacgccagcccgctggaaaaaattcgtctcgtgcgccggcaggcgaaagagaaagtgtttgtcaccaactgcctgcgcgcgctgcgccaggtctcacccggcggttccattcgcgatatcgcctttgtggtgctggtgggcggctcatcgctggactttgagatcccgcagcttatcacggaagccttgtcgcactatggcgtggtcgccgggcagggcaatattcggggaacagaagggccgcgcaatgcggtcgccaccgggctgctactggccggtcaggcgaattaaacgggcgctcgcgccagcctctctctttaacgtgctatttcaggatgccgataatgaaccagacttctaccttaaccgggcagtgcgtggccgagtttcttggcaccggattgctcattttcttcggcgcgggctgcgtcgctgcgctgcgggtcgccggggccagctttggtcagtgggagatcagtattatctggggccttggcgtcgccatggccatctacctgacggccggtgtctccggcgcgcaccttaatccggcggtgaccattgccctgtggctgttcgcctgttttgaacgccgcaaggtgctgccgtttattgttgcccagacggccggggccttctgcgccgccgcgctggtgtatgggctctatcgccagctgtttctcgatcttgaacagagtcagcatatcgtgcgcggcactgccgccagtcttaacctggccggggtcttttccacgtacccgcatccacatatcacttttatacaagcgtttgccgtggagaccaccatcacggcaatcctgatggcgatgatcatggccctgaccgacgacggcaacggaattccgcgcgggccgctggcgccgttgctgattggcttgctgatcgccgtgatcggcgcgtcgatggggccgctaaccggctttgcgctgaatccggcgcgcgacttcggcccaaaactgtttaccagtctggccgggtggggctcgatcgcttttaccggtggcctagcgatcccttactttctggtgccgctgctggcgccggtggtgggggcgattatcggggcgtttttgtatcgcaagcttatcggccgccatctgccgtgcgaatgcggtatcgatgagtaaagcgggacccgccgcagcgcggcgggtttccccggcctgatgccgggggggttattttttgatgaccgcgctgagatcgccaagtttagcggcggggttcttgtggcactcctgcagcattttcggtaccgaaacggtctcgacttcatgccagtcaacatagtcgccgccgctaaagtcggtgttgcgattcactacccagaaggccaccggggtcatgctttttgggttcatatccataaattcctgacaggtcatattctgcggcgtggtttcctcaaccgcgaacgccgggctggtcatcagacagaatgtggtagccgccacggtcaatacgagtgctttaggtaaattcattttcttctccagtgtcaaaatagggcttaagcctcagcgtgcttcattttattgcgcaggaccaacaagccgatggcgctaaatatcatttcaacgccgataaaggcggtaataaataaccagctttgctgcgggttcatggccagccacaggcaggcgataagtaaatccaacaggccgataaaaatattccagccagcgccgctttgtttgcgggtttgacatccgttaacgatgcgggaaataccgccgagaacaaataaaaagccaaataaaatggccagactgctcataccgttgaggggattgacgacaaagctcaggccgagcacgatccaggcgatggcgaagatcagcgccaccaggcgtgatttccagtgctgctggcggaagacaatcaggctgtacagcgaatagaagccgcagatcatcaataacatgccggttactgtggcgagataccagccggcgaccaacggccaggccagacaacaggctccgcagataaacagcaataccgccatcaggcaggcatgccgtttatatcgaatgaagacgcgtgggctaaacgcatttaaggtgtaatggctaaacataaacataattgctccgcagatcccggttggcggcctgacgctgaataaaaagcgtgagggtttattcagcgggccaaaagaaaggtctgaggaaaatagtaggccgcgcgatcggcaggcgtaaataagagcgccgaggccactttatacgcctggtctgacagctgtcagaccaggcccgcaatattacttccgggctctgattctcaatgcccgcgatattttttaagctggctgcgtttggtgatgcttaccgattttaatcaggagtcaacgatgaaaaaagtcattctggcgagcctgctggcaaccatgatgagtacctctccggtatgggcaacagatagcgcgacggcagcgccagccgcgccagccgcggcagccacgacgcaggtacagaaagaagccgccgatgtgctgcaggtggcggtgcagggcgcgaatgcgatgcgcgacatccagttcgcccgtctggcgctgttccatggccagccggatagcgccaaaaaactgacagacgacgccgccgcgctgctggccgccgatgatgccagctgggcgaagtttgtgaaaactgatgctaaagccaaaatgatcgccgatcgctatgtgatcattaacgcctctatcgccctgtctgaagactatgtggccacgccggaaaaagagagcgctatccaatccgccaacgaaaagctggcgaaaggcgatcagaaaggggctatcgataccctgcgcctggccggtattggggtgattgagaaccagtatctgatgccgcttaaccagacccgtaaggcggtagcgcaggcgcaagaactgctgaaagccggtaaatattacgaagcgaatctggtgctgaagggcgctgaagagggcattgtggtggatagcgagatgctggtggcaggcaactgatacttgttccaccctgagagagcgcagaggaaaaaactgacaaggatgtccccttaacgctcgggcaggcggactgcccgagcggaacggctagcggccgatcagggcgtcgatttcgccatcgatctcgcgcatgacgccggtgatgcgctgtaccacctccagacagcttgccggcgtcagcgaatcaggccgctttgcctcaaaaggggcgcacagttgttgtagcgcagtaatccccagaatttgtgctgaaccgtgcaggcggtgcagcgcccgcagaaaggtctgcggctcatgccgggcgattgcctgtccggcagcctgtaaatccgcggccgacgcatcgcggaacgtctccagcatctcattcatcagcgcctggtctccccccgtattctcgctcagcacgctgagcttcaggtgccgggtagcgtgaggtgatgcgcggcccaccgctaaacggctgagctcatgactcagcgtctggaccgacaccggcttaaacagacacatattcatgccgctggccagacacgcctcccgcgactgcggcagcgcgctggcagtcacgccccaaattaccaggcccggatagcgacggcgtagcgaggccgccagcgccaggccatctttcttcggcatattgagctccgttatcagcagatcgtaatgtttgctggcgagcttattctctgcctcttcaccgtcgcaggcttcatcgacgctatagccgatagtgctgagctggcgcttgagcagtagccggttggtggggtgatcgtccgctatcagtatcgccagcccgggtagagcctgcggtctggcgggcgacgcctgcggcgcgtggatcgcgcagcggctcgccttgaccggcagcgtgatggtgaaagtggtccccacgcccggacggctgaccatctccaggcgaccctgcatcagcgcaaccagctctttgcaaatgaccagccccagtccggagccggtctgctgtcgtccctggcgcgcctgggcatagcggtggaagagggtggcctgctctgcttcactgatcccgcagccgctgtcgctaaccatgagggccagctctccctgtgtctcattcgccggcgtcagccggcaggagacctgaattgcgccttcgacggtaaacttcagcgcattgccgatgagattattgaggatttgccgtagcgcctgcgggtcgacccacagcatggtaccttcctgcagcgcgttatggtagtgcagatcgatgcccttttgctgcgccagcgcgtcgaaggtatgacactgctgcgacactaactgtgcgacatcgctccactgcggggtaacctggtattttcccgattcaatcttgtcgatatcaagaatattgccgataagtcccagcagggtttgcgccgtcgaccccgccagctcgatcgcctctttacgctggccgacgttcagctcaggtttcgccagcagctccagaaagccgacgatggcgctcaccggcgtgcgcagctcgtggctcatgctggccagaaagcggctcttggcttttgtcgcctgaatcgctttgtctttttcgcgctccagcgcacaggagagggcctccttctgcgccagctcctcctcgagccgctgctgggagtctttacgtttgcgcacttcccgacacagggagagtccccagccgaggctgatggcgatcagcaccagcgcaaaggcgatcagctggtaaaactggcggctgtactggctccagttctctatttgctgactggagattttcgaccacttctcggtcatctgcagaatatcccgtggcggaataacctgcagcgctttgttaagaatggcggccagcaccggttcatcgcgcgggatggccagccgaatggccgcgacggggagtccatcaatgcgggtgtagtgcagaccctgtggatagtagtggtcgatcatatagcgggcggaaagctccgaggctacggcggcatccacttcgccttcctctaccatcttcatggcgacgccaacgttatccgtttccacccagttaatcagcggaaaacgcgctttcagatcatgggcggcgataggcccgaccggcagggcgatccgcgccgagcgcgtcagcagatgctggtcgggggcgctgccgcgggcgaccagcacaaaggccacgttaatgagcggatcgctgagggtgacgtaggcctgcggctgtggggtcagggtggcggcgggcatgatcgcccagtcctctttttccatgcgctttgccagagcctgacggttgcgcaccagaatggggtcaaactgcaggccggtctggagtgagacaatattcagcatatcggccatgatgccgcgcagttcatcctcgttatccaccagggtaaatggcggaaaataggggttcaccagcaggcggacgcgacgatgcttctgcagccagcgctgctcttcggggctaaaggtaagcggggtattgagaaacgacagatcgccacggttgagccagttttgcatgatccgcatcgcggtgtcgctgtcgacggcatggataaaacggtcgaagagttgatgcagctctggccgatcgtcacgggtgacaaagcggttgtgttgctcctgctgacgaaaatagtgcgcgataaccagcgattgcgagaaatatttcgagatgcagtggccagtggtgatgttgttgccgataaaatactgattctcgccgctgaccaccgaggcgagagcctgatagtcgctatcataaagggtgattttggcgttgggaaacgcctgctgaataatatcgaaaaaagcgcaatcgcgggtgcaggccagcgtgacgcggcggtcagtggtcagcggcggcagaggggatttcagcgaggtgaccagcgtcggccaggttttaagcagcggcgcggattgatccaggcccggggcgagcgcatcccggtgcgccacctgagtgagcagggtatccacctgacggtcggccagggcggtgagcgcctgctgctcggtgtcatactggcggataatcaccttcagtccgaggctgtgcgccatcagcgccagatagtcggcgttaatgccctgataacttttctcgtcgccgtcatagacgatgggcgtcctctcgggaagccaggtcccgacggtcagcgtaggctgcgccgccagccatgctttctccttaccgctaagcgggatatcgatcgccgcgatatgagaatggctcttcagctccagctgtttcatggcatacgcggcaggcgagaggctcagcgccagcccgacaacgacggataaaataagacgaaccgccatgccatcaccctattttattgcgttgcgcaaagtcatatagctcaagcagggtgctgcagcctaatttatccatcagacggaccttataggtacttaccgttttattgctgatattcattttgctgccgatggtggtgtagtcgacgccgctgagaatatagcggaacaccttcatctcctgcgttgacagcgtatccagccggtcctgatcggtgatgccgtgggtgcagaagcgttccagtgaaaaggggaaatagctgtagccattattggctgcgtcgattgcggcgaggatattattcattccctcttttttactcacaaaaccatttgctccgcagtcggcgctgcgtttgccgtagaacagttcattcttagcggaaatgatgatgattgttccctggtagcggcgtttgcgcagctgctccagcacctcgataccgctgagctccggaatatcgacgtcgacgatgagcaggtcaggctgcatgctttccgcggtctgcacggcatgagcgccgctgtcgagctctgccgcgacggtaataccgttgctgtcgagaaggttgcgaatggcgatacgtgccaatggatgatcgtcaatgattatcgcattcatgggggcgtaaatcctgatatgaaaaaagaagggcgatgcctggtgcaggtgcggcgggggttatttttatcgatgccgttataaggcgtaattgtaacacaaatcgttttgggccagggaaatattgtggagctgagccagacgaatatatttgcatagctggatgacagctgtaggaacgggcgttcacttgcttcagcgcggtctgctgttaaaaaaaatgcaaacgattaatctgctcttattaaggtgagttctcggaatatcgtccggcgacaactggcaggtaaaataataacaatggcgaaagaaaaacgcgccttctggcgaaaatgggtttggaaacatctgatggcaggaataacagtactggcaatgagtagcgccgcggtgggaaaggatgtcgaccccgatgaggcgcggacccgagatatgatgcgctgtcaggattatctgcaactggatccgcgcgcctggacgccgatggtgatttggctgatgaacgatcctttttcactggagccgccggagtggaccgacttccatgaagccgagctggtgctgacgccgatcctcaccgaaatctgccgtcaggagccggatgtctggctcacctcgctgcgggaacggctcaattcttatcagcaggtgcggtcgctgaactaagcgaccgcggtaaaacggcagaaaaagtgactaaatgcgcagttagcggccttcttctgcgcaaaggctcagcagcggcccgctttttgcgacagggcgtcgcaggttttgctcgctagcgtcgggttggcgccggcgcagatggcatccgagacggtgctaccgccgcccagcgggatcagcccgtaaagcttcggctcggcggccttcgtcacatagcagcgatggctggttttgccgatggtgaccacaaagttggttttcacatcctgctgcctcgcatcggaaattgtcacctgcgaagcatcgacattaaaagcaaacgcggcggcctctttcatttcattttccgtcgccatgggtggtttagctacgcaacccattaataacagtgccagacaggtactgattgatatatcccgtattttcatcatttcatcctttttgtaagtcagcgggttatatataagagcggggggaggaacgcgttgatttcgaacagctggcgcaggctatggttattattcggaaattgacctgtgttgttacatttatcgtgagtagtatgaattccagcattgcaggaatgaaagatattttaagactacgttgcgtagttagacagaagtcaacaggagtgcggcggttatgggctgcccgagatgctctgagcaatattttgctaaggcagaatgctatctgttttagcgtaagcgcaaattttccctgcgttataacggactttttatcctcttaatgggatagcgacaacacgctaagccatgcgcgctgctcagcggtttgtggtgccattttaaaattcaggaacaaaaaagccactctttcgagtggcttaattatatgattttaaatctaaaatttggtggcccctgttgggtttgaaccaacgaccaagcgattatgagtcgcctgctctaaccactgagctaaggggccgtggcgagggattataaagtaactggcgattgcaatccagcgtaaagcgcgcagctgctgtttttataaacaatgcattttcaatcctttataatcatgttttagccatacagccggagaaaacatgattagcgatatccttgcgccgggcctgcgcgttgtcttttgcggtatcaacccggggaagtcctccgcccataccggctttcattttgcccatcctggcaatcgcttctggaaggtcatccatcaggccgggttcaccgatcggcagctcaggccggaagaggagctgcagctgctggatacgcgctgcggcatcaccatgctggtagagcgtccgacggtgcaggccagcgaggtcgccttgcaggagctgcgcagcggcggccgtgagctggtgcggaagattgaggagtatcagccgcaggcgctggcggtgctcggcaagcaggccttcgagctggcctttaaccagcgcggcgcgaagtgggggaaacaggctatgaccatcgggacgacccaggtgtgggtgctgcctaatcccagcggcttaaaccgggcgacgctcgataagctggtggcggcctatcgtgaactggacgatgccctggcaacccgcggccagtagcggagagaggcgactttcccgggatggccacctgaacgccataaaaaaagctccccgcagggagctttttaacaggctgtagacgatgccccgcgacgattaatcgtcgaggaagctacgcagcacttcagaacgactcgggtggcgcagtttacgcagcgccttcgcttcgatctgacggatacgttcgcgggtaacgtcgaactgtttacccacttcttccagcgtgtggtcggtgttcatgtcgataccgaaacgcatacgcagcactttcgcttcacgagcggtgaggccggccagcacgtcatgcgttgccgcgcgcaggctctcggtggtcgcagaatccagcggcagctcgagggtggtatcctcgatgaaatcccccagatgcgaatcttcatcgtcgccgatcggcgtttccatggagataggctctttggcgatcttcagcactttacggattttgtcttccggcatcagcatacgctcagccagctcttccggggtcggttcacggcccatctcctgcagcatctgacgggagatacggttgagcttgttaatggtctcaatcatatgcaccggaatacggatggtgcgcgcctggtccgcgatagagcgggtgatggcctgacggatccaccaggtggcgtaggtcgagaacttgtagccgcgacggtattcgaacttatcgaccgctttcatcagaccgatgttgccttcctgaatcaggtcgaggaactgcagaccgcggttggtgtatttcttggcgatagagataaccagacgcaggttcgcttcaaccatctctttcttcgcacgacgggctttcgcttcgccgatggacatgcgacggttgatatctttaacctgctcgatggtcaggccggtctcttcttcaatctgctgcagcttctgcaggccgcgctgcacatcttctttcacttccagcagcttctcagaccacggcttgttcattgccaccgcggcgttgaaccaggtttcgctggtttcgttgccggtgaacagggtgatgaagtttttcttcggcattttgcactgctcaacgcacagcttcatgatgatacgttcctgagtacgaacgcgatccatcatgctgcgcatgctgttgaccaggtaatcgaactgcttcggcaccaggcggaactgcttgaagacttcagacagcttcaggatctcttcctgggcggcggcatggctacgacctttggctttgatggtgtcgcgcgtcagctcgtactgggtacgcagctcggcgaatttctcacgggccagctctgggtcgatgctgttgtcgtcatcgctgttgtcgtcggcgtcttcatcttcgtcttcgtcttcgtcgtcatccatctcttcctgagacagctcggagccaacgtgggtggcggttggcgccatatcttcttcggcgttcggatcgacgaaaccggtgatcagatcggacagacgggcttcttccgcttcaacgcggtcgtactgctcaagcaggtaggtgatcgcttccggatattcggcaacggagcactgcacctgattgatgccgtcttcgatgcgtttggcgatgtcaatttcgccttcacgggtcagtagctctacggtacccatttcacgcatgtacatacgcaccgggtcggtcgtgcgcccgatttcggattccacgctggagagcacctgcgcggcggcttcggcagcatcttcatccgcggtgttttcggcaagcatcagatcatcggcatccggtgcttcttccatcacctgaatacccatgtcgttgatcatttggatgatgtcttcgatctgatcggaatcgacgatatcttccggcagatggtcattgacctcggcataggtcagatagccttgctccttaccacgttggacaagaagcttcagctgtgactgcgggttttgctccataagacggtatccacacttaattcgtttgattggtgtcggcagacgggctgtcgacatttaaagcgagggcgtacttatattattgccgctgcgcctctgcgcggctgtcgggggcttcccgatcgatactcggcacttaagccgttaaatacttttccttcacgttgttctgcgttttcttactgctttgatacaacgtgaaggatattgtctgtcatttattttttcgccagctcctggctgatggtccagagctcccggcgttcttcactgcttaaaccgtgtgtgcgatcgcgagctatcaactcttcctgtcgcagttccagcagtgaatcaaacatatggttgagcgagtcggtgaaggtttgttcagcgatgtctttatctgctatatcgtcccacatcgacagtttttcaagggttgccgcctcttttgtgccgcgatattgctctaaaagttgcccggttgtcagaccaggctgcgccagacagctcttcaccagttcgctgaacaggctcagtcccggcattttgcgcgagtccagtccctccagcggcgggactaacggcgccagatccgggttttgcaccagcagtcctatcagtatacgcatggtcgtgcgttttagctgcggtgcgggacgcggcgcgccattttccgcctgttttggcattaatcgttcaagctgcgcgtcatctaaaatgcccagcttattgcccaactcctgacgcaaatagatgcgcagcgtttcgcccgggacctgggttatcagcggcagcgccagcgtgctcagctgcgcgcgcccgtccggagtactcagatcgacctgcggcagcaggctgttaaacaagaacgtggagagcggctgagcctgctccatccgcgcctcgaacgccgctttgccctctttacgcaccagcgtatccgggtcttcgccgtcaggcagaaacataaagcgtagctggcgaccatcggtcatgtacggcagcgccgtctccagcgcgcgccaggcggcatcgcggccggcccggtcgccgtcgtagcagcagatgacgttattcgtcacccggaacagcagctggatatggtcggccgtggtcgaggtacccagcgaggccacggcataattaatgtcgtactgcgccagcgccacgacgtccatatacccttcgacaaccagcaaacgcggtggttcggggttatcctgctgcgcttcatacaggccatacagctggcggcctttatggaatatgtcggtttccggggagttcagatacttcggcagggcatcgcccagcacccgtccgccaaacccaatcacccggcctcgcttatcgcggatggggaacatcacccgttcgcggaagcggtcgtaactgcgtccctgatcgttggtgaccaacatgccggcatcaataagcgactggcggttttcctgattgccgccaaaccgttttaaaacgttatcccaacctgggggagcatagccgatggcaaagcgcgtaatcacctcgctgcttaacccccgtttcgccaggtactggcgcgcaggatcggcggcgggctgcatcagagactgttgataaaacgcattcagaccatccagtaactggtagaggttctgccgttgatggcgctctatctggctgggtccgttgcctgcttcataaggcacttcgaggttgtgcatggcggccagctcttcgaccgtttccacgaactcgagcttgtcgtagttcatcaggaagtcgatagcattgccgtgcgccccgcagccgaagcagtggtaaaactgtttttcaccgttgacggtgaaagagggggttttttcgttatggaacggacagcacgcgtgaaaatttttgccctgctttttcagctttacccgcgcatcgatcagatcgacgatgtcggttctggcaagcagatcgctaataaatacacgtggaattcgtccagccataagccccgttatttctgatgactataaacgaaaataagccgcgcattcctttcggaagcacggccttacaactacaactcggtctgaattgagagcgtcgctctcaacagattagtacagacgagtacggcgtgcgttttcgcgagccagtttcttcgcgtgacgtttcactgcagaagctttagcgcgcttacgttcggtagtcggtttttcatagaactcacgacgacgaacttccgccagaacacctgctttttcgcaggaacgcttgaagcgacgcagagctacgtcgaacggctcgttttcacgtactttaattaccggcatgtgcctctcacctttgattaattcggtttgccgctggccgcaatgccagcttatttcaaaatggtgcggaattttactgcaactactgctgctttgtaaagcaccggcgccttttttgaaagggacttttataagggtgaggagtatacacgaagagagcaccaggggtgagcaaagttttacatcgccgttcattggacctacactgcgcggtattgaagcgaggtaaaacaactcatgcgtgtactgggcattgaaacatcctgcgatgaaaccggcatcgcgatttatgacgaccagcaaggtctgttagccaaccaattgtatagtcaggtgaaactgcatgcggattacggcggcgtggtgccggagctggcatcgcgcgaccacgtgcgcaaaacggtgccgctgatccaggcggcgctgaaagaagccggtctgacggcgaaagatatcgacgccgtcgcctatacggtgggtccaggcctggtcggcgcgctgctggtcggggcggccgttggccggtcgctagccttcgcctggaacgtgccggcgatcccggtacaccatatggaagggcatctgctggcgccgatgctggaagataatccgccggcgttcccgttcgtcgcgctgctggtttccggcggccacacccagttgattagcgtcgccggtattggtcagtatgaactgttgggcgagtcgattgacgatgcggcgggcgaagcctttgataagacggcgaagctgctgggactggattatcccggcgggccgatgctgtcgaaaatggcgtcccagggcaccgaaggccgctttgtcttcccgcggccgatgaccgaccgtccggggctggacttcagcttctccggcctgaagaccttcgccgccaacaccattcgcagcaacggcgacgatgagcaaacccgcgccgacatcgcccgggcgtttgaggatgcggtcgtcgatacgctgatgattaaatgtcgccgcgcgctggagcaaaccggctttaagcgtctggtgatggcgggaggcgtgagcgccaaccgtaccctgcgggcgaagctggcggagatgatgcaaaaacgcggcggcgaggtgttctacgcccgccctgagttctgtactgacaacggcgcgatgatcgcctacgccggcatggtgcgtctgcaaaccggcgccaaagccgagctcggcgtgacggttcgcccgcgctggccgctggccgagctgcctgccgcctaacgcatcctgaaacaggccgacgtcacgtcggcctgccttcctgactactccatacttttacacagcgagcagatggctccctgatgcttgtgcgagtgcatcacgtccgggcgctcgtactcttcctcacagctaacgcattgatacgcggtggtggaggcgttccccgccgcgtcatagcgcggctcggcgatgccgtcatccacctgcttaatatagtagcgtccgcgggtaaggagccccatcagcggggtcatgacaaaggcaacgaccagcgcaatcagcggcgagaacggcgccagcgtcgcccctaacagaccgaagaaggcgcagatcgacagcccggcggccagaccaaaggagaccacgcccaccgggttaacgttgtagatcatgccgcgacgatactccggctgcgccggcgccagcttgagcaagcctttattaaaggtgatgtcggtcgccaccaccacgacccaggcgatagcgaagttggagtaaaagccgaggatccacgacagggcgctgaacatatcgccctccatcagcgccagggcaatcgccaggttgaccaccacaaaaataatccgtcccggatagcgtttggtggtgcgggtccaggcgctggtccacgccagcgagccggagtaggcattggtgacgttaattttgatctgcgagatcaccaccagcaccaccgccagcgtcagggccagccagccgggcaccaggttatcgaagacgctgacgaactgctgcaccggttcggtattgtgcaccgccgggaaacgggtcaacagatagaagccgaggaaggcgccgatgatctgtttgatcgcccctaacaccacccagcccgggccggcggaaaagaccgccagccaccagcttttacgattctccgcggtcttaggcggcataaagcgcaggtaatcaatttgctcgccaatctgcatgatcagcgacaggcataccccggcgccgagcatgatggcggtaatatccaccgtcgacgcgctgtttttaccggcgaaatgcaggaagccgtccaccagctgcggatctttgacaatcagccacaccaccggcaccaccatcagcaccagccacagtggcgtggtccacacctgcaggcgggtcagggctttcatgccatagaccaccagcgggagcaccatcagggtggcgatcagatatcccatccacagcgggatcccgaggcccaccagcaggccctgggccatgatcgagccttcgagggcgaagaagataaaggtgaagccggcaaaaataatgctggtgatcaccgagccgaaatagccgaagccggcgctgcgggtgatcaggtcaaggtcaatgttgtagcgcgcggcggtgatcgccagcggaatgccggtgaggaagatcaccagcgccgccaccaggatcgaatagatggcgttgctggtgccccaggccataccgatgctggcgccgatggaaaagtcggccagataggcaatgccgcccagcgcggtgaccgcgacgacgcccggaccccagcggcgaaagctcagcggggcgtaacgtaaggtgtaatcttctaaggtttcccgggagccggaagtccgcgttgtcgcgggtaattcagggttaagatccagtgatgacatagtcattccttaatggttaggcatgacttgaattagcaaaccttatgccatattgcagggcaggcgtggcgcggaggtggaggcaggatgatataaagagagagcagaggctgcaccatccggacgcgcttgcgcccggctggtgcaacaggcctatttgccaagcatgcctttgtcttcgaggaaggcgataatggtgctcaggccgtcgccctgcttcagattggtgaaggtccatgggcgatcgccgcgcatacgctgggtatcgctcgccatcacctccagcgacgcgcccacatagggggcaaggtcggttttattgatcaccagaaaatcggatttggtgatccccggtccgcctttgcgcgggatcttctccccttcggccacatcgatgacgtagatggtcagatccgccagctccgggctgaaggtggcgctcaggttatcgccgccgctttccacgaagataaggtcgaggttaccgaacttttcactcagcgcttccacggcggcgaggttcattgaggcatcttcgcggatcgccgtatgcgggcagccgccggtttccacaccgacgatgcgttcaggcgccagcgcgcccgcttcggtgaggatgcgctgatcttctttggtatagatgtcgttagtgaccaccgccagctgccaggtatcgcgcatcgctttacacagcgcttccagcagagcggttttaccggagccgaccgggccgccgacgccgacgcgcagcgggtgtttataagagttcatggcttctcctaggaacggaataatcgagagtattgggtttcatgccgggcagaggcgatggcggcgagcggggtggccgatccgatatcgccgtccggcgcggccagcgcgcggggcatctcggccgcgtagtggtcacaaagacgtaaaatcagctgctgggcggcctgctggccgaaggggaccagcttgacgccggccatcacggcgctctcaatccagctgtagcccaggctgagggccatctcgggcagggcgatacgccagcgcacgccgagccaggccatcccggcgagctggctttgctggcacagggagcgccacggcggcggacagtccggctgccagtcgctcagcagacgggcaaacgccgcgccgcggttgcgctcttcctcccgcagttcacgagtttcccggcaggccagcagataggcggtccagcgctgggccgcagcgatatcgccttgttcgcaggcgcggtacaggcgggcgaacagcggcaggtcaacggtaaaaaagccttccgtcatctggcgtcgctgccagcgctcgaaggccgcgacgtccggcacccagccggcttccacagcccactccagcccctgggaccagctgtaaccccctaccggcaggttgctgctggccagctgcatcagccgcaggcgttgttccgctgtcgacatgctagtggctgtgagcgtggtggtcatgatgagcatgatgatgaccgtggctctcgctggcgtaagcgccggcttccggctcgaacggcagctggccaaaggtcaccgtcaggccgaactggcgcagcatatcgtccagcacgtgatcgtgatggtagcgcagctcgcccggcataatctgcagcggcacgtgacggttgccgaggtggtagcaggccttcgccagcataaacggatcgtcgcagcgcactaccgacaccccttcatcagcggcaatcacctgcacaaactcggtgccttcttcgttgctgagcacatcgccgccgcgcagcagcaggccgcggggcagcagcaggccggcttcccggccatcgttgagggtgaccttaacccggcttttgacgcgaacatcaatcggcagcgtaacgctggcggtcacggcggcggggatctccagacgttgagttaaataaagcatccgctctccttaaaacagaaaatatcgttgcgccatcggcagaacgtctgccggctcgctggtgataagttcgccatccacccgcacctcataggtctgggcgtcgacggtgatgttaggctgcaggctgttgtgcaccatgtcggctttctgcaccgtacggcagcctttcaccacggcgatcgcgctgcgcaggttcagccgcccggcaacgccattggctgccgccgcctgcgacaggaaggtgaggcggcagtgatggcgggcgctgcccagcgcgccaaacatcgggcggtagtgcaccggctgcggggtcggaatagaggcattgatatcgcccatcggcgcgatggcgatcatgccgcctttgatcacggtggccggtttcacgccgaagaaggctggtgaccagaccacgaggtcagccagcttacccacctcaatggatccgacttcgtgtgcgatgccgtgggtcagcgccgggttgatggtgtatttggcgatgtagcgcttcacgcggaagttgtcgttatccccggtctcctccgccagcgcgccgcgctgcaccttcatgcgatgcgccacctgccaggtgcggagaatcacttctccgacgcggcccatggcctgcgaatcggaggaggtgagcgagaaggcgccgagatcgtgcagcacgtcttccgcagcgatggtttcccggcgaatgcgcgactcggcaaaggccacgtcctcggcaatgtccgggtccagatggtggcagaccatcagcatatcgagatgttcatcgatggtgttgagggtgtagggcagcgttgggttggtggacgacggcaaaatgtttggatgggcgcaggcggtgatgatgtccggcgcatggccgccgccggccccttcggtatggaaggtgtggatggtgcgtccgccgatggcggcgagggtgtcttccacaaaaccggattcattgagggtgtcgctgtgcagggcgacctgaatgtccatttcatcggcgacggttaacgcacagtcgatcgccgccggggtggcgccccagtcctcatggatcttcaggccaatgacgcccgccgccacctgctcgcgcagggcgtccggctgagaaacgttgcccttgcccagcaggccgatattgaccggcaggctgtcggccgcctgcagcatgcgtgagatataccacgggcccggggtacaggtggtggcgtgggtgcccgcggccgggccggtgccgccgccgaccatggggggcacgccggagaccagcgcctcttccgcctgctgcggacagatccagtgaatatgggtatcgatcccgccggcggtgacaatttttccttcggcggcaattacttccgtcgcggcgccgatggggatggtgacgttgggctggatgtcggggttgccggctttgccgatggcgaagatccggccgtccttcacgccgatatcggccttaacgatcccccagtgatcgacgatcaacgcgttggtgagcaccaggtcgacacagtcggcggccagcatctgcccctggcccatgccgtcgcggatcactttgccgccgccgaatttgacctcttccccgtaggtggtcaaatcgtcctccacctcgatccacagctcggtatccgccaggcgcaccttgtcgccgacggtggggccgaacatatcggcataggcctggcgtgaaatattactcatcgtttacctccagagggcccatgacctcgccgcggaagccgaagacggcgcggtgaccagcgaaggccaccagctcgacctcgcgtttctggccgggttcaaagcgtaccgccgtgcccgccgggatattcaggcgatagccggcggcctgctgacggtcgaacttcagcgccgggttaacctcggcgaaatggtagtgcgaaccgacctgaatcggccgatcgccgtggttctcaacgaccacgcgacaggttgcccggccggtattcagggctatctgaccgggcttaacgtgatattcaccggggatcatggcgctacctcagataatcgggttgtgaacggtgaccagcttcgagccgtccgggaaggtggcttcgacctggatatccgggatcatttccgggacgccctccatcacctgctcgcgggtcaggacgtgacggccttcctccatcagcgaggccacgcttttgccgtcccgagcgccttccataataaaggcgctgatcagggccacggactccggatagttgagcttcaggccgcgggccaggcgacgctccgccaccagcgcggcggtaaacagcaacagcttgtctttttctcggggggtcagttccataacgttctcttaagtcagccagattcggggaagtacgggagatttaccggtgagatgagggcgcagaaactgccatacgtcgcgcatcacccgctggcaaatcagattatcgtcactgaggaaacgcaccgtcagcaggcggtcggtcaggctggcgccggcgtagagaccgagcggcgccagcgcgtcgcgcaccccgtcgagcagggcatcggtagccggatagcacagcaaagtgccgacccagggacgttcggcgacgctggagagctctccctcctgcagctgcaggcgctcgaccagcagcggctcatcgtccacccatacctccagccggttgctgagggtgccgtggctgaaggtttcgccaatcaccgggcggccaaggcagagcagatcccaggccagcagcctgctggaggcgcaaagatgaaaggtagtgaacagccgggcattcgccccgggaaagaagatggcatcctgcgggagccactccagggtcgcctgcggggcaagggtcaactgctggcgaactagcgcttgcgcgccgctgctgcggtaaaacttgctggcgccaggcatggttatcagcgtatggcagccgggggcaaggtgcgcgctaattgtcagctcatcaccgccgacgatgccgccgggcgggtgaagcagatagaggtgacaggtctcttcttccgggtaaaacgggcgctggacggtcagcgggccgacatgttgggcgctggcgagaacggtcttgccgccggcctgctgaaagcggagatccagcgtggcctgccagccttttttgagtggtggtaacacggtgccgtgcaatgttgcgcccctgcaaaatcaagataaaacagcagcaatgagtattgatcggcgggagtttatcccggtcatacgaaacgcttatgtcatccgtaacccggagcgtcgcgacgggcgcgaggggaaagcggcataaccgctccggattattcacccggataatctttgccgtcaatatcctgatccgcagcctgggcgcggcggaaaaggcggcggatcgcgttgcgccgcgccgccagccgccagcgcaacttttgcctttccatgctgctaacgtattgttacaaaaggaggatgtggcgatgatcgcctttgatggcgaggaagcgtaaaagggcgggtgaaaggcgcgattagcgcaggggagttccccggctggcggagccgggaggggagattacttctgctctggcgtttttttcttcttcacgcgggtccagattttgctctcctggcgacgccacagacgctgaatgttgtcgtgatggcgcaggaggatcaggcaggagagcatcgacaccggaaaggtatactgcggtttgaaccaccagacgtagaacggggcgatcagcgcgctgacgatagcgcccagggaagagtagccgctgagcaggatggtcagcagccaggtcccggccatcaccccggtgagatcgagcccgatgggggcgatagcgccgaaggccgtggcgacgcctttaccgccgcggaaatgaaagaagactggccagatatggcccacgcaggcggcaatcgccactaaccccagccagaacggcgtaaggcccagcgcccaggcgccccacaccgggagcatgcccttcagcacatcaaaaataagtaccgctacggccgccccttttccgccaattcgtagtacgttagtggccccggggttgcctgagccgctgtcgcgtgggtcgggcaggccagcaaggcgacataccagaatggcgctggaaatggagccgcagaggtaggcgaggagtaccagtccaggcgcgattgcactcataacgctgttccgttttgaaaatgtcgttgtattctctgcatctgtggataatacgcataattcgccggaagtggtatccggtttagctaaaaagcaggcagggcgtgatggatattgtatttatagagcaactttcggtaatcaccaccattggtgtttatgactgggaacaaaccattgagcagaagctggtgttcgatatcgaaattgcatgggataaccgcaaggcggccgccagcgatgatgtcagcgattgcctcagctatgctgatatcagcgagcgcgtgatcgcgcatgtggaggggggaaaatttgcgttagtggagcgggtggcggaagaggtggccgacctgctgctggaaacattccagtcgccctgggtgcgcataaaagtcagcaaacctggcgccgtggctcgcgcggcaaacgtcggggtgattattgaacgtggccttaatctgaaacaaaacttttcaggtcatacttgttaaacaaattgcgtttataccggtcatagcatccggtcatcaggcaattttactggcgatgtccttccagaacggtggacgaatccgtgtgtacttcctgtacgctgcggattacgcgcgctctggcagccgggttgtgcctgttgaacgataccgtgttcctggtttttttcattttacttttttaaagggtttaattggatgagcgatatacactcgctgctggtggcggcaatattgggtgtggttgagggtttgacagagtttttacctgtttccagtaccggtcatatgattattgttggtcacctgctggggtttgaaggtgataccgcaaatacctttgaagtggtgattcagttaggttcgatactcgccgtggtggtgatgttctggcgtcgcctgttcggcctgatcggcatccatttcgggaaaccgccggcgcatgaaggccagggcagcggccgtttgtcgcttatccatatccttctcggcatgatccccgcggtggtgatggggctgattttccatgacaccattaaatccttgtttaacccggtgaacgtgatgtacgccctgattgtcggcggcgtattgctgattgcagcggaagtgctgaagccgaaacagccgcgcgcggtcgggattgacgatatgacctaccgtcaggcgttcgtcatcggctgctttcagtgcctggcgctgtggccaggtttctcccgctcgggggcgactatctccggcggcatgctgatgggcgtcagccgctatgcggcctcggagttctctttcctgctggcggtaccgatgatgatgggcgccaccgtgctggacgtctacaagagcatcggcttcctgaacatgggcgacgtcccgatgttcgccgtcggcttcgtgatggcgtttatcgtggcgctgattgcgattaaaaccttcctgcagctgatcaaacggatctcgttcattccgttcgctatctaccgctttatcgtcgcggcagcggtgtacgtggtcttcttctaaggcctgcgccctcagccttgcggctgggggcaacgctgttccttccactgcgctaccgccgcaattctccgccgcgtcagctcctcgcgaatttccgcccctttaaagcccgccgccacgacctctttagtggagaccgactgcgccacttcccaggcctccagcagcaggcgcctctgcgggtaatcgctggcctcgaaaccggtgcgtccgcggacgtcggcttcgctggtgagcgcgatctgctgcacgcgctgcggtttgcgccacgcgtcaatgctgtcgaagagtttgacgagggttttcggctgcagaattggcagggtgtggattaggtcatggtactccgccaccagtttcgcgagatcgcggatatcgttcggcacccgcagacgcgcgcagagctgctccaccagcttgactcccgccggaccatggccgtggtgacgcggccagagcgccttcggcgtcagccctttgccgaggtcatggcacagggtggcgaaacgtacgtcgacatccggcgacagcatcgcggccatcgtgacggtcatcagggtgtgcaggccggtgtcgatttccggatgccatttcgccggggccggcacgccgtacagggcgtcaatctccgggaacagcaccttgagggcctgacagtcgcgcagcgtctggaaaaagacctgcgggttgcgagtagttaatgcgctttccgtctctttccacacccgctccggcgttaaatgcgccagctcgccggcctcaaccatcgcggccatcagggcctgagtctcttcggcaatgcgaaaaccgaggtgggcgtagcgggcggcaaaacgcgcgacgcgcagcacgcgcagcggatcttcactaaacgcgggagagacatggcgcagcaggcgctgacggagatcgttctgtccgccgtaggggtcgataattgcgccgtcggcatcctgggcgagggcattgaccgtcaggtcgcggcgcagcagatcggcttcgagggtgacgtccggggcggcatagcaggtaaaaccggtatagcccgcgccggatttgcgctcggtgcgggccagggcatactcttcccggctttgcggatggaggaacacgggaaaatcgcggcctacctgttgatagcccgcgtctagcatctgttgcggggtggcgcccaccaccacccagtctcggtctttgaccggcagccctaacagcgcgtcacgcaccgcgccaccgaccagataactcttcacgcctgattctcccgtatccgtttttcgcaagatgatacgtaagtctggcagagaagacgaattagttcatccaccggtctttacgtttgcggcttggcaccagatgtggcagcaccagaccgagcagcagaccgacgcccagcacaccgccgccgtacataaaccactgcatgataatggtgcgctgtttatcatcaagctgcagatttgccgcattcaccttcttctgcgcgacaaccagctcgtttttcaacttttggttctcgtccttcagcgcgttaatcacgctgtcgctgccggcgactttcttctgcatatccgccgtgcgctggttccaggtggcatcgatgttattcagcttatcggtcagcgttttgacctggttttccagatccgggacgcgggtgcgcaggctgggctcgttgctcagctctttcagcgggatccaggcggtacggccgttgctgtcgcgaatttgcgcgtaactggtgctgtcgttcgtttgcagtaccgacacttcttccccggcgttgatggtgccgaccagacgataattatcgcccgggccgctgcgaacccaggtgttcagctcatcggaaacgtagcgcttttcttctgcgtgaaccgccgtggcggcgctaagcgcgagcaaagtaaaagtaatcaggcgtaattttggcatcaggtcatcgtttggtcataaaaagtggaacgatagtagaggcatcgccagagcgacgcaaagttttccgccacaatcggaatcatccaggaggtggcccggcaaaaagcgcgttgcatggcgattcaccgcaaaatactatctactgacaaaaaatatcgtcgtaagttcgccgcaatttgtcggcgcagcacagaagcggaagaattcagtcatggctcaagaaatcgaactcaagtttatcgtcgctcaggatggggtagagacgctgcgcgagcagctcaatgcgctcgaggcgaaacatacgcccgcgggccagttgctgaacatttattacgaaaccgccgataactggctgcgtcgtcacgatatggggctgcgcatccgcggcgatcaggggcgttatgagatgacgctgaaaatcgccggtcgggaggtcggcggcctgcaccagcgcccggaatataatattccactggataaaccggagctggcgcttgagcgcctgccggcggaggtctggccgcaaggggaacttccggccgcgctggcggagcacgtccagccgctgttcagcaccgattttgcccgtgaacgctgggtgatccaggaaggaaagagtgagattgagattgccctcgatcgcggcgaagtcaaggcgggcgaacatcaggagccgatctgcgaactggagctggagctgctcgccggggagaccgccgatctgctgcgcctcgcgcatcgtttgctggagagcggcgtcctgcgtcaggggagcctgagcaaagccgcgcgcgggtatcatctggcgcaaggtaacaatgagcgtccggtgacccggctggcggtgctgccggtggcagcgaaggccagcgtggagcaggggctggaggcggcgctggagagcgccctggtgcattggctgtatcacgacgagatctggctgcgcggcaacgcaaaagccaaagcggaaattctgctggcgatagcccgcgtgcgccatgccctcgtgctgtttggcggcatcgtgccgcgtaaggcgaccccccccctccgcgcgttgctgaacgacgccgacgccgttctgctggctgcggacaccgccgacgaagcgttattccgcaccgaggtcgttggcgccaaactggccctgaccgaatggctggtccagcgcgggtggcgttcgttcctcaacgaggcgggagagaaaaaaatagccggatcgttcaaacggtttgccgatattcacctctcgcgggtggcggccgagctgcgcagcgccgtgcagcatctggcggtagaagatgccgctgaccagttgccgaagctgtcccgcgacatcgacagcgtccagctgctggcgggcgcctatggcgacgccgtcgcgccctggctggagaactggcaggaacttcagcgtgcgatagagcatgacgaccgcagcgtgtttgaatatttccgtcgccaggcgctggctgccgagccgttctggctgcatagtggaaaacgataattacaggccagggagcccttatgatgccgctttctccgcagttacagcagcactggcagacggtcgctgaccgtctgccaacggattttcccgttgccgaactgagcccacaggccaggtcggtgatggcgttcagcgattttgtcgaacagggtgtgatcgctcagccgggctggctgaatgagcttgcggactccgcgccggcggcggaagagtggcggcattacgaagcctggctgcaggagcgcctgcaggccgtcactgacgaagcggggttgatgcgagagctgcgtctcttccgccgccagatgatggtccgcatcgcctgggcgcaggcgttgtcgctggtgcgcgaagaagagacgctgcagcagctgagcgtcctggcggagaccctgattgtcgccgcccgcgactggctgtacgccgcctgctgtaaagagtggggaacgccatgcaacgccgagggtcagccgcagccgctgctgatcctcgggatgggaaagctgggcggcggcgagctgaacttctcttccgatatcgatctgatctttgcctggccggagcatggcgccacccgcggcggccgtcgcgagctggataatgcccagttctttacccgcctggggcagcggcttatcaaggcgctggatcagccgacgcaggacggctttgtttatcgggtggatatgcgcctgcggccctttggcgacagcggaccgctggtactcagctttgcggcgctggaggattattaccaggagcaggggcgggactgggaacgctacgcgatggtgaaagcgcggatcatgggcgataacgacggcgcctacgccagcgaactgcgcgcgatgcttcgccccttcgtcttccgccgctatatcgacttcagcgtgatccagtcgctgcgtaacatgaaaggcatgatcgcccgtgaagtgcggcgtcgcgggctgaaagacaacatcaagctcggcgccggcggcattcgtgaaattgaatttatcgttcaggtctttcagctgatccgcggcggtcgcgaacctgcgctgcagcagcgcgcgctattgccgacactggcggcgattgatgagctgcatctgctgccggaaggcgacgcgacgctgctgcgcgcggcctatctgttcctgcgccggctggaaaacctgctgcaaagtatcaacgatgaacagacccagaccctgccgcaggatgaactgaaccgcgccagactggcgtgggggatgcataccgatgactgggagacgctgagcgcgcagctggcgaaccatatggccaacgtacggcgggtgtttaatgaactgatcggcgatgacgaggctcagtcgccagatgagcagctggccgagtactggcgcgagctgtggcaggatgcgctggaagaagatgacgccagtccggcgctggcgcatttaaacgacgccgaccgccgcagcgtgctggcgctgattgccgatttccgcaaagagctggatcggcgcaccatcggcccgcgcggccgccaggtgctggatcagctgatgccgcatctgctgagcgaaatctgctcgcgcgccgatgcgccgctgcctctggcgcggatcacgccgctgttgaccgggatcgtcacccgcaccacctatcttgaactgctgagcgaattccccggcgcgctgaaacacctgattacgctctgcgcggcatcgccgatggtcgccagccagctggcgcgccacccgctgctgctggatgagctgctggatcccaacaccctctatcagccgacggcgaccgatgcctatcgcgacgagctgcgtcagtatctgctgcgggtgccggaagaggatgaagagcagcagctggaggcgttgcgccagttcaagcaggcgcagcagctacatatcgcggcggcggatatcgccggcaccctaccggtgatgaaggtcagcgaccatttaacctggcttgccgaagcgatcctcgatgcggtggtgcagcaggcatgggggcagatggtggctcgctacggcctgccgacccacctgcacgatcgccaggggcgcggcttcgccgtcgtcggctacggcaagctcggcggttgggagctgggctacagctccgatctcgacctggtgttcctccatgactgtccggcggaggtgatgaccgacggcgagcgggagattgacggccgtcagttctacctgcggctggcccagcggatcatgcatctgttcagcacccgcacctcgtccggtattctctacgaagtggacgcccggctgcgcccttccggcgcggcggggatgctggttaccaccgctgacgcgtttgccgactatcagcagaacgaggcctggacgtgggagcatcaggcgctggtgcgcgcccgtgtggtctatggcgacccggcgttgcaggcgcgctttgacgccattcgtcgcgatatcctgaccaccccgcgggagggcgcaaccctgcagaccgaggttcgcgagatgcgcgagaagatgcgcgcccacctcggcaacaagcatcccaatcgttttgatatcaaagccgatgccggcgggatcacggatattgaatttattacccagtatctggtcctacgctatgccagcgacaagccgaagctgacccgctggtctgataatgtgcgtattctcgagctgctggcgcagaacgacatcatggacgaggaggaagcgcgcgccttaacgcacgcgtacaccaccttgcgtgacgcgctccatcacctggccctgcaggagctgccgggacacgtggcgccagaggccttcagccgggagcgcgagcaggtcagcgccagctggcagaaatggctgatggcttaactataaaatcgggtgtgctattatcgcgcgcaaagtttgcgtctcgcaggagagagtcatgaaagtaacgctgccggagtttgaacgtgcaggagtgttggtggtgggtgatgtgatgctggaccgctactggtacggccccaccagtcgtatttccccggaagccccggtgccggtggtgaaggtggaaaatatcgaagaacgtcctggcggcgcggcaaacgtagcgatgaacattgcctcgctgggggcaacctcgcgcctggtgggattgaccgggattgatgacgccgcccgcgcgctgagccaggcgctggccaacgtcaatgtgaagtgcgacttcgtctccgtcccgactcacccgactatcaccaagctgcgggtgctgtcgcgcaatcaacagctgatccgcctcgactttgaagagggcttctccggcgtcgatccgcagccgatgcacgagcgcattcagcaggcgctgggctctattggcgcgctggtcctttcggactatgccaaaggggcgctgaccagcgtccagaccatgatccgactcgcacgtgaagcgggcgtgccggtgctgatcgatccgaaaggcaccgatttcgaacgctatcgcggcgcgacgttgctcaccccgaacctctctgagtttgaagcggtggtgggcaagtgccaggatgaagcgcagatcgttgagcgcggcatgaagctcatcgccgaattcgaactgtcggcgctgctggtgacgcgctctgagcaggggatgacgctgctgcagccggggcgtccgccgctgcatatgccgacccaggcccaggaagtgtacgacgtgaccggcgccggcgacacggtgattggcgtgctggcggcgcccctggcgtccggcaacaccctggaagaggcctgctatttcgctaacgccgcggcgggcgtggtggtcggtaagctgggtacatccaccgtttcccctgtcgagctggaaaacgcggtccgcggccgggctgagaccggctttggcgtgatgagcgaagaggaactcaaacaggcggttgcggcggcgcgcaagcgcggcgagaaagtggtgatgaccaacggcgtcttcgacattctgcatgccggtcatgtctcctatctggcgaatgcgcgcaagctgggcgaccgtctgatcgtggcggtcaacagcgatgcctccaccaaacgtctgaaaggcgaaacccgcccggtgaacccgctggaacagcggatgatcgtgctgggggcgctggaggccgtcgactgggtggtctccttcgaagaagatactccgcagcgcctgatcgctggcatcctgccggatctgctggtcaagggcggcgactacaaaccggagcaaatcgccggcagcgaagaggtatgggcgaacggtggcgaagtgctggtgctcaactttgaagatggctgctcaactaccaatattattaagaaaatacaaaaagatagcgacaaataagcttttcgctattcaccggtttgtacggtgaagcatcacggcctgcgatagacgtatcgcgggccgtttttatttaatcatgtggaaaatgatttagcgcaataaataatcatgttaagcgcatttttcgtacaaatcgcgttaaggtaagcgtaaatactgaagtgagtaaaaggcatatgactgatcagaacatccaccgctgaaggagtatgcgcatgaaccataacgatatgtattcaatgaagaattttgattttttggcgcggagtttcgccagaatgcacgcccagggccagccagttgatcttcaggccattgtcggcaatatggatgaagaacatcgtgaatggttttgccagcgctatgaactgtactgtcgccaggtgagtagccaggcggaagccgcccattaagccaaacgcaaaacgagcccccaggggcccgttttttactgctgctcttcgctgcccggcgtcgccgccgggcggttttcgaggtcattcaggcgctgctccagcagcgcccgtttttcccgggtccgcagcagcacctgagtctgcacgtcaaactcttcgcggctaaccagatccagacgggtcagctgcgactgcagcgcctggcggattttcttctcaacatcctcacccagatcgcgaagtccttttggcatcgactcatggacctggcgggcgatttgttcaatttttttcgggtcaatcatggtggtttcctgctcgggtcggatgattgatcattgtagtgcgaaccaggccgcctataaaccagaaatgtttgaagcttatgcattgccgaggatagtcaatagcgttatagttatctcgcttattctcagggcggggcgaaattccccaccggcggtaaatcaaccatggcgttgaaagcccgcgagcgcttcccgtgactacgggaaggtcagcagatccggtgtaattccggggccgacggttaaagtccggatgggagagagtaacggcacagtcgggcccaggcccgctcgcgttgacttttgccgctaaaccggcgctcctaagactgccctgattctggtaaccataattttaatgaggtttttttaccatgaatcagacgctcctttcttcttttggtaccgcttttgaacgtgtggaacacgctttgaacgccctgcgcgaaggccgcggcgtgatggtgcttgatgatgaagaccgtgaaaacgaaggcgatatgatcttcgccgctgaaaccatgaccgttgagcagatggcgctgaccattcgtcacggcagcggcattgtgtgcctgtgcctgaccgaagaacgccgcaaacagctggatctgccgatgatggtagagaacaacaccagcgcctacggcaccggcttcaccgtgaccatcgaagcggccgaaggtgtgaccaccggcgtctccgctgccgaccgcgtgaccaccgtccgcgcggccatcgccgacggcgcgaaaccttccgatcttaaccgtccaggtcacgtcttcccgctgcgtgcgcagccgggcggcgtactgacccgcggcggtcacaccgaagccactatcgacctcgtgaccctggctggctttaaaccggcaggcgtgctgtgcgagctgaccaatgacgatggcaccatggcccgcgcgccggagtgcatcaagttcgctcagcagcacaatatggcggtagtcacgattgaagatctggtggcctatcgtcgcgaacatgagcgtaaagccagctaaatagcggttcgctacgcccgagcacagcccacttgttagtgggctgtgttgtttctgcgctttaaccgatgcccatcgtctggagtaccaccaggctcagccccatgaccgacatcccgcacaggacgccgtagcttggattgctttgcggatcgatctctttcgccagcggcatcagttcatcgaccgacagcgccaccataatcccggcgacggcagccatgatcgcgcccatcaccagcggcgagaccaggctccccagaatcaaccacgccagcacgccgcccaaaatttccgccatgccggaaagcccggcccagagcaccgctttgctgcgcgagccggtggcggcatacaccggtccggcaaccgccagtccttccggaatattgtgcagggcgacggcaagggcgacgcccatgccaagctcgaggttgttgctggccgtgacataggtggcgatcccttccggaaagttatgcaggctgatccccagcgtcagaagaatagcggtgcggcgtaagttgcgcgggcgcggcatggcgggagtcatcagatcctgcgggtgggcgtgcggcagcaggcggtcaaggccaaagtagcccagcaggccgacaacaaacattccgtagccgagcagcggcgacatgccctcggcggccagcgcggcaggcagcatttccatcaacgaaatcaatagcataatcccggcggcaaagccgagggagaagccaagcaggcggttagagggtttctggccaatcacgccgaatatggcgccaatgaaggttgcgctaccggctaacagcgtcaatattaagggtgatgacatcgcttctctccctgtgaaaataattacatacgagtatattgcctgaggatgcgcgtacgggacacgtccctttaccgcgaattacattcaaattttctgacgatcatcatcatggttatctgagtttatcctggcgcaaaagcgcgtaatgtgagcacatcacattgacaccctaaggatatcatcatgtcccgtacccgaatgcccgcgttgtttctcggccatggcagcccaatgaacgtgctggaagacaaccgttatacccgcgcctgggctcaactgggcgaaaccctgccgcgtccgaaagcgatcgtggtggtctctgcgcactggtttacgcgcggtacgggcgtaacggcgatggaggcgccgaagaccattcatgacttcggcggttttccgcaggcgctgtatgacacgcattatccggcgccgggctctccggcgctggcgcaacggctggtggagctgctctcgccggtgccggtcaccctcgatacagaagcctggggatttgaccatggctcgtggggcgtgctgattaaaatgtatccgcaggcggatatcccgatggttcagttgagcatcgacagcaccaaaccgccggcctggcatctcgaaatggggcggaaactggcctcgctgcgtgatgaaggcattatgctggtggccagcggcaacgtggtgcataacctgcgcaccgcccgctggcatggcgagaacacgccgtacccttgggcagagtccttcaataactacgtgaaggcgaatctgcaatggcaggggctggacgagcagcacccgctggttaactacctggcacacgaagggggctcgctctccaacccgacggcggagcatttcctgccgctgctgtatgtcctggggacgtgggatggcgttgaggcgatgacgatcccagtcgatggcatcgagatgggctcgctgagcatgctgtcggtgttggttggcgcctgatgatagcgcgctccggcggcatttaccgtcgccggagcgcggcattattcgacgaaaatgtgcggatagaagcgcgacagatcctgggtgatcagcgcccggtcttcgcgaataccgatccctgcaggctggtcgttgatgagccagctgccaatcagcgtatagctatcgccaaacttcggcagcgggtaaaacgcctgcacgatggtgccttcttccccgtacgggccttctactgcctccaccactttgccattttcaacgatcgacacgttagcgccttcgcgggagaagattggcttaatgacgtacttctccatctccgggtgagtatcttcgctgaagtaggccgccagcagattagggtgattggggaacatctcccacagcatcggcagcagcgccttgttggagataatgcttttccacgccggctccagccagcggacgccagcgtcttccagcttggtggagaacatctcccgcagcataaactcccacggatagagcttgaacagattgccaatcacctgatcctgcagatcggtaaactggcctttttcgcccaggccgatatcttcaacgtagaggaattccgtcgccagccccgcttcagcggcgcagtcctgcagatactgcacggtaccgcgatcttcaacggtatcgcggcagcaggccatatgcagcagctgaaagccaaactgctcgcgcagctcgccgaagcgatcgatcagcttttcctgcaaactgttgaactggtcgctgcccgccggcagcttgccggcgttgagctgatcttccagccagatccactggaagaaggccgcttcatacagcgaggtcggggtgtcggcattgttctccagcagcttcggttcgccgacgccatcccaggccaggtcgagacgtgagtagagcgacggctggttggttttccacgactgacgtacaaaaccccaggtgtgtttagggatgcggaatttggtcatcagctcatcgctggcgatcactttttccaccacctggaggcacatctgatgtagctcagcggtgaccgcttccagcttttccacctgcgcgagggtcagcttgtaatacgcctcttcgctccagtagggctcgccgtacatggtatggaagttgaaaccgtactcggtcgctttctcgcgccagtccgggcgctcggtaatactgactctttccatgttgcttagccgcccattgagcgagaagaggacgttgagcctgcggcgctacgctgcatggtcgactgtttcgctaccgactcgccaaagccgccgcgggtgacggtggtggtggtggctggcttcggcgccatcgcggttttcggcacattcatggtgcggcccggctgggcggcgccatagctcttgccgctggcgtcagtgtactgaccgtaggccgggctggccggatttttcgagctgaacagcggctgctgttgcgccatgccgccgcccatcaggcggcccatcatgtagccggccatcagcggcatccagaagctgccgctgctttgcgcctgcgcctggttttccggggcgacgcccgcctgggctggcgtctgctggcactggccttcgccaaactcggcgacgcagtcttcgcgggtggcatacttcggcgcagtgcgctctgcctcttttaccgcgttggtgtaggccgtggtgcattcggctgctttgcccgggttggcggcggagcagtcatcggcgttctggtacagcgacaccgtttcgtcgcttttttcacaaccggcgagcataaagaccgcggtaacggccagcgcgaccggcgtcagatggcgtgcgctccagcttttgcggaacgacgaatgattaatattttttgtccgtttcatatttgtcttccaggacccagtggtatggcgtgtgttaacgctcaggatagaggatgagtggtggaaaatgaagcgaagaggggcgctaagcgggggatctttacgttgccttacgtttaacgcatcgcctgtccgacggacaggcgatgcgcatcacagtatgagaattactgacggaacggattgctgccgctgctctgggtggtccgtgcggacgccggcttcaccgccgcggtagtgttgccgtagccatcagcggtggcatcctgttgcggattttccggcgcgacgctatctgcggaggtggagatgggtttacccagcgtgttgttcagggcgaccagatcctgctcgttcagggtacctaacgccgacttaatgttcagctcgttgatcaggtagttgtagcgcgcattcgagagctgctgcttagcgttatacagcgtagtggtggcgtcgaggacgtcaacgatcgtacgcgtacccaccgagtagccagcttccatggcatccagggagctttgcgcagagaccaccgcctgtttgtaggcgttgatgctgctgatggaggcgttcacgttgttaaacgatgaacgcacagtctgcacgacgctgcggtgggcgctttccagctgctcgctggcgccaacgaagttgtattgcgcctgtttgacctgcgaggtcaccgcgccgccctgatacagtggcagagagaagttcaggccgatttggttctgcccggcatcgttatcctggtattgctgaggattattatgggtttttgaaccactgtagctagtattcgatatcccactcgacgcggataggctgagcgtcggcaaatggccgtcctgcgcctggcgaatctgctcgcgagccaggtcctggttcagacgcgcctgcagcagcgacaggttgcggttctccgcttccttcagcagggcgttgaccgcctgcggcttgttggttttgaagccattcacgttcagggaggccagctccggatagtaattaccggtgacctgacgcagttcttcgacggcgttgtcgagatcgttacgcgcggtgacttcgttcgccagcacggcatcgtattgtgaacgggcgttctgtacgtcggtgatcgccaccaggcctacgttaaagcgctgcgtggtttgatccaactggcggtaaatagcctgtttctgcgcttcggtataggagagcgtgtcgatggcggccagcactttaaaataggccgtcgcggtattcagaatcagtgtttgctgatcggtctgatacgtgacatcctgaatccctgccgttttttcctgcagcgtcagggcgcgccatttcgacatatcaaacagaacctgcgttaactgcagcgagccgctggtgacgtttgaattgatgccgttgctgtcgcgatagccattgttataggtataatccgctcccagcccaagctgaggcagtaatggactgcgcgcttcgttgatcttttcgaacgcggcgtcacgatcggctgccgatttacgcagatcggggttgctgatgcgtgcctgctggtaaacctgaagcaggttttccgcctggctcatggcgctgaacccggtcaggctcaggccgataagaatggggagcaatttcttcatttgcattccttgttgtgaagcatttagcgctggtctaattctaagaaaaattccgctgattgtatcgattctgccgccgtaaaaagttggcgttacgtgccatccggcggtaatttgcaccaatctaacatacggaccgtaaaacggtagccaaacggtttggaaatccctaatttcagattcgcaggacatgacaatgagcaaacccacgcagcagggaattaccttctccaaaaatgatgtagaaattattgcacgcgaaacgctatatcgtggttttttttcgctcgatttataccgttttcgccaccgcctgtttaacggcggcatgagtggcgaaatcacccgtgaaatttttgagcgcgggcacgccgccgtcttgctaccctttgacccggtgcgcgacgaagtggtgctggtcgaacaaatccgtatcgccgcctatgataccagcgagagcccgtggctgctggagatggtcgccggcatgattgaagcgggtgaaacggtggaagatgttgcccgtcgggaagcgctggaggaggccgggcttgaagttgggcggacgaaaccaatattaagctatctggccagtcccggcggcaccagcgaacggttatcgatcctggtgggagaagttgatgcatcgacggcaaaaggcattcacggcctggccgaggaaaacgaggatattcgggtgcatgtggtgagtcgggagcaggcttaccagtgggtagaagaggggaaaatcgacaacgcagcctctgtcatcgccttgcaatggctgcaattgcattatcacaatttacgaaatgagtggacaaaatgaagcgttatacacctgacttccctgagatgatgcgcctgtgcgagaccaacttcgcgcagttgcgccgcctgttgccgcgaacggatgcagcgggtgagaaggtaagctatcaggtgggaagcgcgcagtatcggttaacgatagttgaatcgacccgctacactactctggtggcaatagagcagactctgcctgcagtgagctactggagcctgccatcgatgaccgtccgcctctaccatgacgccatggtggccgaagtgtgttcgagtcagcagatctttcgcttcaaagcgcgatatgattatcctaataaaaagttgcatcaacgcgacgaaaagcatcaaattaaccagtttttggccgactggctgcgttactgtttagcacatggagcgatggcgattccggtttgttagcgtcgttaaacctaaggacaccatttggaaagcctgttaaacctacctctggctggtgaggccagagtcaggatattacaaattactgatactcacctgtttgctgaaaagcatgaaacgttgttaggcatcaatacctgggatagctatcaggccgtactgtcggccattcatgcctcacagcgtccatgcgatctgattgtcgcaacaggcgatctggcgcaggaccactcctccgcggcctatcagcattttgctgagggcatcgcgagttttgctgcaccctgcgtctggctaccgggcaaccatgatttccagccggcgatgtacagcaccctgcaggaggcgggcatttcccctgccaagcgcgtgtttctcggcgatcgctggcagatcctgctgctcgacagccaggtgtttggcgttccccatggcgagctgagcgacttccagctggagtggctcgaacataagctggcggaggcgccggagcgctataccttactcctgctgcaccatcatccgctgccggccggctgcagctggctggatcagcatagtctgcgcaatgccggcgcgctggacagcgcgttgagcgcctggccgcgggtgaagcatcttttgtgcggccatattcatcaggaactggatctcgactggaatggccggcgcatgatggcgacgccgtcgacctgcgtccagtttaaaccgcactgtgccaatttcactctggatacggtgtcaccgggctggcgctggctggagcttcaccctgacgggacgctgaccaccgaagtgtgccgcctggaaggcgccgcgtttcatccggatattgcttcagaaggctactgatggcgacgctcctttatctgcatggctttaacagctctccgcgctcggcgaaggcgacggcgttaaagacctggctggcgcagcactatcctgagatcaccatggtggtgccggagttgccgccttacccggcggaaacggcggagctgttggagtccatcgtgctggagcacggcggcgagccgctgggggtcgtagggtcgtcgctgggcggctactacgcgacctggctttcgcagtgctttatgctgccggcggtggtggttaacccggcggtgcggccgtttgaactactaaacaattttctcggccacaatgagaatccatacaccgggcagcaatatgtgctagagtctcgccatatttacgatctcaaagtcatgcaaatcgacccgctcgaagcgccggatttactctggctgctgcagcagaccggggatgaagtgcttgattaccgccaggccgtgcattactacgcctcttgccggcagacggtagaggagggcggtaatcacgcatttgtcggctttgacgatcatttcactcagattatcgaatttctcggcctgcgctaaacggccctgaacgacctacgaatacacaccatgacgcaatcttcatataatgctgatgccattgaggtactcaccgggctagagccggtgcgccgccgtccgggcatgtataccgacaccactcgtcctaaccatcttggtcaggaagttattgataacagtgtggatgaagcgctggcaggccacgccaaacgtgtggaagttatccttcatgccgaccagtccctggaggtcattgacgatggccgcgggatgccggtcgacatccacccggaagagggcgtgccggcggttgagctgatcctctgccggctgcatgcgggcggtaagttttccaataaaaactatcagttttccggcggcctgcacggggtggggatctcggtggtcaacgccctgtcaaaacgcgtggaggtcaacgtgcgtcgcgacggtcaggtctacagcatcgcctttgaaaatggtgaaaaagtggaagacctgcacgtcaccggcacctgcggcaaacgcaataccgggaccagcgtccatttctggccggacgaaagcttcttcgacagcccgcgcttttccgtttcacgtctgacccacctgttaaaagcgaaagcggtgctgtgcccgggcgtggaaattgttttccgcgaccaggtgaacaacagcgagcagagctggtgctatgccgatggcctgaacgattacctgagcgaagcggtgaacggcctgccgctgctgccggaaaaaccattcgtcggcgccttctccggcgagacggaggcggtggactgggcgctgctgtggctgccggaaggcggcgagctgctgaccgagagctacgtgaacctgatcccgactatgcagggcgggacgcacgttaatggcctgcgtcaggggctgctcgacgcgatgcgtgagttctgcgagtaccgtaatatcctgccgcgcggcgtgaagctgtcagcggaagatatctgggatcgctgcgcctacgtgctgtcggtgaagatgcaggatccgcagttcgccgggcaaaccaaagagcgcctgtcgtcgcgccagtgcgcggcgttcgtctccggagtggtgaaggacgccttcagcctgtggctgaatcagaacgtgcaggccgcggagctgctggcggagatggccatctccagcgcccagcgccgtctgcgcgcggccaaaaaagtggtgcgcaaaaagctgaccagcggtccggcgctgccgggtaagctggcggactgtaccgcccaggatctgaaccgtaccgagctgttccttgtcgagggggattcggcgggcggctcagccaagcaggcgcgcgatcgcgaatatcaggcgatcatgccgctgaagggcaagatccttaatacctgggaagtctcttccgatgaagtgttagcttcgcaagaagtgcacgacatttcggtggcgattggtattgacccggatagcgatgatttaagccagctgcgctacggtaaaatttgtattctggcggatgcggactccgatggtctgcacattgccaccctgctgtgcgcgctgttcgtaagacatttccgtaccctcgtgaaagaggggcacgtctatgtggcgctaccgccgctgtaccgtatcgacctcggtaaagaggtttactacgcactgacggaagaagaaaaaaccggcgtgctggagcagctaaagcgcaagaagggcaagccaaacgtccagcgctttaaagggctcggtgagatgaacccgatgcagctgcgcgaaaccacccttgacccgaatacccgccgcctggtgcagctggtgataagcgatgaggacgagcagcagaccacggcgataatggatatgctgctggccaaaaagcgttcggaagatcgtcgcaactggctgcaggagaagggcgatatggcggatctggaagtgtaagtctgtacgctgcgccagacgtaaaagggagcctcaggctccctttttcatggcattactgagtcggcggacttaaacgccaggctgcagaatacggatgctggtctccagcacatcgcctttgaccgcttccgaccaggctttcatgtgcggggtttgcaggtgtgcttcaagatgcgcgacgctttcccactgctcgaccatgacgatagagtcgggcgctgtggtctggaagctgacgccggcggcatgatccaccagcggggcatagccgtggcagccggcctcctgcaaaacggtcggaataattttcgcgaactgatcgagaaccgcctggcggtggtgctggcccgggcgggtacggatttctgcaatcactgttaacatggttaactcaactccttctgtgtggatctcgtcatactccaggttcgaataactcgaaatatgtagagctagacctctagttaaccaaaaatttccgccagatgcttgcgatattctgcgatataccgtgggacatcaggcattttaatcacgtcgttggcgataaaggttggcaatgcctccatgccgaggaactgattggctttatggaacggcaggtaaacgccgtcaacgccgacgccgtggaagaactggtctttgtcggtgaaggcttccatcggcgcgttccaggtcagagaaagcatatattttttcccctgcaccaggccgccggagccatattttttgctggcgtcggagcgggtacggccatcgctggcgtacagcgagccgtggccttcggtaaagacgtcatccatatattttttcaccgtccacggagcgcccatccaccagcccggcatctgccagatcaccacatcggcccacaggaaattctgtacttcttcttttacgtcgtactcgctttcggcgcgaacgcttttaacatcgtgcccggcgtcgcgcagataactctccgcgacctcggtcagggtgtcgttcagttgaccattagagtgcgcgaactttttcgccccattgataatcaggatgttgctcattttttaccctcatatatgaaaatttgccgacgatcttaccccgcgaagcggggcagtaaaatgagcaaaatgtgcaaagtcttttgccaaatgagcaataatctcgctaccagtacacgcgggcctcgaagccgccgtcgcgcgcgttggcaaaatcaacctgcatgccgtgcagcgaggcgatgcgccggacgatcgacaagcccaggccgctgcccggcgcctcctgccccggcggacgataaaaacgctcaccaatgcgcgagagcgcctgcgggctaatgcctgggccgttatcgcgcacccggaactcgcgggcgttgagcgtgatatcgacctgactgccgcgcgggctatagcgcaccgcgttatccagcagattgcgcaccagcagactgagcagcagcggctggccggtgcggacgatatggctggcattaagatgcaggcgcagctcaatcccggactgctgcgccgggtgatacatctccatcactgccgactgcagcagatcggcgatagcgacctgctgcacatcatccagttgggcgagcgagtccagccgcgacagcgtcagcagctgatccaccagtcgggtggcgcgatcgatcccctggtggagctgatccaacgctttctcacgcccttcgggatcgtccagggagagttgggcgacttcggtctgcaccttcagcgccgccagcgggctgcgtagctcatgggcggcatcagaggtaaaccgacgctcgcgcagcatggcgtcgtgagtgcgtcggaacagctgattcagcgcttcgaccagcgggcgaacttcggcggggatcttctccacgctaagcgaatccgccgagtccggcgcgcgcaggcgcagcgtgcgcgccagatttttcaatggcgccagctcgcggcttaacagcacgatgagcagcacgaacatcagcggcagggcaaccatccacggggtgagctgcgaggtcacgatatccatcgccatttcgcgccggtaatcccactcctggccgacggcgatgcggtagcggccgtcggcggtggttaaccacaggaaacgccactcgtcatcgtcgtcacgcagatagccatcgctgaatccctcgcgctgcgaattccactgaatatcctctccgttctcgccgtcattaagcaccattttgccgtcgcgggtgaagatggcgaacgccagcgcgtcgtcgtcgatgtgcccgtggcgtacctttttcttttccccgagcgaggcgggcggggcgcgcagttcatcgaaatgcatgacgctcaggcggcgagcgaacagcagctgctgggtatcgaacagcttatccagctttttgctggtctgctgccaggcgataacgctggccatcccccaggcggcggcggtcagtacggcaaacagcagcgtcaggcgcaggcgcaggctcaggcgggcaagtcgtttcatgcgtcacccagggtatagccgatgccgtggacggtacggataaagtcgctgccgagcttgcggcgcagatgatggacgtgaacttccacggcgttgctggagacctcgtcgtcccaggtgtagagcttttcctcgataagcttacgcggcaatacgcgcccggcgttgcgcataagcagttccagcagggcgaactccttcggcttcagcgccaggctttcgccgtcgaggctggcggttaagcggttcggatcgaggatcaccttgccgtggcgcagttcgctgctgctctggccgtgcgcgcggcggatcaacgcttcgaggcgcgctgccacctcaatcagggcgaaaggtttgcacaggtagtcatcggcgcccaggcgcaggccctccacccgctggttgagggcatcgcgggcggtgaggatcagcaccggctcatggcggcctttatcgcgccattcgcgcagaatatcgaggccatcgatgccgggtagggtgaggtcaaggattgcggcgtcgtagggggcgctgtataaggcatttttgccctccagcccggcggtaaaccagtcaatgctaaagcccattttgctcagcccggctttgatgccgtcgccgataagcttgtcatcttccaccagtaatatgcgcatgtttccctccgacgatcccgtttctttgcgcagtaaaccgcgttgaagcgggtgatgtacagcattaaaatttcttttttccgcttaagaagtcgttaagttttgtcgggcgtaataggagccataccaccacaaaagggagaatataagatgaaaaaaattgctgcgatgaccgcgattattgctttggtttccatgccggtactggccgccgggcagggaggattcaccggaccgtctactaccactaccacccaggctggcggcttcaccgggccgagcggcgcggtgaccaccgtggcgaacgccaagtcgctgcgtgatgacacctgggtgaccctgcgcggtaaaatcgtcgagcgcatctctgatgacctgtataaattccaggatgcttccggggtgatcaatgtcgatatcgaccacaagcgctggaacggcgtgaccgtcggcccgcaggacacagtagaaattcagggggaagtcgataaggactggaactcggtagaaatcgacgttaaacagatccgtaaaatcgcgccataagtctccgtcggataagcgcaagatcggtcaggaatcgcgatcctcgctctgtcagagtatgtcgcgaggaggagacgatgaacgatattaaggccagcccggcgtatgtcgggcgcttccagcgtgtctgtaggtacattgcgcgccatcttgatgagccgctgtcgctggagacgctgagcgcgatagcgcacagttcgccttaccattttcaccggcaatttagcgcctataccggcattccattgtaccggtatattcagtggttgcgtctgcgacgcgcctgttggcgcctggcgttcaacccccgcgataaagtcatcgatattgcccttgatgccggatttcagaatgcggagtcgttcagtcgtgccttccgtaccgcgtttgaccaaagcccgacccaattccgtcaacaaccggactgggccgagtggcatcgacgcgtaccgaaacatacgctacaggagcaaacgtcgatggacgtcaacattatttcgtgcccctccacccggatagccgtactgcaacatcgcggtagcccggaccttgtcaacgccaccgccgcgcgttttatcgcctggcgtaagacgagcggattatcgcccgtcgccaccagctatacctgggggatcgcctgggacgatccgcagaccaccccgcaggaggcatttcgttttgatatctgcggtacggtcgattggccggttggtgaaaacgcctttggcgtgattaacggcgaaatccccggaggacgctgcgccgtcgtgcgccatcacggctcgctggacacgctggcgaacagcgtttggtttctctatcgcgactggttacccgcttcaggcgagacgttacgggattttccggtgtacttccgttacctcaattttgtccatgaggtggctgagcatgaactgcaaaccgatatttatctgccgctggcctgattaagcgtgacggaatcctcagccgatctcacggcctgtgactcagggcgtgagatcgggtattatcgcgggtagttttgccgtccgaacggtcggtacccagattgaggatccacgattaatgagcgatatggcagagcgccttgcgctgcatgaatttacggaaaatgcttacctgaactactccatgtacgtgatcatggacagggcattaccgtttattggcgatggcttaaaaccggtccagcgtcgcatcgtctatgcgatgtccgagctggggctgaacgccagcgcgaaattcaaaaagtccgcccgcaccgtcggcgacgtgttgggtaaatatcacccgcacggcgacagcgcctgctatgaagcgatggtgctgatggcgcagccgttctcttaccgctatccgctggtggatggtcagggaaactggggggcgccggacgatcccaaatctttcgccgccatgcgttacaccgaatcccgcctgtcgaagtatgccgagctgctgctcagcgagctggggcaggggacggtcgactgggtgccaaactttgacggcacgctgcaggagccgaaaatgctgccagcgcgtctgccgaacatcctgctgaacggcaccaccggcatcgcggtaggcatggcgaccgatattcctccgcacaacctgcgggaagtggccaaagcggcgattacgctgattgagcagccgaaaaccaccctcgacgaactgctggatatcgtacaggggccggatttcccgaccgaggcggagatcatcacctcgcgggcggaaattcgcaaaatctaccagaacgggcgcggctcagtgcgcatgcgcgcggtgtggagtaaagaggacggcgcggtggtgatcagcgcgctgccgcatcaggtctccggcgccaaagtgctggagcagattgcggcgcagatgcgcaataaaaagctgccgatggttgacgatctgcgcgacgaatcggaccacgaaaacccgacccgtctggtgattgtcccgcgctccagccgggtggatatggaacaggtgatgaaccacctgttcgccaccaccgatctggagaagagctaccgcatcaacctcaatatgatcggccttgacggccgcccggcggtgaaaaacctgctggagatcctcagcgagtggctggtgttccgtcgcgataccgtgcgtcgccgtctaaaccatcggttagagaaagtgctgaagcgcctgcatatcctcgaaggtttgctggtggcgtttcttaatatcgatgaagtgattgagatcatccgcactgaagatgaaccgaagccggccctgatgtcgcgctttggcatcagcgaaacccaggcggaagcgattctggaattaaaactgcgccacctcgccaaactggaagagatgaagatccgcggcgagcagagcgagctggaaaaagagcgcgaccagctgcaggcgattctggcgtctgaacgtaagatgaacaacctgctgaaaaaagagctgcaggccgatgccgatgccttcggcgacgaccgtcgctcgccgcttcacgagcgtgaagaagcgaaagcgatgagcgaacatgacatgctgccgtctgagccggtgactatcgttctgtcgcagatgggctgggtgcgcagcgccaaaggacacgacattgacgcccagggcttgagctataaggcgggcgacagctggaaagcctcggcgaagggcaagagcaaccagccggtggtgtttatcgataccaccggacgcagctatgccatcgatccgattactctgccttccgcgcgtggccagggtgaaccgcttaccggcaaactgaccctgccgccgggcgcgaccgtggagcatatgctaatggaaagcgacgatcagaaactgctgatggcttccgacgcgggctacggtttcgtctgtaccttcaacgatctggtggcgcgcaaccgtgccgggaaagcgctaatcaccctgcctgacaacgcgcacgtgatgccgccgctggtgattgaggatgagtccgatatgctgctggccatcaccgccgccgggcggatgctgatgttcccggtcagcgatctgccgcagctgtcgaaaggcaagggcaacaaaattatcagcattccggcggcggaagccgcagccggccaggacggtctggcacatctgtttgttctgccgccgcagagtacgctgaccattcacgtcggcaaacggaagatcaaactgcgtccggaagagctgcaaaaagtcaccggcgagcgcggccgccgcggttcgctgatgcgcgggctgcagaaaattgaccgcgtggaaattgactcgccgcgtcgtgccgcggcaggcgatagcgaagagtaagcgcgtctcctcccgtctttgacgggaggagacgaaaaaatgccgcaaaatcgttgtttattcaggcgttgcgattaacaatgtccatcatcagggacccaggaagaacggtcccggcctgcgcagaacttgtgagcctgccttctgccagcagcgaataattctaagcggtttgggttttagaggtagctatgctattcatttttcgagtaattttcgtggtcatttattgcatcgtagtgtgcgtacttggctgtctgtactgcttgttcagcccacgtaatccaaaacacgttgccactttcggccatctgtttggccgtttatctccggtatttggcctcaaggtagagctacgcaaacccgccgacgcggaaagctatggcaacgcgatctacatcgctaaccaccagaacaactatgatatggtgacggcgtcgaatatcgtgcaggctccgacggtcaccgtaggtaaaaagagcctgctgtggatcccgttctttggccaactgtactggctgacgggcaatttgctgattgaccgtaataaccgaaccaaagcgcacggcactattgccgaagtcgtcaacgcttttaaaaagcgtaaaatttcgttctggatgttcccggaagggacccgtagccgcggccgcggcctgctgccgtttaaaaccggggcttttcacgcggctattgccgctggggtgccgattattccggtgtgtgtctcgaatacatcgaataaaataaagctcaatcgctggaacaacggtctggtgattgtggaaatgctgccgccggtagataccactcagtttggtaaagacaacgtgcgtgcgctggcgacgcattgccgcgagctgatggccgccaaaatcgctgatctggacaacgaagtggccgagcgcgaagcggctggaaagcaataagacaggaaacgccgccaacgcgcgcgtattgctggcgggaaacgaattccctttttcatttgtcagtatgtcatggagttaatatgtcactcagtcggcgtcagtttattaaggcttccggcgtagcgctgtgcgctggcgccgcgccgctgaaggcccatgccgccggccagcagcctgcgctgccggttccgccgctgctggaatctcgtcgcggccagccgctgtttctgacgctgcagcgttcccactggtcgtttacccccggcacccgcgcccccgtctgggggatcaatggccgctatatggggccgacgatccgcgtctggaacggagacgacgtcaagcttatctacagcaaccgcctgacggagaacgtggcgatgaccatccgcggtctgcaggtgcctggcccgctgattggcggcgcggcgcgcatgatgtcgccgaacgccgactgggcgccggtgctgcctatccgccagagcgcggcgacgctgtggtatcaggccaacacgccgaaccggatggcgaaacaggtttacaacggtctggccggcatgtggctggtggaagacgaggtcagcaagaacctgccgatccctaaccactatggagtcgatgacttcccggtgattattcaggataaacggctggataacttcggcacgccggaatatagcgaaccgggcagcggcggctttgtgggcgacacgctgctggttaacggcgtgcagagcccgtatgttgaagtgtcgcgcggctgggtgcgcctgcgcctgctgaacgcttccaactcccggcgctatcagctgcagatgagcgatggccgactgctgcatgtgatttccggcgatcagggattcctgccggcgccggtttcgctcaagcagctatcgctggccccgggggagcggcgtgaaattctggtcgatatgactaacggcgatgaagtatccattacctgcggcgaagcggcgagcatcgtcgaccgtatccgcggtttttttgaaccgtcaagcatcctggtctccacgctggtgctgacgctgcgtccgaccgggctgctgccgctggtgaccgacagtctgccggtgcgcctgctgccgaccgagctgctctccggtacgccgatccgcagccgggatatcacccttggcgacgatccgggcatcaacggccagctgtgggatccgcagcgtatcgatatcacggcgcagcaggggacctgggagcgctggacggtgcgcgccgaccgcccgcagtcgttccatattgaaggggtgatgttccagatccgtaatgtcaacggctcgtctcctttcccggaagatcgcggctggaaggacaccgtgtgggtcgacgggcaggttgagctgctggtctattacgctcaaccgtcgtggccgcacttcccgttccagtatctgagccagacgctggagcttgccgatcgcggctcgatcggccagatgctggtgaatcccgcgccgtaatctctttgaccctggccggcgcacggtcagggtttgagaaaatcctccttcatttccactatcattccggcttataatccacgcccttttggttatttttttatcattttccccggaagcaatatgagcgcaatatccctgatccaaccggatcgtgaccttttttcctggccgcaatactgggctgcctgttttggccctgcgccttttttaccgatgtcgcgtgaagagatggatcaacttggctgggatagctgcgacattattctggttaccggcgacgcctatgtcgaccacccgagcttcgggatggctatctgcggccgcatgctggaagcgcagggtttccgggttgggatcatctcccagccggactggaacagcaaagacgactttatgcgtctgggaaaaccgaacctgttcttcggcgtgaccgccggcaacatggactcaatgatcaaccgttacaccgccgaccgtaaactacgtcatgacgatgcctatacggcgggtaacgtggcgggcaaacgtccggaccgcgctaccctcgtctatacccagcgctgtaaagaggcgtggaaagatgtgccggtgatcctcggcggcatcgaagccagcctgcgtcgtaccgcccactatgattactggtccgacaccgtgcgccgctcagtgctggtggactccaaggccgatatgctgatgttcggcaacggcgagcgtccgctggtggaagtggctcatcgcctggcgatgggcgaaaccatcgaccagatccgcgatgtgcgcaataccgccatcatggtgaaagaggcgctgccgggctggagcggcgtggactccacccgtctggatacgcccggtaaaattgaccccatcccgcatccgtacggtgaagatctgccgtgcgccgataacaaaccggtcgcgccgaaaaaacaggaagcgaaaagcattactgtgcaaccgccgcggcccaaaccgtgggaaaaaacctatgtgctgctgccttccttcgagaaggtgaaaggcgataaggtcctgtacgctcacgcctcgcgcattttgcaccacgaaaccaaccccggctgcgcccgggcgctgatgcaaaagcacggcgagcgctacatctggatcaatccgccggcaatcccgctctccaccgaagagatggacagcgtcttcgcgctgccgtacaagcgggtgccgcatccttcctatggcgatgcgcgtattccggcgtatgagatgatccgcttctcaatcaacatcatgcgcggctgcttcggcggctgttcgttctgctcgatcaccgagcacgaaggacgcataatccagagccgttctgaggattcgatcattaatgagatcgaagccattcgcgacaccgtgcccggctttaccggggtgatctccgatctcggcgggccaacggccaacatgtatatgctgcgctgtaaatcgccgcgtgctgagcagacctgccgccgtctctcctgcgtctatccggatatttgcccacacatggataccaaccatgaaccgacgatcaatctttatcgccgcgctcgcgagctgaagggcatcaagaagatccttatcgcctccggggtacgctatgacatcgcggtcgaagatccgcgctatatcaaagagctggcgacccaccacgtcggcggctatctgaagatcgccccggagcataccgaagagggaccgctgtcgaagatgatgaagccgggaatgggcagctacgaccgctttaaagagctgttcgacacctattcgaagcaggcgggtaaagagcagtatctgatcccgtactttatctccgctcatccggggacccgtgatgaagatatggtgaacctggcgctgtggctgaagaagcatcgcttccgtctcgaccaggtgcagaacttctatccgtcgccgctggcgaactcgaccaccatgtattacaccggcaagaacccgctgggtaaaattggttataagagcgaagaggtggtggtgccgaagggcgataaacagcgccttctgcacaaagcgctgctccgctaccacgatccggcaaactggccgctgatccgtcaggcgctggaggcgatgggcaagaagcacctgattggctcccgtcgcgactgcctggtgccagcgccaaccctggacgaaatgcgtgaagcgcgtcgccagaaccgccatactcgtccggcgctgaccaagcacacgccgatcgcccatcagcgccagacgcctgccgctgcgggcgcgaaaaaacgcgttaagccgaaggccgtatcacgctaagcggctggcccggcgggatcgctcgccgggaacatctgtgaaaaaaggagagaggtgatgacgccggtcatcctgtcgcgacaacaactggaccagctctgggagatagaccgcagcgaaattatcgatacgctctaccgtctcgataacggtcagctgcgggcttatcgggaatattatgacgtgcgtggctgggaccctcacgatcgtcaggtttatactccgattcacgaggcctgttacgatcgcggcggtatttttttcgccttttttgacgatgagcagatgattgccgcagcggcgctggatacgctgcctcgcggcatgaatggcgagctgcgccagctattattcttttatgtcggggcgggaaagcgcggccagggctgggggcggcgactgtttcagtatgccctgcaccagctgccagaaatgggggcgtccggcctctatatctcgtcgatccccaacaaaaacaccgtcgatttttatctggctcagggatgtcgcttagcggataagcccgacccggcgctgtttgcgctggagccagaggatattcatctggtctgcgatcgcctttaacgccgaggcgctaaaggcgatggcaagagagagcattatccgccgaactgatccgggtcaggaccgagacgtttaccctggtccagcttcgcgatcgctcccagctcatctttgtcgagacggaagtcccagacgtcaaagttttccgcgatacgcgacggcgtgacggatttcgggatcaccaccagaccgctgtcgagatgccagcggatgacgatttgcgccggcgttttgccgtacttatcggcgagctggtggatgactttttgatcgaagacgccttcgccgccctgggccagcgggctccaggattcggtctggatcttgtgggtggcgttccacgcgtgcagctgacgctgctgcataagtggatggagttctatctgattgatcaccggggcgacgccggtttcatcaatcagcttctgcagatgcggtacctggaaattacacacgccaatgcttttggtcagcccctgctgctgcagctcgatcagcgcctgccaggcctcgacgtaatggccgatagccggtaccggccagtggattaaatagagatccacatagtccagcttcagtttgctgaggctctctttcagcgcctcgtgcggccgtttttgatcgtcgttccacagcttagtggtgatgaagagctcatcgcggttgacgccagcgctgtgcagcgcattgccgacgccggtctcattttggtacgcggcggcggtgtcaaaagagcgataaccgacttccagcgccttatgaatggcggagacgacttcctcgttgccagctttccacacgccgagacccagctgcggcatcaggttgccgtcgtgcagttttataacggttggatgtgtcatgccttcctcctgttaatgaactcggcgaagcaggatccgccgaggggtagcattaagtctggacgaaatagctaaaaacggtagtaaaaacacctctccccggcgtttgtttaacgtaaggagaggtgaatcaggcggggagcgcttagcgtgcagcctcgtaaatacggcggctgacgtccagggtgatatcctgatgttcgccaagtttagtcatgccgtgctcttccagtttcgccagcagcgccgggatggagctaccgtcgagaccgtaatcggaaaggcgggtcggcacgcccatctgctcgaagaactgacgcgttgcggcgatggcggcatcgatacgttggtcgtcagagccttcggtaatattccacacgcgctcggcatactgcagcagcttctcgcgcttggcatcgcgtttctcattccacagcgccggcagcacgatagccagcgtctgggcgtgatccaggccgtgcatcgccgtcagctcgtggccgagcatatgcgtcgcccagtcctgtggcacgcctgcgccgatcaggccgttcagcgcctgcgtcgccgcccacataatattggcgcgcacgttatagttctccggttcctgcagggctttcgggccatcctcgatcagggtcaggagaatgccttcggcgaagcggtcctggattttgccgtcaaccgggtaggtcacgtactgctcgacggtatggacgaaggcgtcaaccacgccgttcgcgacctggcgcggcggcagggtataggtataaaccggatcgaggatcgcgaactgcggctggacgtgcgaagacataaacgcgcgtttgtcgccggtggttttccgcgatatgaccgcgcctttgttggattcagaaccggtcgccggcagagtcagtaccgagcccattggaatggcgctggcaattttgctgccataggtttccagaatttcccacggatcgatatccgcgtcgtagtgggctgctgcagcgataaacttggtgccatccagcaccgaaccgccgccgaccgccagcaggaaggtcactttctcttcccgggcgagtttcaccgcattcatcagggtttcgtaagacgggttcggctcgatgccgccaaattcaaggacatccaggccattcagagcggtgaggacctgatccaggacgcctgtttttttgacgctgccgccgccgtaggtgatcagtacgcgggcttccgccgggatctgttcacgcagcttttcaatcgcgcctttgccaaacagaatgcgggttggggtatgcaggtcgaaattattcattgcttaagtcctccaaagagtaaaaccgtcgacagggacgataccgctgcccgatgaaggttattgtggtcctggcgccgttgaccctcaatgcacattcctgccgatgtcttgcctatttctccatatggctggagaatttgtagcggcctgcgcacaatgtacaggtgaagaaacatcgggagagacggtggcaatgcaacacgcagagatatgtcggacattaacggagaagattaacctgctgaaagataagcacgaaatgttaagttcgttgctgcctgacgtccgtttgctgtacggaacgcaaccggggccccggacgccggtgatgtatcagccggggatcgtttttctcttttcgggccataaaattggttatatcaatgaacggacttttcgctacgatacaaacgaatatttactgctgaccgtgccgctacctttcgagtgcgaaacctttgccaccccggaggtgcccctcgccgggatgcgcctgaacgtcgatatcctgcaactgcaagagctgctgatggatattggcgaagatccgctgtttcagcccgcggtcgcctccagcgggataaactccgcggtactctcggaggatattctgtgcgctgccgaacggctgcttgacgtgatggagcggccgctggacgcacggatccttggcaagcaaatcgtccgcgaaattctgtattatgtgctgacggggccctgcggcggcgcgctgttggcgctggtcagccggcagacccacttcagcctgataagtcgcgtgctcaagcatatcgaaagccagtacaccgaaaacctcagcgtcgatcggctggcggcggaagcgaatatgagtgtgtcagcgtttcaccataattttaaagcggtgaccagcacttctcctttgcagtatctgaaaaactaccgtttgcacaaagcacgaatgctgatgatccatgacggcatgaaggccagcgcggcggcgatgcgcgtgggatatgaaagcccttcgcagttcagccgcgagtttaagcgctacttcggtttgacgccgggagaagacgccgcgcgtattcgcacgatgcaggggatgtaataccgggaaagggcggccgggcgggcgcaggccccccggcaggtaagcgtcaggcgctgcaatatttctttttaatgaccacgaacagcgtgccgagcaggccagccagcagcagggcaatcggcaggatcatcagacaggtcatcacctgatcttcatggcgcttcacaaacgggatcatgctcagcgcatagccaagacccgtcaccacacagacccacagcagggcgctcagccagttgaagaactggaagcggcggttcggcaggccagaaatcccggccatggttggcagcagggtgcggacaaacgccagaaaacggcccgcgagcagcgccagcaggccgtggcggtcaaacatgcaggtggcgcgctgatggtacttatgcggcagatgcgccagccagcctttcaccgtttgcgtattgcccagccagcgcccttgcacatagctcagccagcagccgaggctggcggcggcggtcagaatggcgatagtgggcacaaagtccatgacgcctttagcaatcagcgcgccggcgagcagcagcaggctgtctcccggtaaaaaggaggcgggcagcagcccgttttccagaaacagggtcgcgaacataaccagatatacaacgcccacaacgtgagggttcgccaatgcggcaaaatcatgttgccacagcgcggcgacaatctcttgaatgacaaccatggactttcctaagtggtaccgtattgttgactagtgtactcctgaagaggcccgagcaccttgatcccgggcgcaacaaaagcggccgctttgctaaaaagcgtccgctattgttgccactgactgtcactttacacgatacgcgcgaagcccgctgctaaatccgcctgcagatcgtcaacattttcgagaccaatgtgcaggcggatcagcgtgccgctgaagtcgacttcagcatccggtcgaatgtgggcgatttgctccggctggttggcgagaatcagcgactcaaagccgccccacgaataggccatactgaacaggctgaaattgtcgagatactccgccagttcggcatcattgaggcgcttgctgagcacaaacgagaatagcccgctgctgccggtgaaatcacgtttccagaactcatgacctttactgccgggcagggcggggtggtttacccgcgccacctgcgggtgctgcgccagccactcggcgatgcgcaggctgctttcatgatgctgacgcaggcgcacgcccagggtgcgcaggccgcggctggtcatataggcagtatcggcgtccagcatttgccccatcaggtaggcattttcacgcagctgcggccagcagcgcgcgttcgccaccgcggtgcccaccatggcgtcggaatggccgatcaggtatttggtgcctgcctgaatggaaatatcaatgccaaaatccagggctttaaacaggatccccgccgcccaggtgttatcgatcatgataatcgcttccggggcgacctgacgcacggcggcgactatcgccggcacatcgtgcacttccatggtgatcgagccgggcgattcgaggaacaccacgcgggtctcagggcgaaccagacgggcgatatcggcaccgattaagggatcgaaccagctggtggtgacgccgagtttggcgagaattttggtacaaaagtcctggcttggctcataggcggtattggtcatcagcacatggtcgccttgctcgacaaacgccaggatagtgttagccaccgccgcggcgccgcaggggaagagggcgcagccggcgccgccttccagctcgcacatcgcttcctgcagcgagaaatgggtcagggtgccgcgacgaccgtagaacagctcgccgttggcccgattgcgggtggcgtgctttttggcctcgacggtgtcgaaaaccagcgatgacgcgcgctggataacgctgttcactgagccctgggtgtactttttgctccgcccggcgttgaccagcgcggtatcaagatgtttatcagccatgttgacgaacctgtttttatacgtctggacgtctaaactaacatgaatctgcttttctgtaccagcgcaccgccgatacaggcgaaaattttaccaggcccgcggttagccgcttttttactgcgtaagcgcaaggaaaataaacgtgatttgctgcacagtgtaaatactaatgagaaccactatcaattcgatgtcgttttgatattattgtgggcagattttgtgattatcgtcgtggagatagagcgtgggtaataatttgatgcaggcggatctctccgtttggggtatgtatcatcatgccgatattgtcgttaaggtggtgatgattggcctgattctggcgtcggtcgtcacatgggccatcttcttcggtaaaggggcggaaatcctcgccagcaagcgtcgcctcaaacgtgaacagcagcagctggcggaagcccgctctctcgatcaggccagtgatatcgccagcgcctttgaggcgaaaagcctcaccacccagcttatcaatgaagcgcagaacgaactcgaactctctgccggtgccgaagacaatgaaggcatcaaggaacgaaccggttttcgccttgagcgccgcgttgcggcggtcggtcgccatatggggcgcggtaacggctacctggcgaccatcggcgccatttccccgtttgtgggcctgtttggtaccgtctggggcatcatgaacagctttatcggcatcgcccagacccagaccaccaatcttgcggtggtagcgccgggcatcgcagaagcgctgctggcgacggccatcggcctgttcgccgccatcccggcggtggtcatctataacatcttcgcccgcatgatcggcagctacaaggcctcgctcggcgacgtcgccgctcaggtactcctgctgcaaagccgcgatctggacctcagcgccagcggcgtgaagccggtgcgcagcgcgcagaaattacgggtaggttgatcggctatggcgatgcgtcttaatgaaaacctggacgataacggcgaaatgcatgagatcaacgtgacgccgtttatcgacgtcatgctggttctgctgattatctttatggtggccgcgccgctggcgacggtcgacgtgaaggtcaatctgccagcctcctccagccagccgcaaccgcgaccggaaaaacccatctacctgtcggtgaaggcggataagagcatgttcctcggcaacgacccggttaccgaagcgaatatgattaacgccctggatagcctgaccgccggcaaaaaagataccaccgtcttcttccgcgcggataaaaccgtcgattacgagacgatgatgaaagtgatggataccctgcatcaggcgggctatctcaagatcgggctggtgggcgaagagaccgtcaaagcgaagtaacctccccctttccacttttctcctcaggctggccttgcgccagctttttaataggtgacgcaataacttgtaagaccaatcttatagatgtgtgacaactttctcagttaacagaaaacataaacccgatgcgaaaaatgacaataggatagtttttatcctgcctctacagtgaataccacttcatctgagagggattatattgtgaatcacgataataaactgtcatttgcggagaagctgggatatggcatgggggatgcagcctgcggtatcgtttactcttcggtaaccatgtttctgacatggttttatacggatatttacgggctttctgctgccgcagtcggagtgatgttcctggtgacgcgggttctggatgcgattaccgatccgctaaccggcattgttgcagaccgtgtaaagacccgctggggccattttcgcccgtggcttatctggtttgccgtaccttatgccgtgctggcggtaatgaccttcacgactccggaatttggcgcatcgggtaaactggtttatgcctacctgacctacaccttactcatgctgtgttacacctttatcaatattccctactgcgcattgggcggagtcattacgcgtgatgagaaggatcgcctttcagcccagtcatatcgttttacgatctcatctctggccggtctgatggtttctgtcgcaaccctgttcctggtggattttttcggtaaagaaaataagcagtttggttttcaggcgacaatgggaatcatgggcgcgatcgctattgtaatgctggctttttgcttcttctctaccaaagaacgcgtggctccagctgttgaacagcaggggagcatacgcgaagacctccgtcagctgctggcgaatgaccagtggcgtattgtggcgataattacttttttctccagtatggccggggttatgcgcagcgccgccacgctctattatgcaacctacctgatgttaggcggtgtggagtcagcggcgggaacggccatgaaatcagcatttgtttccaccagtgtcgttggcacgattatcggcagcatcgccgccggatggctggccaagcgctatcgcgcggtatcgctgtttaaaaatatcaacctcctgctggtcctggttggcgtcgtaatgttctttgtgccgccgacctggctgccggtggtgttccctttatacttcctggtcggcttcttccatcagatgtaccagccgtttaaatggaacatgatggccaacgctgccgattatggcgaatggaagtttggccgtcgcatcacgggattatcctattccggtaatctgtttgctttgaaaatgggcatggcggttgctggcgccgccgtaggtttttcgcttgggctatttggctatcaggcgggcgtaacggcgcagactccgctggcgacaatgggaattgtggggctgttaaccctcggtccatcactatcttacctgctcctgtggtggctggcgcgtttctataagctggatgacaaaatgatgcagacaattcagcgcgagctgtccatgcgtcagcagcaggggcattcagagacgcatttgccgctaaacgccgttccggaaaaggcctgaggagatgcgaaatatgaccccttctgaataccagaatcctatcttatgcgccgattattccgacccggatatcgtgcgcgtaggcgatgatttctttatggtctcttccagttttaaccatgtgcccgctttaccgatcctgcattcaacggacctggttaattggactatcatcaaccacgttatggatgaactgccgctacctggttatgaccggtatcagccgggtaagggcgtatgggcgccgtcgattcgctggcacgatggcaagctgtgggtctgcttcagcacgccagatgaaggtatttttatctgccataccgaggatccgtggggggaatggagcgctccgcactgcctgcgcgaggccagaggttggatagatccctgcccgttctgggacgacaatggtcaggcctggttggtacatgccttcgcccatagccgcagcggcatcaagcataaactgcagttgtttgcgatggcgccggacgccagcgaattgctgggcgaagggcagattatctatgacggctgctgcgatttacctacccttgaggggccaaaggtttatcaacgcgccggttggtactacatctttgctcctgcgggcggggttgaaaatggctggcagacggtactgcgcgcgcgccagatgacggggccctgggaagccaaaaacgtgcttttccagggaaacacctcgataaacggaccacatcagggcggctgggtggagggtgaggagggcgaatgctggtttgttcatttccaggacttacacctctatggccgcgtggttcacctccagccgatgtcctggggtaacgatggctggccgcgtatcggtgagcagattggcaacggcggcgtcggacagccggttttacgttggccgcgtcctaaagggttaacgccttcaccggcaatggcgccgcaaaccagcgactattttgcgcaaggccaaccgggaatacagtggcagtggcaggctaaccccagccctgagtggctgctgccggcggaaggcgaacttcgattacgctgcgtcccattatccgaagtcgatggacagagagcgttatactgggcgccgcagctgttgctgcagaaattcccggcgctaacttttagcgcgaaaacaagcgtaacgttatatgccgctcaggacggtgatgccggaggcctgatcgtatacggcgaacgctacgccgctttgctggtggagtttgggcaagggggttaccggctcgtgtggcgacacggttggatgagcgatgcgggcgtggtgcgcgaaactcgtcaggttcttgctgagcttaagtgcggcaagtgtcagctgcaggtggccgtaggcgaaggcggcctgtgtcaattttcctggcgagccgaggaggagtggcggaaggttcctctttgttttgctgccgggaagggaaaatgggtcggtgcgaaatttggcctgctggctgcttcaatggttggcctacaaagcgagggctactccgctttgcaggactttgaggtcatactttaaagaaaccgtttctggccgcctgcggatgacgcgggcggctgatgttgcataagcgttaccctgttgcgatataatggcggccgtttatgttaactgacaggatcttatggaacgctttctggaaaatgctatgtacgcctcgcgctggctgctggcgccggtttattttggcctctcgctcggtctgattgcgctgaccatcaaattttttcaggagatcttccacatactgccgcatatttttagcgtcagtgagtcggatatgattctgaccctgctgtcgctggtggatatgaccctggtgggcggtttgctggtgatggtgatgttctccgggtatgaaaattttgtctcgcagctggatattaacgagggtaaagaaaaactcagctggctgggcaaaatggacgcgacttcgctgaaaaataaggttgccgcctccatcgtggcgatctcctctattcacctgttgcgtgtgtttatggatgcgaaaaacgtcccggacaataagctgatgtggtacgtgattatccacctgaccttcgtgctttcggcctttgtgatgggctaccttgatcgtctgaccaaagtgaaacactgatcccttctctcccggcggtgttagccgctgggctgttcctccccgttttatgcttttctgggctggcgtatgtccgggcttctgctttgcttaaagagcgcttaacaacggaggcagggtgatgacgcgattaacggccaaagatttcccgcagcagttgctcgagtattatgactactatgcccacggcaaaatcagtaaacgcgagtttctccagctggcggggaaatatactgtcggcgggatgaccgcgctggcgctgtttaatctgctgaagcccgactatgccctggcagagcaggtaccgttcaccgacccggatatccgcccggagtatattcattatccctctcctgacggtcacggcgaagtgcgggcttacctggtgacgccgacaaaaatagccgacaaagcgcccgctgtggtggtggtgcatgagaaccgcggcctgaacccctatattgaagatgtagcccggcgggtagcgaaagcggggtacatcgcgctggcgccggatggcctgagcgccgtcggcggctatccggggaatgatgatgaaggccgcgccctacagcagaaagtcgatcccgtgaagctgatgaatgatttttttgcggcggtcgcgtttatggcgaactatccacaggtgacggggaaggtcggtatcaccggtttttgctacggcggcggcgtcagcaacgcggcggcggtggcgatcccggagctggcctgcgcggtgccgttttacggtcgccagccgccgctgaaggaggttgataaaattaaagcaccgctgctgctgcactatgccggcctcgatagcggcattaatgaaggctggcctgcctatgaacaggcgttgaaggaacaccataaagtctacgaggcctatttctatcagggcgtgaatcacggctttcataatgattccacgccgcgctacgatcggactgcggctgatctggcctggcaacgcacgctggcatggtttgagaagtatttacgctagcgcaaccgtcataaatagcgctaccgctcgctcaaaaaaacgctatataatttattatataacgattgggagggcgcgatggaaaatcattttggcaaaggcttaatggcggggctacaggcatcctatgctgacaccgccgcgcatgcggcgaatttttgcgccgactataaacgcgggtttgtgctcggctactcgcaccgcatgtttgaaaaaaccggtgaccgtcagctcagcgcgtgggaggcggggatcctcacccgtcgctatggccttgacagagatatggtgatggatttcttcaaagaaggtgggtcgggtatggcgatgcgctattttctggcgggctatcggctggaaagctaaacaggacggcttcgcaggcggaaccgtcctgtggtgggaaccctttcccgtccacgggaaagggtgaagaccttacgcctggcgcttatcttccgtttgggtgtcaaagtctcgggcatcatggcgctcatgcagctgctcattgagcgggccgttggtgcggttgacgatgcgtccgcgcttgacggccgggcggttgccgacatcctgcgcccagcgcagcacgtttttatagctcccggcgtcgaggaactccgccgcgttatagacattgcccagcactacgttgccataccacggccagacagccatatcggcgatggtgtactcctcgccggccacatagcgaccgcgggcgagctgtttgtccagcacgtcgagctggcgtttggcttccatcgtaaagcggtcgatcgcgtactcgatcttcactggcgcatagttatagaagtggccgaagccgccgccgaggaacggcgccgcgccctgcagccagaacagccagttgagggtttcggtgcgaccggcaggatctttcggcaggaagaaaccaaatttttccgccagatagagaagaatgttgccggactcaaatacccgggtcggcggcgtggtggaatggtcgctgagggccgggatcttcgagttcgggttgatctcgacaaagccgctggaaaactgatccccttcgccaatgcgtatcagccaggcgtcgtactccgcgccgctgacgcccagcgccagcagctcttcaagcatgatcgtcaccttctggccgttgggtgtaccgagtgagtatagctggagcggatgggttcctaccggcaggacgcgttcatgagtcgcgccggaaacgggacggttgatgttggcgaacgcgccgccgctgttttgcttccattcccacacttttggtggctggtagttttgctctgacatgctggtttgcctttttcgtggatgtacaaaaagtgtagcaggtgacctcaggccataatccgcgcggcccacacgctgacatcatcgccgctgcccagatccggctgcaccaggccgttgaccataaaggtcggcgagacatggatgccgttctgacgggcgtatttactgtgccacttgatcacgtcctgcagctccgggcgggcaaaggcggcccccagcagcacgtgactgtagcgttcaatgcgctcaatgatttgctgcggcgtggcgttcatattcggcccgctgcagtgatcggtaaactcaaactcttcccgatggtcggccacggcctgcatcaccttatgcgcctgctctctgccgtgcggcagggtggacgcggcgaggatgcagcggacgataaccccggagaacagatgccacggctgcgactgcaggcgtatcttgatggtcacgttatcggcgccgacctcatcgagcagatcgtcgagtttattaaacgcgcggacagagtaggggcaggtgggctcaaggaacacctcaaacgtccgcgggccgtgtccccagaccagcggttgggcattcagatgcgagggtgtgctcattgtcgactcctgatgttgcgttgtttttttgttatatcaccgataacgatatcacttttgtttccggctgcagggttattttccttaacggcacgattagcgaaacgaatgagtggtatcatcgttacacctctgtctggtaagtgcctgcggcaggataagaagagggagttttgtttcgccaactgcccgggctgcattaatttgaggtcaggctaaatgagcaaaggatcgacaagcagtgacgccccgtttgggacattgttaggctatgcacccggtggcgtagcgatttattcatcgaattacagtagcttaaatccgcaggactacccggatgacgcgacgtttcgcagctacatcggtaatgagtatatggggcataaatggcagtgcgtggagtttgcgcgccgctttctgttcctgacctatggctttgtcttcaccgatgtggggatggcttatgaaatcttctccctgcgtttcctgcgcgaagtggtcaatgacaatattctgccgctgcaggccttcgccaacggctcccgccgtccgcctatcgctggttcgctgctgatctggcagaaggggggcgagtttaagcacaccggccatgtggcggtgatcacccagcttgtcgacaataaggtgcgtatcgccgagcagaacgtgattcactcgccgctgccgcagggccagcagtggacccgcgagctgaccctcgaggtcaacgacggccggtacaccatcaaagatacctttaccgataccgaaattttaggctggatgatccagaccgccgataccgaacacagcctgccgcagccggtgctgccgggcgaggcgatggccatcaaaggcgcgcggctgccaaacaacggccagtttcgcggtaaatggctgaacgagaaagacccgctgcagaaagcctacgtggcagccaacggtcatttcatcaaccaggatccctatcagtatttcaccatcagcgaaagtgccgaacaggagctgatcaaagccaccaacgagctgcacctgatgtatctgcacgccaccgataaggtgatgaaggatgacaacctgctggcgctgttcgatattccgaaaattctctggcctcgtctgcgcctctcgtggcagcgccgccgtcatcatatgatcaccgggcgcatggatttttgcatggacgagcgcgggctgaaggtgtacgagtacaatgccgattccgcttcctgccataccgaaggcgggctgatcctcgaacagtggctgaagcagggctactacggcaccggccacaatccggcggaaggtctgctcgatgagctggcgggggcgtggaaacacagccgggcgcggcccttcgtccacatcatgcaggacaaggatctggaagagaactaccacgcgcagtttattcagcgttcgctgacccaggccggttttgagagcaaaattctctttggccttgatgagctgcgctgggacgctgccggtcagctgatcgacgccgacgggcggctggtcaactgcgtctggaaaacctgggcatgggaaaccgccattgagcaggtgcgcgaagtcagcgccgaggagtacgcggcggtaccgattcgtaccggacatccgcagaatgaggtgcggctgattgacgtcctgctgcgtcctgaagtattggtattcgaacccctgtggacggtgatccccggcaacaaagccattctgccggtgctgtggtcgctgttcccgcatcatcgctatctgctggataccgattttgaggttaacgacgagctggcgaaaaccggctatgcggtgaagcctatttccgggcgctgcggcaacaatatcgacctgatcggccctcaggatgaacttctggataagaccagcggccagtttgtcgatcgcaagaatatctaccagcagctgtggtgcctgccgaaagtggacggtaagtacattcaggtgtgcacatttaccgtcggcggtaactacggcggtacctgcctgcgcggcgattcgtcgctggtggtgaaaaaagagagcgatatcgagccgttaatcgttttgaaagacaaagcatgacgtacgaaacccgggtagcggcatacccctgtccgggtgacaacgtactgaaaaggatagccccggcatggtaagcgccgccggggagcacctgcaacgaagccaagataattaacacaacaacaagacagaaaaggaaaatagtatgcacgatcggcgtctcgccgcccgcgcgggtgaactcaagccctccgccgtccgcgaacttctcaagcacagtaaactgcccggcgtgatttcgcttggcggcggcattccggccccggaactgtttgataccgaaggcctggagctggcggtgcagaaggtgatgagcgagcgttttaatgacgcattccagtacggtctgacggaaggctacccgccgctgcgccaggcggtgagtgaaatttgccactcccgtggcgtcgcctgttcagccgcccaggtctatatcacctccggctcccagcaatcgctggatatcgttgcccgtacgctgctcgatccgggcgatactatcgtcgttgagcgtcccacttatctggcggcgctgcaggtatttcagctggcgcaggccaatattctcagcgttgacaccgacgatgacgggatgctggtggagcagctggccgacctgctggagaccacccgcgtcaaagctgtttacctggtgccgacgttcggcaatcccggcggcaaaacgctgagcgaggcgcgtcgtcgccggttggttgagctggcgaaacaatatgatttcgtcattctggaagacgatccctacggcgaaattagctttactgacgccgttcggcgcccgctctatcagcatgctgtcgagctgggctgtgaagatcaggtggtttacacctcgactttttcgaaaatcctcgcgccagggatgcgtatcggctggatcgtcatgccggactggctggcgcagcagacggtgattgtgaagcaggcggcggatctgcataccaatatgctgtcgcaggtgatcactgcggaatacctcagtctgaaccggctggataaccagattgcgttgattcgcgaagactaccgcaagaagtgcgtggcgctggccgatgcgctggaaagccgccttggcgagcacctggaattcagccgcccgcagggggggatgttcctgtgggcgcgtttccgctatccgttcgataccatggaatggatgaagaaaacgctggaaaacggcgtggtgtacgtcccgggtgaagcgttctatcacgataagccggatacccgtaccctgcgtctttcttactccacggtgtcagaagccggattgctgacggccgttgagcggctggcggcctccctgtaacgtctctgctgtgcgccgcttttcggcggcgcgcagccctgcgtgacgttaacgtccagcgcagggtcaatccgtttcggcgatccggtcatcgagccagaccagcatcagcgctgcgagaaaagccagcgcaaaggttccaataaacaaccacatagacgtccctcgcgggttaattattttgctgattctaccggagagcgatcgttgcggtcggcgatggagattttagttccggcggaatggctggcgagagagaaaaagtcatcggcatcaatatcgaagttaagaataatttccctgtattttccaccgttaattaacgctttggcttctttaacactactggcaataatgacaggcatcagttttatctcattttgaaaactgtgaagcaaaataagagttagttcgtaccagatcaactactttttatcgtattccgccgcagaaaaaacgtcgtactgtgacgcgacgacgaccggatattttgtgacagcgatccggtcatcaacagcacaatcttattcgacgctggcgatatgctgcaattttgccaactcgtcaggatgatttcccctgttgtttttcgcgcaatatctcgccgcagcgctgcttgtcctgacgcagcgcctgctgttcctgcgggctgagctggcgccaggtatccagcatccgctgccccagcgccggaaggtaatgggttttatgcagcgcgtagtcagaatttcccccctcgacgatattctgcatatcgtggaggaactggcggctgtcgtcatgatcgattatgcaaaataccgcccggtagtaagcttcatcttcctcggtgtaatgcggggtgaaccaccagaccagcagcgcgataagcgccagtagcgggataattaaggataattttttcaacatcagtttttcggccggagacaatcagccgtcagtgtacctgcaacgacggcctgatgtaagcgccggccccggcgggccggcacaggctagtagccgaccgggtagatgcggccggtctgaacgccttcaatgctgcggcgataggcctgcgccacggcggcggcgggaacgctggggaagcccgggaaaaagtcgccgtaggccgccagcgactcgctgagcacggtggggctgatgagattgatgcggatcccgcgcggcagttcgcaggcggcggcgcggacaaagccttccagaccggcgttgaccgtcgtggcattgaccccctgagcaatgggttcctgcgcgacaataccgctgaccagggtaatcgcccccccgtcgcgcagaaaatgctggccgaccagcgccaggcgaatttgtcccagcagcttgtcctgcagtccgaggttgaactggctgtcggtcatggtgcttaacggcccaaagtgcagattgccggtggtggagacgatggcatctacttcacccgtttgggcaaatagcgcctcgacgctctcctgcgaggtgatatccacctgataatctccccgggtgcggccgacgcggataacctcatgtctctgactcagttcttcgctgaccgcgcgaccgatggtgccgctggcaccgataacgataattttcatggcagactcctgatgaggtgagaggctattttttaataaaagtaatctcggataaactggctaaaagttagaacattactaaccagaggttagcaatatggacaaattacgagggatggagacgtttattgccgtggtggagtgcggcagctttaccggggcggcgtcgcgcctggggctgtcggcggtgatggttgggaaatatatcgcccagttggaaagcctgctggcgacgcgtctgctggagcgtaacacccgacgccagagcctcaccgacgccgggcgagtctattttgacgaagcgaaacgggtgatggagcaggtctccatcgccgaaagcgcggtcgagcggctgcggctggcgccggccggcaccctgcgggtgagcgctcccacctcgttcggcgccagcgtgatcgcgcccctgaccgccaccttcctgcaggcctggcctgcggtccgggtggaactggatctgactaaccggatggtcgatctggtggatgagggggtcgatctggcgatccgtatcggcgagatccatcaggaggatctggtggctcgctacctggcgccgtatcggatggtgatctgcgccgcgccggcttatctggcgcgttacggaacgcccgggacgccggaagatctcaccgatcatctctgcctgtcccatacggtctggaccgcccgcaacgagtggcggctgccgggcgtagagggagaagtgcgctggaaacgcgatgcggttttgcgctgcaacgatggctacgcgctgcgccaggcggcgatcgccggggccgggctgctgatgcagccggaggtactgctggccgatgcgctggccagcggcagcctggtgcgcgtgctggaggcgtggactccgcagccgcggcctgtgcatctgctctggcgccaggatcgtcggcccctgccgaagctgacgcagtttatcgcccaccttcagcagggaatggccgacgcgctgacaacgatccgcgcgtcggaataatcactccgcccgcagcgcctgctgccagtcggcaatcagatcgttgggatcttcgatccccaccgacaggcggatcagctgcggtgtgataccgttcgccaggcgtttctccagcgggatcgaggcatgggtcatgctgaagggctggctcaccagactctccacgccgcccaggctctccgcaagcgtaaaccagcgcagcttgctgatgatgcgctcggcgtaaccttcatcgcccttcaccaccaccgaaatcatgccgccgggcagggccatttgctggcgcgccagctgatgatgcgggtgcgaggccagccagggaaaccagactcgctccacttccggctgctgttccagccattcggcgagctgcagcgcgttcgcgctgtggcgctccatccgcagcgccagggtacggatgccgcgcagcgtcaggaagctgctgaacgggtcaagcacgccgcctaccgcattctgcagatagccaagcttttccgcgagcccggagttatcgccaaccaccgccaggccggcgacgacatcggaatggccgttgaggtacttggtcgcggagtgcaccacaatatcaaacccatgctccagcgggcgatggatcgccggcgaagcaaaggtgttatcggcgacgctgatcaggttatggcggcgcgcgatggcggcgatggcgctgagatccgcgagcttcagcagcgggttggtgggcgtttccacccagatcatgcgggtgtcggggcggatcgccgcttcaattcccgccaggtcgtcgggtttcacccagctcacctgcagacccgcgctacggcggcgaacgttttccagcaggcggtaagtgccgccatacacatcatcgaccgccaccaggtgactgtccttatccagcagctccagcacggtggagatggcggccagcccggaggcgaacgcgtagccgcgcgtgccgttttccaggtcggcgatcgccgtctccagcgcgtggcgggtgggattcccgctgcgggaatattcataaccggtatgctgccccggcgctggctgagcaaaagtggaggtggcataaatcggcggcatcactgcgccgtggctgtcggtgaaggttccgctatgtacactcagggtgtggatagatgacataaaaaattccttattgtgcgactcggttacgccaggcggtcaatacatcgctgcgggtgaccaggccaagaaaaagcgcgttgtcagcgatcaccgccaccagaccgcgatcgagaatggcctgcagttcgctctcgggcgcatgcttatcgagggtttcaacatggcgactcatcgcttcgctaaccggtagggagaagcgttggcgatcgccctgtacgtggcggatcaaatcccactcatcgacgatgccgaccacgcggccatcctccagaaccggcagttgggagatgtcatacagccgcatgcgggtaaagaccgcggccagggtgtcgtccggcgcggccgtgacggtagcgccttcgtcatggcgcagggcgataaaatcactgagatcgccctgttcggggcgggcgatcagtccttgctggcgcatccagtcgtcgttgaacattttggacaggtatttattgccgctgtcgcaggcgaaggtcaccacccgcttcggacggctttgcgtccggcagtagcgcagcgcggcgctgagcagggtgccggtggaagagccggccagcactccttcgacctgcagcagctggcgcgcggtgtggaacgcttcgcggtcgctgacgcgatacgcggtatgtaccccctccagcctggccagcggcgggataaaatcttcgccgatcccttcgaccagccaggatcccgtttcgccgtagcgtccggtatcgacctgatcggcaaggatggaacccgccggatcggcgagaataaattccgttctcggcgagtgctcagcaaaccaggcctgaagcccacccagcgtgccgccggagccgacgccgacgacgatggcgtcgatgtcgccctccagctgctgataaagctccggcgcagtggaggtggcatgggcctgcggattggcgtcgttattaaactggtcgatataaaaggcgcccggcgtttcatcggcaaggcggcgggcataatcctggtagtaggccgggtggcctttattgacgtcggagcgggtgagcagcaccgtcgcgcccagcgcccgaaggtgaaagattttctcgcggctcattttgtccggcaccaccaggatcaggcggtaatttttctgcgccgcaatcagcgccagaccgaggccggtattgccggcggtggcttcgataatcgttcccccgggcgccagttttccctggcgctcggcttcattaatcatcgacagcgcaacccgatctttaattgacccgccggggttctgattttcgagttttaaaaacagactgcagggcccggtatccagtttgtgcaactggagcaggggagtatgaccgatcaggtcgctcacggaatgaaacagtgacataaccatttacccactcgtttaagatatttttgcatgctagaactgtgaaaacggttatttaaagaatatttctctgtcatttagcgcaaaatggaatataagatgctatttggccatctggagggaaagcagggcagccacctgggcggatcgatttccagaaaagggcgtttctagccgcttttagcgggaaaatggcgattttaatcagtgcgttatctgatatctgaaaatgtatttgcgaaaagattctatggagaataggcctgcgcttgtcgttaactagcagcgggctggccaggagaaaaacgcagcagggaaatcatgggttaacgcagttcgatggagagtccggatgcagaaaagcaaaaacccgccttgtgggcgggttctttaaatagtggtgcccggactcggaatcgaaccaaggacacggggattttcaatcccctgctctaccgactgagctatccgggcaacggggcgcattaaaccgtaatcgccgcgcctcgtcaacgaaatttatctgttttacagcagactgaacaatctatcaccacattgcgctaaaagcacgcgtcttcaggcaaaaaacagcgtccaggccgcggaaattggcatcgccagcaccagcgcaggcagcatattcactacggcaaacatttttatcccgcagatgcgcagcccggtggccaccagcagcatgccgccgacggcgctgaaatccgccagcatcatcggcgtggtaagcggcataatgatcgccgcgcaggctgcaagagtcagctggataagcagcatcggtacgctgatggcggcgacggcaatgcccagggtgcaggcgaagatggtggcggtgaaaaagtcgagaaacgctttggcaatcagaatgctggcgtcgccggtcatcccttcgcgcatggcgccgaagacgccggtgccgctggcgcagaacaggacgataatcgccacatagctctgaatataagactcatgagccgaagcctttttcttgcctttcgctgacatcaactgctggagtttactgaccagcgtattgatgcctttttccatattgcatatttcgccgagcagcgtccccaccagggtcgacagcaccatcaccggcagattggcgcacttaatgaccagtaaaatgccgatgcccaatgacgccaggccaaaaatagaggtcattgcggtgcggatccgttccggcaaccgttggctgagtaaggcgcccagcacaccgccgaccagcaccgcgctggcgttaataaaaggtcctgtaaccacgctgactcctgttaaaaatccctgataaccgcattattatggcgttaacttaccgggaaagcttgtgtatccgtgatataagtgcatacggttttcatcttgcgcctgttcgggaaaggtgccatgattgcgcgaattttctcctccctgatatgaggccgccgatgacgacacagccattatctcgccagcgacgccgcgcccagatgcgcgggctgcctcatcttgctacgcttacccctctgttcaccatgcggtgaaggacacgtatgctcactgtagggcaacagtaagatcggacgcgtctgcttttactgatgtccggcggtcggagctgaatccgtcagacccggacacatcgttgggcaaggtctcccttgtctgaggtttttacactcccgatacgggcatttgcgcttatgaaatccatgcacattgccgccagctgcgagctggtcacccgcttgtccacccaccgtcgcgttgtggcgctggacagtaccgattttaccgatgtggcggcagtcgtcatctccgtggccgacagtcgcagcggcatccttactctcctcaggcgtagcggatttaacctgccggtctacctgctgagtgagacggcggtcgacaagccggagggggtgcaggcggtgatcgccggtaaagatcaggagtggctggagctggaggcggcggcctgtgattatgaagcgcgtctgctgccgccgtttttcaataccctgacccagtacgtcgagatggataacagcacctttgcctgtccggggcatcagcacggggcgtttttcaaaaagcaccctgcaggccgtcagttctatgacttttttggcgaaaatgtctttcgcgccgacatgtgcaacgccgatgtgaaattaggcgatctgctgatccacgaaggatcggccaagcacgcgcagaagttcgctgcgaaggtgttcaacgcggataaaacctacttcgtcctcaacggcacctcggcggccaacaaagtcgtgaccaacgcgctgttgacccgcggcgatctggtgctgttcgatcgcaacaaccacaagtcaaaccatcacggggcgctgatccaggcgggggcgacgcctgtttacctggaagccgcgcgcaatccgttcggctttatcggcggcattgacgagcgctgctttgatgagcattacctgcgggatctcatccgcgaagcggcgcctgagaaagccaatgcctcccgcccgtttcgtctggcggtgatccagctggggacctacgacggcacggtctataacgcccgccaggtggtggataagatcggccacctctgcgattacatcctgttcgactcggcgtgggtgggctatgagcagtttatcccaatgatggccgactgctcgccgctgctgctggagctgacccccgacgatccgggtatttttgtcacccagtccgtgcacaagcagcaggccggcttctcacagacgtcgcagatccataaaaaggataaccatctgcgcggccaggcgcgtttctgtccgcacaagcggctgaataacgcctttatgctgcatgcctccaccagcccgttctatccgctgtttgccgcgctggacgtcaacgccaaaattcatgaaggtgagagcggccgccgcctgtgggccgagtgtgtggcgctgggcattgaggcgcgcaaagcgatcatcgccaactgcaagatgatccagccctttattccgccgatggtggcggggcgcccgtggcaggatcacccgaccgaggcgatcgcccgggagcgccgcttcttcagcttcgaacccgacgcgcgctggcatggttttgaaggctacgcggacgaccagtattttgtcgacccgtgcaaactgttgctgaccaccccgggcattgacgctgaaagtggggagtacagtgagtttggcatcccggcaaccattctggcgcattatctgcgtgaaaacggcatcgtgccggagaagtgcgatctcaactcgattctgttcctgctgacgccggcggagagcgccgaaaaaatggcgcagctggtggcgatgctggggcagtttgaacagcatattgaagcggatacgccgctggccgatgtgttgccgaccatctataacaaatatccggtgcgttatcgcgactataccctgcgcgagctgtgccaggagatgcacgatctgtacgttagctttgacgtgaagagcctgcaaaaagagatgttccgtaaacggagcttcccaagggtggtgatgaatccccaggatgccaaccacgagtttattcgcggcaacgttgagctggtgcgtctgagcgaggcggaaggccgcgtcgcggcggagggggcgctgccgtatccgccgggcgtgctgtgcgtggtgcccggcgaggtctggggcggtgccgtgctgcgctatttcctcgcgctggaggagggggtcaatatgctgcctggcttctcgccggagctgcagggggtttacagcgagacggatccggacggcattaagcggctgtatggctacgtgctgaagggataaaaaaacgccccgccgaacaggcggggcgttttacttttgccgatcacacgctctgctgggcggcggtcggttgtctgacgtgtttgtatttgaacagcgccacgaaggcaaaggccagcaccagcgaatagccggcgaaaatcagccacacgctctgccagtcagtgatcccctcgacggtaaagtgttcgacgactttgccgctcaccatcccgccgagaatacagccgaagccgttggtcatcatcaggaacatcccctgagcgctggcgcggatttccgggcgcacctctttctcaacgaacaccgaaccggagatgttaaagaagtcgaaggcgcagccgtagacgatcatcgacagcaccagcagtacagtgccgaacggcgtcgggtcgccaaaggcgaacaggccgaagcgcagcatccacgccacaatactgataagcatcacgttcttaatgccgtagcggctaaggaagaatgggatggtcaggataaacagcgtttcggaaatctgcgaaatcgacatcagcactgacgcgtgctcgacgataaagctgccggcaaacagcggatctttatcgaagctgtgcaggaaggtgttaccgaacatgttagtgatttgcagctcggcgccgagcatcatcgagaagataaagaagatagccatacgcttgtttttaaacagcgcaaaagcgttcaggccgagcatctccgtccagctttgattgcgctgggcgttggcgaccggaatatgcggcagcgtcagggtgaacagagtcagcaggaccgacagcgtcgcgccaatgtacagctgcatatggctcagttcaaagccggagaagctcacgccccacatggcgaggataaagccgatggtgccccagatacgaattggcgggaaatcggtgacaatatccagccccgccgactgcaggcggtagtaggagatggtattgatcaagccaagcgtcggcatataggccagcgagttaagcaggatcacgaggaacatctcgcccggcgtggtgacctgcgccgcgaggtacagcgttaacgcgccgaccaggtggcagatggcgtatacccatttggcgctgatccacttatcggcgacgatgccgagcagcgtcggcatcaacaccgcggcgataccgagcgagctatacactgcgccgattgccgcgccgtcaaacttcagcgtgacaaacatgtacgagccaagcgtggtgagccagctcccccaaaggcagaactgcaggaacgacagtattttgagctgcagcttaagattcatgtagttatcctcacaaatgtgggcttgttatgtttttaaaataacattaatcccgttattttgatgcgattctatcattcactagcttaatgcttctgttaactgccgcagaaaaccgaaagatattacagagtatggcggagaataagcgcggcctcagcgcggggctgaggccggagtcgggaggagggctatttacggcggtagcttttctgcgccgtattaactttgtacagatagcggcgcgattccgccgacggatggcgggtggtcagcgtctggtagacgtcccctggcgccatgctgttgataatattggccgcctgcactttatcgctggagaagacccgcagtacgctgccggcgccgccgttataggcagtgatcaccgcgtagcgacgcgaggtggggttatcgatgccggcgaggtaaacattgttcagcatcgccaggtaggcggtaccggtgtcgatgttattcgccgggtcaaacagatagctgcggcttggcaggccggatttaccctgggagcggaagacgtctctgccggcgctgtgctggaccacctgcatcagccccatggcgtcggcatggctgaccgcataggggttaaaggaggattcggtctgcataatcgcgaggatcagcgactcatcaaccccatacttacgcgaggcctgacgcaccatgccgaggtatttatgcgcacgtttgtcgaggtggttcggcaccaggttaatggtgatgctgtagaccacgcgcaggccgttgttgcggctcttcagacgggtttgcagcagatagtcggcaaagcgcgcggcgcgccactcccagcgaatcgacgccccggtgttatccaccacctggccatagaggaacggctctttggagatctggatgtcatcgacatcggaatagaggtcaatggagttggggtcatcgcccatcaacagggttttgacgatcgcctggcgcagtcgtccgcgagggtcggtgccggcaatggtctcgacggtgatcgtcccttcatcgaagttgatgtggctgcgggtttgatactggtcggtgtacttgacgtagtcctttggcccggcgagcaggacttcgttgtacccccaaatgttctcgatgttgtgggcgaactggcccatcaaaatatcgaatccgttcgtgtccttgacccaggcctcgttgtattcggcgccttttttattggagctggaacacgaaacgagcaacggcgcaatcagcgcgagcgctaagtattttttcatcattccgggcgtgcgtgttgtgtttgtttttttaaaggccgcagggcccttactgtttttccggcggcgtgtagccttcgatgtgcacgtctttcccttcaaacaggaactgcaccatctcctgctcaagcagtttgcggtgctccgggttcatcatgctgagctttttctcgttgatcagcatggtctgcttgtgctgccactgcgcccaggcttctttggagatttcgttgtaaatacgctttccgagctcgcccggatacagctggaaatcctggccgtccgcttcacgctgcaggaaggtacaaaaaatggttctgctcataattaatcctctttgatagccgaaaaatttataccggcgctccggcttttagctgttgcaacaagcgctccacgggggccgccagaccgaccgacggcggctgcgctaagttataccagagtgcgttgccttcatccatgcatgcgccagatgagtgcactgtaagccacatcggcacaatatccaggtggaaatggctgaaagtgtggcgaaaagcggttaattgcgtcagattatcggcctttatctggcgctgcgccagccactcgcgtagctccgcttcgtctgcaaactgcggaaaacagaacaacccgccccacagacccaccggcggacgctgggaaagaaacacctcgtcgccgtgctgcatcagcaggaagtagccggtgcgttccgggagggtctgcttcggttttttgcccggatattccgcccatgaatggttcgcgtaggccacgcagccgttgctcagcggacacagctcgcacttcggcttcgagcgggtgcaaaccattgccccgagatccatcatcgcctggttgaagcgctcgacgccctctgccggggtgacctcttcgctgatgtcccacagccgtttttccacctcttttttccccggccagccgctgacagcatagcagcgggcgagcacgcgcttcacgttgccgtcgagaatcggataatgctgaccgagcgaaagggataaaatcgcccccgccgttgagcgcccgacgccgggcagcgccgccacttcgtcaaaggtccgggggaattccccgccgtgcagtgtggcgacttgctgtgcggctttatgtaagttgcgcgcccgcgcgtagtagcccagaccggtccacagatgcagcacctcatccagcggcgcgttggctaaatcaaccaccgtggggaaacgcgccataaagcgttcaaaataggggattaccgtggtcacctgggtttgttgcaacatcacttcggagagccatactttgtagggcgtcttggcgatttgccagggcagggttttacgcccgtatttgtcgtaccagtccagaacctgggctgaaaattgcgtggcgagaaaagtcaaagctacggctccgggatcgcgattacaggggggcagattgcagcataagggcgagtggctgtaaacccttgcatccgccgggtaactttggataatgcccgttttccgaacacattcacaagcagaccaaacttttatgaaaaacgacgtcatctctccggaattcgatgaaaacggtcgcccgctgcgccgtattcgtagcttcgtccgtcgccagggccgcctgacgaaagggcagcagcatgcgctggataacatttggccggtgatgggcgttgaattcaacgatgcgccgctcgatttcgccgccctgtttggccgtgacgcgccggtcaccttagaaattggcttcgggatgggcgcctcgctggtggcgatggcgaaagccaaaccggaacagaatttcctcggcattgaagtacactccccgggcgttggcgcttgtctggcttccgcggaagaagaaggcgtacaaaacctgcgcgtaatgtgtcacgatgcggtggaagtgctgcataccatgatcccggataactcgctgaatatggtgcaactgtttttccctgatccgtggcataaagcgcgtcataataaacgtcgtatcgtgcagccgcctttcgctgagctggtgaaaagcaagctgaagctcggcggcgtcttccatatggcgaccgactgggaagcttatgccgtgcatatgctggaagtcatgtcctcgctggaaggctatcgtaaccagtcggcaagcaacgattacgtaccgcgcccggaatcgcgcccggtaaccaaatttgaacagcgtggccatcgtctcggccacggcgtatgggacttaatgttcgagagggtgaaataatggccaagaatcgtagccgtcgtctgcgtaaaaaaatgcatatcgatgagtttcaggagttaggcttctccgtcgcctggcgtttcccggaagggaccagcgaagagcagatcgaccagacggtcaacgatctgatcgaagaggtgatagagccgaacaagctggccttcgacggcagcggttatctctcctgggaagggctcatctgcatgcaggagattggtaagtgcactgaagagcatcaggctatcgtacgcaaatggctggaagcgcgtaagttagaggatgtgcgcaccagcgaactttttgacgtctggtgggactaagtttgacaagggtcggcaattgccggcccgttttgtcttaagggagttttatgatgcgtaaaacgctgctggcggtggcgctctccatcaccgctttgtctgcccatgcggactaccagtgtagcgtcacgccgcgtgacgatgtgatcctcagcccgcagcaggtgcaggtgaaaggggaaaacggcgatctggtgataaagccggacggcaatctgacctttaacggcaaggcctatgcgctcagcgccgcccagcgcgaacaggcgcaggattatcaggccagcctgcgcagcagcctgccgtggattgaccaaggcgcgcggtcgcgagtcgaaaaaagccgcaaggcgctggataaaatcattaccgaacaggttggcgccaacagcagcatgcacggtcgcctgaccaaactggacgcgcagctgaaagaacagatgaaccgcattatcgaacgtcgcagcgatggcctgaccttccactataaagctatcgaccaggtacgcgccgatggccagcagctggtgaatcaggcgatgggcggcattctgcaggacagcattaacgagatgggggcgaaagcggtgctcaaaggcggcggtaatccgctacagggcattctcggcagcctcggcggcctgcaaacggcgattcaggaggaatggaaaaaccaggaggccgatttccagcagttcggcaaagatgtttgcagccgggaggtatcgctggaggacagccgcaaagcgctggttggctcgttaaaataatcaaaatttcgcggcccgcatacctttgggccgcgcacttctccactcaggcgcggccgtgcgacacgcgtgaacggcgagccagagaatcaatgattaccgcaatcgccagtaccgcgccggtaatgatatagcgcagcgaagacggcaggttcaacagcgtcagcccatttgaaatcgactgaatcacgatgatccccaatagcgcggaccaggcgctgccgcgtccgccgaacaggctggtgccgccgatcaccgccgcggcgatggcgttgaggttgacgtcgccggtgccggcctgctggctggcggaagccagtcgcgacgccgcgagaatgccgccgaaggtcgcaagcgtggtacacaggacgaaagcgctcacataaatcgcccgcacgttaatgcccgaacggcgcgccgcttcacggttgccgccaaccgcgaacatcgagcgaccccattttgtccgtttcagcgcgtagctgaggatcatcacgcaggcgacaaagagaccgaaaatccatggaataccgcgcccctgattgaggtaaagcaccgcggcctcgaagataatcgtcagcgcgatcgcgcgcgccactagcgagctgactccctcggcggaaagattggccgccaggcgccgcgagcgttttttcaggccaaaaataaggatcgccagccctggcagcaatgccatcaggtgtgagaaccagccgggcatcaccagcagttggccaaagcgcaccagcggcgaagtatagggcaggttgatgctgccgctcggcccgaggatatacagctgcatacccagcagcgccagcaggccggcgagagtggcgacgaaactcggcattccgacgcgggtatacagcagcgcatagaccaacccgacggccacgccgcaggccagcgccacggcgatggctcccgccagcggccatcctgcgttcacccacagcacgccgacgatagccgatgccaggccgctcatggagccgaccgacaggtctatctcaccaagcattagcacgcagacgatgccgagcgagataaacccgaccgtcgcgcagtcaaacagcaggttcaccaggttattcggcgcgatatagaccgggttgaggaaggtgaaaaccagggaaatcacaatcagcccggctatcaccggcgcggtgccgagatcgccggttttgatgcgggttatctgcgcgcgtagggcgccgaacagcccctcgtcgtgacgaacgcgctcatcgctgcgatccagcgcggtgtgggatgcggtcttactgttcataaaattacatcgctccggaagtcgttggctgtgatttacgttcaacccggcgtgagacggcgttttccgtcgcgccggtgatcgcggcgaccagatcctgattagaagcatcgggcgtgaagatccctttgttgcgcccgagacgcagcaccacgatacggtcggcgacggcgcgaacgtcttccatgttgtgactgatgatgatgacgccaagcccgcgctcgcgaacgcgctcaatcaggttgagcacttccgcggtctgcgcgacgcccagcgccgcggtgggttcatcgagcataatgattttagggttcagcagcagcgaacgggcgatggcgacggtctgccgctggccgccggaaagcgatgccaccggttcgcgtaccgacggaatacgtgccgccagctcctgcagcagcgtccaggctttcacttccatcgccacttcatcgagctggaacggcgaaatttcatgacccagaaacaggtttgccaccacatcaaggttttcacacagcgccagatcctgaaacaccgtggcaataccgtattccagcgccttgccggggctatcgagggtgacagggttgccgtcaaactcaatggtgccggaggtcggctggtggacgccggcgaggatcttcaccagcgtggatttgcccgcgccgttgtcgccgaccagcgcgaccacctcgccggcgtggacttctaattcgatatccgtcagcgcggacaccgcgccaaaatgtttagagacgttgcgcagttgcagtattggccgcccggcggcggagttgtgttgttgttgcggcatacaaaacgacctcaataatggcgaaatcgcgcccgccgcggcgggcgcaggggcaaaagttacttgctgatgcctaacttctggcaggcggcggcgtactcgccgctacacacctgatcccaggtctggatttttttatcgaagatttccgctttgatgtttttggccgtcaccacttccggggtaaatagctgggaaggggtgttgtacagggtggtgctggcctgcggttttttgccctggataaaatcaaccgccactttggccgccgccgcggcgacgatctccgatggcttggagatggtgttgtactgatcgccagcgatgatcagctgcagcgcggcgatagtggcgtcattgccggtgaccggcggcagcggctggacgccggcagccttaaaggcggcaattgcgccgccgccggtaccgtcgtttgccgcgaccacgcccttaattttgtcgccaaagcgggtaacctgcccggcggtccactcctgggctttcggcggcgcccactccggggtgtcgaattcggccaacgttttgtaaccggactctttcaatccgcgatggataccgtcgcggatcagccctgcggcggcatcggttggcgaaccgttaatttgcagcacgccggcatcctgcggcacgccgctcgctttcagatggtcggtaagagattttgcgatggcgtagccaatgccctcgttatcaaatgagacgtagaaatcagccggtttgtctggtaccgggcgatcataggcaatgaccttgaccccctgcgcttgggcgttttcgaccagcgcggcggcggcggaagaatcaaccggatccaggacgatcactttcgccccctgggcgataaccgagttgaactgctgctgctggagcgacgcgttggcgttggcattctgatagatgaccttacaatccgcgcaaagcttgctcatttccgccttaaaaccggggaagtcgtgctgttcatagcgggtagaggcctgatcgggcattaaaaaggccacggtggcggactctgcagaccaggctgaagccgtgacggtgccggatagtgcggcgagtgtgataaaaatattacggtaattcattgtgttaccctcttttttataggcttaagcccgccgggttgcgccgacgttacagagacttttttaatcagagttaccaataattcacatgtaggatacgtcggttttacatttgctcaaccgatgaagcaggattaccactgcgcaaaaaatgagtcaagaaaaggaaaaaagtcgatcggattttgtgattcgctgcaaataagtgaacaaaaaaacgccagtcgatttgaccgtagcgggagaggatgtaaggggaaagatacgggcgacgacgtgccgcccgcagggattactcttcgctgaggaacagctccagcagcgaatttaaaaacagtttaccgtgctcggtaatttgccagttttgcgcatcttccagcagatagccttcggcgatagcggcatcgatttgctgacggataacctgctcatcaaggccggtatacaagctgaactccgcgcgcggcgcggcctccagcaggcgaaaacggttcataaagaactcaaacggtttatccgcttcttccacatcatgctgacgctcaaggtaacggccttccatatacccgcgcgggtggcgggttttggcggttcgcagaatgcgtccgtcagggaaggtgatcttgccgtgcgcgccgcagccgatgccgaggtagtcgccaaagcgccagtagttgagattatgctgacactggaagcctggcttagcataggcggacgtctcgtactgctgatagccggcggcgctcagcagctgatgcccctgctcgaaaatatcccatagcgcgtcgtcatccggcagcaccggcggccgggagccgaacaaggtgttcggctcaatggtcagctggtaccacgacaggtgcggcgggttgagggcaatcgcctgacgcagatcgtccagcgcctcctccagcgactggtccggcagaccgtgcatcaggtcgaggttgaagctgcgcaagccgaggccgctggcgagacgtgctgcgcgcttggcttcctccgggccgtggatccgccccaggcgctgcagcttcggttcgctaaagctttgtacgccgatggagatgcggttcaccccggcgcgctgataatcaacgaagcgatcggcctccacggtacccgggttggcttccatggtgatttccgccccggcggccagcggcaggcaggcgcggacgccatccagaagggtttgcatggccgggccggacagcaggctcggcgttccgccgccgataaaaatagtgcctatttcccgtccctgggcatagtgcgcatcagcctgcagatcgttcagcagatgctggacgtagtcatcatgcggcacctcgcctttcagcgcatgcgaattaaaatcacagtacgggcatttctgcacgcaccagggaatatggatatagagactcagcggcggcaaattagccattacgtaatgcttccagtaacagtttcagcgcctgcccgcgatgggaaatggcgctcttttcttcacggctcagttcggccgcggttttcccttctgacgggacgaagaagatcgggtcgtaaccgaagccgccatgaccggcggcttgtcgggtgattaccccaggccagctgccgtggcacaccagcggcgtgggatcctcggcatggcgcagatagaccagcacgcagtggaactgggcctgacgctggtcgtccggcacgtcttttaacgcgtcgagcagcttctcaagattctgctggtcgctggcatcgacgccggaatagcgtgcggagtaaatacccggcgcgccgccaagagcatcgacggccagaccggaatcgtcggcgatggccggcaggccggtgatctgcgccgcgtggcgcgctttcagaatcgcgttttcaatgaaggtcaggccggtctcttccgcagagtccacgccaagctcggtctgagcgacgatatcgagaccaaaatcttccagcagcgaggccagttcgcgcactttgccggcgttgccggtagcgaggacgactttttgcatgatgaatcctgtttattcagttagcgccgcgaccgcagtcgggatctgttgtggggcgatgattttaacttgcttatggcggcccagctcacctttttcaatcagtacctggcttttggcgacgcggaactgtttggcgagaaatttcaccaggtgggcattggcctggccatcaacgggcggggcggtaatggcgactttaagctcgtcgccatgtacgcccacgatgctatcgcggctggccttaggctgaatgtacagcctcagcaccagcccgtcagcgcaggtttcaacggcactcatagcgccatccacagccccggcagcagtacattaccggtggcctgcagcacttcggcgatgcccatattgattacgtacaacagcaataccagcaccatcggcgagaaatcgataccgcccatcgacggcagcaggttgcggatagggcgcagcagcgggtccgccagctgcatcagcacatactccaccgggctacggccctggctgacccagctcatgatcgccatcaacagcagtacccagaagatcaacgagccgatggttttcagcagaataagcagagcggagatccagatgatcggctggaaggtgatcaccataaacagcacgatcgctttgatgacgcagagaataaatgccaccagcagcgaggcgctgtcaatcggccccattgccgggataatccggcgcagcggtccgacaatcggctgcgtggctttcaccacaaactgcgaaaacgggttgtaaaagtcgcagcgcgcccactgcatccagacgcgtaacaacacgaccatcgtgtaaagctcaatgaccgttgaaagcaggaaagtcaacgtcttcatggcgttcctcagattccttattatttgctgtagtcgcgcgcaccaaaaatggcagtaccgatgcgcaccatcgtgcttcccgccgcgattgcggcttccatatcgtccgacattcccagagacaacgtatcgaccgtggggtaccgcgtttttaatcgcgcaaatgctaccgccatttgccgggcgacggcaaactgccttacatattctgactcaggcgcgggaatggccatcaggccgcgcagttccagatgaggtaactcagcgatctccgccgctaagccgtcgagcgcttccagcgggatgccggatttgctctgctcatcgctgatgttaatttgaatcagcaccttcagcggcggtaaatgcgccgggcgctgctcgttcaggcgggtggcgattttcagccgatcgacggtgtggcaccagtcaaaatgctctgccaccaaccggcttttgttggactgcagggggccaataaagtgccactgcagcccgctgacgccagcctgctggaaatggttaatcttctccacgccctcctggacgtagttttcaccaaatgcccgctggcctgccgcaatggcttcttcgatcgcgctcgcaggtttcgttttactcactgcaagcaatgtcacttcttctggcgcacgcccgcatcgggcggcagcaccggagattttgtcccggacctgtgccaggttatgcgcaatatcgttcatattccgaggatgagttatgaagctggaagaaatcgtagcccttagtgtaaagcataatgtctccgatctacacctgtgcaattccgccgcaccgcgctggcggcggcagggcaggctggagcccgcgccctttcccgcgccggatattgcgaatttactcaacgactggctcgatgccgcacagttactgcactggcaggaacacggccagattgactttgcgctgaacctggcctgcggtgcgcggctgcgcgccagcgccttcgcccatacgcgtgggatatcgctggtgctgcgcctccttcctgaacagtgcccgcgtctggatatgctcggcgccccgcctgcgctgagcgaactgctggcggaagagagtggtttgctgttggtcaccggagcgacgggcagcggcaagtcgaccaccctggcggcaatggtggggcacctcaatcagcatcttgatggccatattctgacgcttgaagatccggtggaatttattcatcacagcgagcgctgtctgatccagcagcgggaagttggccgtcactgtccttcgttcgccgcggcgctccgcgtggcgctgcgccaggatccggatgtgatcctgctcggagagctacgcgacagcgaaaccattcgcctggcgttaaccgcggcggagaccgggcacctggtaatggcgacattacatacccgcggcgcggcgccggcggtggagagattgatcgatgtctttccggcggaggagaaagatcaggttcgtagccagcttgccggaagcctgtgcgcggtgctggcgcaaaaattgttacctgcacgtcagggcgggagagttgcgctatacgagcttctggtcaacacgccagcggtggcgaatttgatccgtgaaggaaaagtacatcaattgcctggtgtgatgcagaccgggatgcaggccggaatgttgacctttacccagagttttcagcaacgtgtcgctgcaggcgcgctataagatgagaaagagattgatatgacaggttaaatgatatgttagatgaatgtttatttgttgtttattaatattatttggtaatacaaataacttttgattataaattcaaataacacattcagattagatatgtcgacagtgaatacgcatttccaggaaaaaagtttgattatcttttgacagctttgagtcattcgatttatgctgtttgtgggaataggatgattctcatggaataacgtttcagtttgtaaattaccttggtgatttataaattcacgactgtttgtatctttttttattcatttaaccaccatggcggtgggtaacagctaaggagagttttaagtgattaatttaaatggaaattcatcatcttctcgtcaggtaacctttattacccacccgtctattcaaagcaaagcctttgccagctatctgagcgaaaccctgatggcacaggtggttttacaaaatattaataaaccgctggcgcagcgtttggcaaaagattctgtaatattatttgatattgcagtgtcaaataagaaattaaacggggtgtggcgggatattattcgcctgcaggcagataatcctcgtttgttgattattaatagcgcacaaaagtatgagctatacgaaatggcgcagtggccggctttatatggcgtgttccgtcatgacgatgatgaatcgcgcttaattgagggcgttaaggccgtgctgaacggcgagcagacggctgaattgagcgtgatgcacccggcgatgtacgctgcggaccatgcatcgactccagtagagaactcgccgctgaccgagcgggaatgcgagatcctcaacgaactgcgctgcggcgcaacgaacctggatatcgcccgcgcgctgtttatcagcgagaacacggtgcggacgcacctgtacaatgtgtttcgtaaactgagcgtgaaaaatcgcacccaggcggtgagctgggctaacgaacatctgcgccactaagcgggtaaacgtgcgccgtcagcggtccgccggcggcgcaggagggcagagtttaaaagctctgctcgaagtagctttccagtatgactacggcagaggctgaatcgacgctgcctttattcagcgcccggtagccgccgtgttcaaacaggcccgcgcgggcctcaaccgtactcagccgttcatcgtggagaaggatcgcgacgccaaagcggccatgaattttattggcgaaattacgcgcgcgcgccgtcagcggttgctcggtgccgtccatattgagcggcaggccgacgattaccgcctcaggctgccactctttaagcagtttttcgatgacgttccagtccggtttaccatcctgcgccttcagcgccggtaatggtcgtgcggtcgcggtgatgcgttgtcccaccgccacgccgatgcttttggtgccaaagtcaaagccgagaaaggttccgctcatcacgcatgccccgcgacgcctggcatcgtcacaatgtcgataccaatcagtttagccgcctcgcgccagcgatcggcgatcggcgtacggaaaagaatattctgatccgccggggcggtgagccaggcattatctaaaatctcctgctccagctgccctttctcccacgaagagtagcccaacgcaaccagcacgttgcccggctgccgatcggttcctaaggtttcaagaacatcccgcgaggtggtaatcaccgtgttatccgagatgcgaatgctcgaggaaaagtcagagggcggggtatgcaaaatgaagccgcggtcttccgccagcgggcctcccagcatcaccggtttatccagacggatctctggattgcgcggctccgggacaattttgagcttctcaaggatcccttccacctgcagattttccagcggcttattgataataatgcccatggcaccctcgtcgttgtactcgcagatatagactacggagcggcggaaaatggggtcctgaagcgcgggcatggcaatcagaaagtgatgctgtaaattcattgtcagaggttcgttcctggttcaaaaaagcaacacccagtatgcgggcaaagtagaatggtgtcgatgcactttatctggctggcgcccgagtggcgtcaggctggcaacgtttcacgagcgcggtaatccgcgctcgctgcgccaaaagcggacgttggtccgccgtcgtgcttatttatcgatacgtctttcgatagcgtccatcagcataccggtgatcgaaatatccgggaaggcggcttcgatttcgcgtccgcaggtggggctggtgacgttaatttccgtcagacggtcgccgatgatatccaggccgacgaagataaggcctttggccttcagcgtcgggccgacgcggcgggcgatttcccagtcgctttcggtcaacgggcgggcttcgccgcggccgccggcggccagattgccgcgggtctcgccaccctgcggaattcgcgccaggcagtaaggcacgggctctccatccactaccaacacgcgcttgtcgccatctttaatggccggcagatagttctgcgccatgcagtagcggctgcccagttcggtcagcgtctcggcaatcaccccaaggtttggatcgccggctttaacacggaaaatagaggcgccgcccatgccgtcgagcggtttcatgatgatatcgccgtgcttttcccagaaggctttcagctgggctttattgcgggtgaccaacgtttccggggtcagttcagagaaccaggcggtgaacagcttctcgttacagtcgcgcagactctgcggcttgttgacgataagcgtgcctttctcttccgctcgctccaggatgtaggtggcataaataaattcggtatcaaacggcggatccttacgcatcaggatgacgtcaaggtccgccagcggcagatcctgctcgccggtgaagtcataccatttatcgtagttctgttcgacgctcagcgtgcgcgtccgggcgcgggcttcgccgttgatcaaatagaggtcgttcatctccatataatggagttcatagccgcgacgctgcgcctccagcaacatagcgaagctggtgtctttcttgatgttgatggttgcgatgggatccatcacgatgccgagcttgatcatggttcttctccgttaacgcctcaacctaagtcgccaaaacgcacctgtagggcggtgatggcggtgagcgcagtagtctctgtacgcagaacgcgcggtcccaacaggatatcagtaaactggtattgcgcggtcatcgctatctcttcagccgacagcccgccttccgggccaatcagcagacggacgcgttcaaccggcagcggcagcgtgttaatgctggcgctggcgcgcgggtgcaggttgagcttcagcccgctgtcctgctcggcgcaccacgcctccagctgcatcgccggacgtatttccggtaccacgttacgaccgctctgttcgcaggcggcaatagcgattttctgccactgctggatctttttctgcaaacgttcggcatccagtttaacgccgcagcgctcggaaaacagtggcgttatgaggcttaccccgagttcgatcgatttctggatggtgaattccattttttcgccgcgggacatcacctggcctaaatggatatgcagcggcgattcccgatcgtcaggttcgccactgagcacctcaaccgtaacgtttttcttaccggcctcggtgatgaccgcgtcaaacacctggttactgccgtcaaaaagctgtaggtgctgaccggcggtcatgcgcaggacgcggccgacgtggttggccgcgtcatcgctcagcgcgatctggctgccgacaatgaggcgttctggatgatggatgcgaggaatgcgcatgcttgatattccgttcgttgcgcagatgccagcttcccgccatcgggcgggaagcacagggctgcaaattaacaattgccgctagtgtaggttagctcttttgcgcctggcaagcctgctggacatacggattatggttgccctgcactttcgcgatgcgctcatcacgttcacattcccaggcggtgaccgggtactgtttattccaggcggtaaacagctgagtttgctggcgggaaagattcagctgatagcggtcgcgcatatagaagtaggtgcgggcgatggcgccgcgagcgcgggcagggggctcggcgattttatctttaaaatcgaccttcatggtgcactggccgtactggccttcaccgccgttccactggctgtacataaagttgccgcgatcgccattcacttctcccaccgccggctgcaggttgtgcatatcgctttccatcttgcggtattccggatctttggcgcagtttttacgtccaccctcctgccagcactgacgctgatggccgaactgccatgccggcactacgtgctcccattcaacccggctggcgcggttctcatttttacgcactttatagccgcaggattccaaatcgataacgccttttttcccctgccagtcgattttacagccgcaataaaaatcgcccggaacgtcggcattcactttgacgccagcggctttggcctgggaaaaactattaataccagcggccgcaagcggaccactgactgccgcgctcaataccgctacggctaaaacatgcatacgggacatcgttaactccgtgtcaaaacgagcccgcaacgtagcgaatgagggtgccggatgcaatcagtcagatcagaaagtttctaattaattccgatggttatttttcagccaccagcagatcgccgcagcgaacgcagcggtaggtggcctcgccgcgtaccacccggttatggcgacggacggtgagctggtgctgctgacagcgacagcgataggggaaggtgttctggcggaccgaagcgagttcaaagcggtgggtgcgacgcgcgggaacgccaaggacgctctccatcatccatttccactctttcccgtgcggcgcgacgcggccgaaatgctgccagaccagcaggtgcgccagctcatgcggcaccacttcatcgataaactcccgctgattttccagcagcagcaccgggtttaaacgaatttcgtttttctccagccaggcggtgccagcggaagtaccacgctgctggtagaccagcgtcggttccgcatagcggcgttccagcttgcgattcgcattggcgagatgctcccgcaggctgcgcatgacggcctgctgaatagcgatgggaatacggggcgttttcatagcgccagaggatagtgcggcggaggggggagagcaagaggaagcttcctcccgggatgggaggaagctcaggaaggttaatcgcgggcaccgatctcgcgcagtggacgaccctgcatcaggttacgttcaatatgttccagcgagacgtttttggtttccgggatcagccacagcgtcagcaggataaacagcacgttcagaccgccgtacacccagaaggtattggcgctgcccagcgagttgagcatggtcaggaaggtggcgccgacaatcatgttggcaatccagttggtcgctgtggagcaggtgataccgaagtcgcggcctttcagcggctggatttcggagcacagtacccaaatcagcgggccggcgctcatggcgaaaccgacgatgaacatcagcagcatcaggacggcgatgtactgcgcggtagaggagtgaatgccgatgtgcatcatggtacccaggacgcccatacccgcggccatcacgataaagccaaggatcagcgtcggtttacggccccagcggtcgaccagaccgatggcgataaaggtggccagcacgttagtcagaccgacgatcactgtcccccacatttgctcagtggtgttggcataacccgccagctcaaaaatcttcggcgcgtagtacatgatgacgttcatcccggtgaactgttgcatcacctgcagcaggatgccgaggaacaccgcgcggcggaagttgctgttgtctttaaacagcgaccagccggactgttttaccttcaggctttcacggatttcatcgagctcgcgtttcgcttcggcgctagtatcgcgcaggcgcagcagcacgcgttccgcatcgacaaagcgacgtttggcggcgaaccagcgcgggctgtccggcaggaagataacgccgatcagcagcaataccgccggaatgatgataaccccgagcatccagcgccatgcgccgctgtagctgaaagcggtgtcagagagataggcgccaaggatcccgatggtgatcatcagctggtacatggaaatcatactgccgcgaattttttctggggcgatttccgacagatacagcggagccgtatatgaggcgacgcccaccgccaggccgagcagcacacgggaaaccagcaggatctcgacgtttggcgcggcggcagagaacagcgaaccggcgacgaagaggattgcgccgatcatcaggctctttttccggcccagtttgaaagagagccagccgctgccgaccgcgccgacggcagctccgaacatcatggagctgaccacccactcctgggtgtgggcggaaatctggaactcattggcaataaagggtaaggcacccgcaataacaccgatatcaaggccgaacagcaggccagccagcgcggcgaggaaacagacgaagaacgtcatagtcttgttcgaacgcccttgttttttgttgtcaggcataacgccctccagttgagttattgattctgtcgatggttagggtaggacactcgtcggtaaaaaaacgtgactataatcacggctgtgtaatcgtttccacaaaggtaaagaaacgtaattcattaaatgctttttaaatcagcaatataaacaaggatagacgacattttgaaaaacggtaatcagagttgaccgaaacaatatgtaacattgtgaaaaatgagtacaggagatagcgtctttgggcagaaggtgacagtctttactatgtaatcgctttcattttttggcggccgcgcgttgaaatgggggcgcagaaaaggggggaggcgtaaataaaaaggccagcgcgaggctggccttgaagagaggaagcgcggagattatttcagaccggccgcttcccgcagcagcgccgctttgtcggttttttcccatgggaaatgttcgcgaccaaagtgaccgtaggctgcggtttctttgtagatcgggtgcagcagatccagcatctgaatcagaccgtatggacgcaggtcgaagaactcgcgcaccagcagggtcagctgttcagaaggcactttctcggtgccaaaggtttccaccatgatggacgtcggttctgcaacgccgatagcgtaggaaacctgaatttcgcaacgatcggccaggcctgcggcaacgatgttcttcgccacatagcgcgccgcgtaggctgcggaacggtcaactttagatggatctttaccggagaacgcgccgccgccgtggcgagccatgccgccgtaggtatcaacgatgatcttacgaccggtcaggccgcagtcgcccatcgggccgccaataacgaaacggccggtcgggttgatgaagaatttggtggacgcgttgagccattcggtcggcagaatcggcttgatgatctcttccatcactgcttcctgcagggatttctgattgatatcttccgcgtgctgagtcgacagaacgaccgcgtcgatgccgacgattttgccgtcgtcatactggaaggtcacctggcttttcgcatccgggcgcagccacggcagggtgccgtttttacgcacttcagcctgacgctgcaccagacggtgagcgtaagtcaccggcgccggcatcagcacgtcggtttcgttagtggcgtagccaaacatcagcccctggtcgccggcgccctgttccagcggatcggcacggtcaacgccctggttaatgtccggagactgtttgccaatggcgctcagtacggcgcacgagttggcgtcaaagcccatatcggaatgcacgtagccaatttcgcggacggtgttgcgggtgatctcttcgatatcaacccatgcgctggtggtgatttcgccgcctaccagcaccatgccggttttgacataggtttcacatgcgacacgcgctttcggatcctgctcgaggatcgcatccagcacggcatcggagatttggtcagcaattttgtcaggatgcccttctgatacggactcagacgtaaaaaggtgttttgccatattttatttcacctgtggacgattcggatagctcatactgttgtgtaatgtggctttggtggataatcagcgcaaagccgcgcaggtagcgacacgagcagtctgagtgttaatcagtatagacggattaacttctggacggccattttaggtcaaatcttgagcccatttccagccttttttgatggcggtcgcatttatgggaaaacccgcctggcaaaatttcctgacaaccgcgcaaacaggcacatttttattttgctttttaccccgcttctcggtataaaacgccgcgcgcggctcattaaaaaagcgcacggggcatggccctgtggtgccacttccagccgggttaagcagtctgtatttacagaatctcgcagcggcgtagcgcctgttgcccggtatgtatagctttggcttgtcgccgaccctgtcgcagggcggtgtggaggtgataccagataatgaaccaatgtttttcgtttgattcgtcgcgtcgttctgtcgcgcgtcagcactccgcaacctgcatctctctcatgcaaaccagccgatgttcaccccatctcggcgcttctcaggattccagggccggtcggccgtcagaaaactgaacaagggcgctcttgcctggcaagagttttctcgtggtttctccggactgtcatactctgttcggctacgtgttttacgatgatatgaataagaaaccggtcgcgcagtcgcaaaaccagcagatagtgctgggctttaggactgttcatgggttgttatcgcatctttggactgcgatagtagttaactgtcttacacttattattaaaaattgaggttcgctatgtctgacgacatgtctatggtttcgccttcgtcagcaggcgaacacggtgtactacgttccatgcaggaggtagcgatgagctcccaggaagccagcaagatgctgcgtacttataatattgcctggtggggcaataactattatgacgtcaacgaactgggccacatcagcgtttgcccggatccggacgttccggaagcgcgcgttgacctcgcggaattagtcaaagcgcgtgaagcgcaagggcagcgcttgccggcgctgttctgcttcccgcagatcctgcagcaccgcctgcgctcgatcaacgccgccttcaaacgcgcgcgtgaatcgtatggctataacggcgattacttcctcgtctacccgatcaaggttaaccagcaccgtcgcgtgattgaatcgctgatccattccggcgagccgctgggcctggaagccggttcgaaagcggaactgatggccgtgctggcgcacgccgggatgacccgcagcgtcatcgtctgtaatggttataaagaccgcgaatatatccgtctggcgctggtgggcgagaagatgggccacaaggtctatctggtcattgagaagatgtccgagatcgctatcgtactggaagaggccgagcgcctgaacgtggtgccgcgccttggcgtacgtgcgcgtctggcctcgcagggctccggtaaatggcagtcctccggcggcgagaagtccaagttcggcctcgcagcgacccaggtgctgcaactggtcgaaattctgcgcgaggcaggccatcttgagagcctgcaactgctgcacttccacctcggttcgcagatggctaacattcgcgatatcgccaccggcgtgcgtgaatcggcgcgtttctacgtcgaactacataagctgggtgtcaacattcagtgcttcgacgtcggcggcggcctgggcgtggactatgaaggcacccgctcgcagtccgattgctcggtgaactacggtctgaacgaatacgccaacaatatcatctgggcgatcggcgatgcctgcgaagagaatggcctgccgcacccgacggtgatcaccgagtccggccgcgcggtgaccgcgcaccataccgtgctggtttccaacatcatcggcgttgagcgtaacgaatacaccgaggcgaccccgccggcggaagacgctgcgcgtccgctgcagagcatgtgggaaacctggcttgagatgcacgagaccggcaaccgccgctcgctgcgcgaatggctgcacgacagccagatggacctgcacgatatccacatcggctactcctcaggcaccttcaacctgcaggagcgcgcgtgggcggaacagctgtatctgaacatgtgccatgaggtgcagaagcagctcgacccgagcaaccgcgcccatcgtcccatcatcgatgagctgcaggagcgaatggcggataaaatctacgtcaacttctcgttgttccagtcgatgccggatgcctgggggatcgatcagctgttcccggtgatgccgctggaagggctgaacaagtcgccggagcgccgcgcggtgctgctggacatcacctgcgattccgatggcgccatcgatcactacgtggacggcgacgggatcgccaccaccatgccgatgccagaatacgacccggagaacccgccgatgctgggcttcttcatggttggcgcctatcaggagatcctcggcaacatgcataacctgttcggcgataccgaggcggtggacgtgttcgtcttccctgacggcagcgttgaggttgagctgtccgacgagggcgataccgtggcggatatgctgcagtatgtgcagctggatccgaatacgctgctgacccagttccgcgatcaggtgaaaaataccggtctggacgacgcgctgcagcagcagttcctcgaggagttcgaggcgggactgtacggctatacttatctggaagacgagtagctgctgatgcccggtggcgctgcgctgaccgggcctgcgtatgtcggccggataaggcgaagccgtcatccggcagcatgcgatactcacttgaacccgtatgcattaccggcgataattcacgccaataagcgatttatctatcaaacccttcctcgtcgggcctaacgacgcggaggggtttttttatacttattttttacgttccacgactgtcaaaagaggtcatatccatgagcactttaggtcatcaatacgataactccctggtatccaatgcctttggctttctgcgtttgccaatgaactttatgccgtatgaaagcgatgcggactgggtcatcaccggcgtgccgttcgatatggcgacctccgggcgcgcgggcggccgtcatggcccggcggcgatccgtcaggtttctactaaccttgcctgggagcacaaccgtttcccgtggaacttcgatatgcgcgagcgcctgaacgtggtggactgcggggatctggtgtacgccttcggcgacgcgcgcgaaatgagcgagaagctgcaggctcacgccgagaagctgctggcggccggcaaacgtatgctctcctttggcggcgaccacttcgttaccctgccgctgctgcgcgcccatgccaagcactttggtaaaatggcgctggtgcacttcgatgctcacaccgatacctacgccaacggctgcgagttcgaccacggcaccatgttctataccgcgccgaatgaagggcttatcgatccgaaccactccgtacagatcgggatccgcaccgaattcgacaaagacaatggctttacggtgctcgacgccggccaggttaacgaccgcagcgttgatgacgtgattgcccaggtgaagcagatcgtcggcgacatgccggtgtacctgacctttgatatcgactgtctggatccggcgtttgcgccaggcaccggtaccccggttatcggtgggctgacctccgaccgcgcgatcaagctggtgcgcggcctgaaggacctgaacatcgtcgggatggacgtggtggaagtcgccccggcctacgatcagtccgaaattaccgctctggcggcggcgaccctggcgctggagatgctgtacatccaggcggcgaagaagggcgaataaccccggtaaccccctgtgccgtacggtacagggggttaatcaaggcgcaggccgctgggcccgcgaccgccgtcaaggcgcaccgcatactgggcgatacagtccacaccgaagccgaccggtccctgggtaaaccccgatttgaaggtggcgataatcccctggccccattcggctttatccggcaacccatcgcgataatcacgtttggtatataccctaaatatttcgagttgccggacaaaacggctagccgttttgaacagcgcttgcgctggccccgtaggggcgaggcccagggataggccgagttattgccaacgcacatgcagcttgaagtatgacgggtataagcgttacgtaaaaagagttccaagtggctgtcttcaataaagccctggctatttgattgttggctggcaaagattggtgaggaggcgctagcgcctcccgctgtcgcttatttaatgccgtcggccttcatgcgatcgcgaatatgctgggcgcgcgcttctgaggccgggtgatcgtcaaacatcgaactctgacgaccggcttccagcttggccagtttctcgaagctggtggccagtcccgacggattgataccgcgcttacgcagcaggtcgtaagagtaatcatccgcttccgattcctgacgctgggagaactgcgagttcaccagtttttcgcccagatcgcccaactgagactgcgacaggctaccgacgataccgcccgcggaggccgccgccgcacgcacggcgttggtacccagggcgacctgcatgcctttcttcacgtggcccagcgcgacgtggcccatttcgtggccgatcaccgcctcgacttcattatcgttcatcagatccatcagcccgctgtagacgcggatgcagccgttggccatggcgaaggcgttgacatccttggtctcatagaccttgtagttcacgggctgaccattgatgttatcgcccagcgcagccgcgattttgttcagccgctggctgtattcactgttggccggggcgattttcgctttggcgtccatctctttacaggcctggtcgcttaaggttttcacctgcgcgtcgctgagagagtatgcctggaaggcttcggcgcctgagctgagcagaccgttggagtccatgttctgacatccggtgagggttgctgcgatcccaagagcaagtacggttgagcgaattttcatttttatcttccacaatcttatggttgtttatccgaaaatacggcgacggcagggaaccgtattctgcgtaaattataaagagtatcgcaggatgcgggcgagcggattccggcgtagcacaacctgttccagagatttcttaaagggcaaaaggatgctccatgtacatgacttgtcgcttgggttacattgttcacacttttttccggcgtagcccaaaacgcgctctcgtcaagtcgttaagggcatggccttcaacagtccgaactggagtcaaaatgtcctcacgtaaagagcttgctaacgctattcgtgcgctgagcatggacgctgtacagaaagccaaatccggccacccgggggccccgatgggtatggctgacattgccgaagtgctgtggcgtgatttcctgaaccataacccgaacaatccggcctgggctg

SEQ ID NO: 60 - DNA, 292602 bp, Unknown
  source: /note="Description of Unknown: MKP2_coc_1 Mutant Bacteria sequence"
ttgagagaattttcagctctgatacagattaatcgatacgtcggtgagacgtattgataaaacagaatttgcctggcggcactagcgcggtggtcccacctgaccccatgccgaactcagaagtgaaacgccgtagcgccgatggtagtgtggggtctccccatgtgagagtagggaactgccaggcatcaaataaagcagaaagcccggtcgaaagaccgggctttttgtttttgcgtttaaaaagaaccccgtcccgaaaggtgcgggtttttttgctgtgtggggtatatctcccccggtggcgctgcgcttaccggggctacggatcctcggccacctgctggccgaggggacatcaatgccgcaaagttaccgacgtcaatcgtagtctgcttcagcctgctgctcatacatcaaattcaataacggatacggttgccccagatcgtccgtttcagagcgccctgtcaccctaaaacccatcttctgataaaacccgaccgcttgttcattctgctcatttacattggtcgtcagcttcggcgttaacgacagcgcatgctcaatcagcaacttccccacgccacagccgcggacatccggatcgacgaacagcgcatccatatgatctccggtcagcagcataaaggcgatcggctggtcttccgtattaaccgccacccacagcggagcctccggtaaaaatgcgcgtaccatctcctccaactcctttcgatacgcttttgtcagaaaatcatgcgtggcgtcgaccgaccgacaccagatcgcagtcagtttatccccttcatcaggccgggaacggcggatgttaataaccatactttctccttttctacattcttatattctaactcaacaagcgccgtgaaattttctcaccgtgtacatgcagactcgacattcacccgattcctggttatcttcagctatctggatgtctaaacgtttatacgtatgctatgaggtaatacagttatgccaattcgggtgcaggacgagctgccagccgtcaatttcttgcgcaatgaaaacgtcttcgtaatgacgacaacacgtgcaacgactcaggaaatccgccccctgaaggtgttaatcctcaacctgatgccgaagaaaatcgagacggaaaatcagttcctgcgtctgctatcaaactctccgctgcaggtggatatccagttattacgtatcgatgcgcgcgagtcgcgtaatacccctgcggagcatctgaataacttttactgtaatttcgatgagatctgcgatcagaactttgacggcctgattgttaccggcgctcctttaggcctggttgagtttaacgatgttgcttactggccgcagatcaaacaggtgctggagtgggccaaggatcacgtcacttcgacgctgttcgtctgttgggcggttcaggccgcgctgaacattctgtacggcattcccaagcagacccgcgccgaaaagatttccggcgtctatgaacaccatattcttcatccgcacgccttactgacccgcggtttcgacgactctttcctggccccgcactcacgctatgctgattttccggccggacttattcgcgactataccgatcttgagatcctcgcggagacggaagagggcgatgcgtatttgttcgccagcaaagataagcgcatcgcctttgtcaccggccacccggagtacgatgccaataccctggcaagtgaatatttccgcgatgtggaagccggtttgaaccctgagatacctcataactatttcccacaaaacgacccgcagaacaaaccgcgcgccacctggcgcagccacggcaatctgctgttcgctaactggcttaactattacgtctaccagattacgccatacgatctgcgtcatatgaatccgacgctggaataatactctatgtgagacgatcctaaagcgtttcagcattttgcctctggcaccttcgggtgccttttttatttccgaaattcacttcatacgcgaggataactttaatttcattgttatcaatgtgttaatgataaattaaaattaaaatggaaattgtttttgattttggaaattaattgagtagtcttaattgtgctgagcgaaaactgcacaacgatctttcgctcgcttccagcggatcaaccaagaggagcagcacaatgacgcagcaggcgacaatcaccgatgaactggcctttagtcagccctatggcgagcaggagaagcagatcttaacgcctgaggcggtagaatttctgacggaactggtgagccgctttacgccggcgcgcaataagctgctggccgcgcgtttgcagcaacagcaggctattgacgacgggcagcttccggattttatttcggaaactgcttccattagaaatggcgactggactattcgcggtatcccggctgatttgcaggatcgccgcgtggaaatcaccggccccgtcgagcgcaagatggtcattaacgcgctgaatgccaacgtcaaagtctttatggcggactttgaggattcgctggcgcctgactggcgcaaagtcattgatggtcaaatcaacctgcgcgatgccgtgaacggaaccatcagctacaccaacgaggccggcaaaatctatcagttgcagcccaatcccgctgtgctggtatgccgtgtgcgcggcctgcatctgccggaaaagcatgtgacctggcgtcatgaggccatccccgggagcctgttcgattttgcgctctatttctttcataactaccaggcgctgctggcgaaaggaagtggtccctacttctatctgccaaaaacacaggcctggcaggaggcggcatggtggaacgatgtcttcagttttacggaagatcgctttgacctgccgcggggcaccatcaaggccacgctgctgattgagacgctgccagcggtgttccagatggatgagatcctgcatgcgctgcgcgaccatattgttggcctgaactgcggccgctgggattacatcttcagctatatcaagacgctgaaaaaccatccggatcgcgtactgccggaccggcaggtggtgacgatggataaacccttcctcagcgcctactcacgcttgttgattaagacctgccataaacgcggcgcgtttgcgatgggcggtatggcggcgtttatcccgagcaaagataccgaacgtaaccgccaggtgctgagtaaagtcaccgccgataaagagctggaggccaacaacggtcacgatgggacctggatcgcccacccgggcctggcggataccgccatggcggtgtttgaccgcgtgctgggcgataagccgaatcagctctcggtcacccggagcgaggatgcgccaattaccgctgaacaactgctggctccctgcgagggcgaacgcacggaagccggaatgcgcgccaacattcgcgtggcggtgcagtacatcgaagcgtggatctccggcaacggctgcgtaccgatttatggcctgatggaagacgccgcaacggccgagatctcgcgcacctctatctggcagtggatccatcatcagaaaaccctgaacgacggcaccccggtcactaaggcgctgtttcgccagtggctggcggaagagctgatggtgattcaggaggagctgggagagcaccgcttcagccacggccgctttgacgatgcggcgcgactgatggagcagatcaccacctccgacgagctaattgattttctgacattgccgggctaccgcctgctggcctaatcgccagatggtgtggttcgccatttagtccttcacctatgagcctggggagccaggaaattatatggagcatctgcacatgaaaacccgtacccaacaaatcgaagaattaaacaaagaatggacgaacccgcgctgggaaggcattacccgtccctacagcgcggaagaggtggtgaagttacgcggctcggtgaatccggaatgcacgctggcgcagcttggcgcggcgaaactgtggcgtctgctgcacggggaggcgaaaaaagggtacgtcaacagtctcggcgcgctgaccggcggccaggccttgcagcaggcgaaggcgggtatcgaagccatttatctctccggctggcaggtggcggcggatgctaacctggcgtccagcatgtatccggatcaatcgctgtatccggccaactcggtaccggcggtggtggatcggatcaacaacaccttccgccgcgccgatcagatccagtggtcagcgggaattgaaccgaacgatccgcgctttatcgactacttcctgccgatcgtggcggatgcggaggccggttttggcggcgtcctgaacgcctttgagctgatgaaatcgatgattgaagccggtgcagcggctgttcacttcgaagatcagctggcatcggtgaagaagtgcggccatatgggcggtaaagtgctggttccgactcaggaggcgattcagaagctggtggcggcgcgtctggcggccgacgtgatgggggtcccgacgctggtcatcgcccgcaccgatgccgacgccgcggatttaattacctcagactgcgatccgtacgatcgtgagtttattaccggggatcgcaccagcgaagggttcttccgcacccacgccgggatcgagcaggcgatcagccgcgggctggcctacgcgccgtatgcggatctggtgtggtgtgaaacgtcgaaaccggatctcgagcaggcgcgccgctttgccgaggctatccatgcgcgtttcccgggcaaactgctggcctataactgctcgccgtcgtttaactggaagaaaaatctcgatgataaaaccatcgccagcttccagcagcagctgtcggacatgggatacaaataccagtttattaccctcgcggggatccacagcatgtggttcaacatgttcgacctcgcccatgcctacgctcagggtgaggggatgcgccactatgttgagaaagtgcagcagccggaattcgccgccggtccggaaggctacaccttcgtctcgcatcagcaggaggtgggcaccggctacttcgacaaggtcaccaccattatccagggtggcacctcgtcggtaacggcgctgaccggctcgaccgaagaagatcagttttaagccatgcccggtggcgcgacgctgaccgggcctgcaagaggacgcaggccggataagcgagcgcgccatccggcatgacgtggcgccggatgggggaaagcgatgacgcgtggtctggaattactgattgcccaaacgatattgcagggatttgacgcgcagtatgggcgttttcttgaagtcacttccggcgcgcagcagcgctttgaacaggctgactggcacgccgtgcagcaggcgatgaagcagcggatccatctctacgatcaccacgtgggcctggtagtagagcagctgcgctgcatcaccgaagggaaaagcaccgacgtcgattttcttctgcgggtgaaacagcagtacacccaacttttaccggattaccctcgctttgaaattgctgagagctttttcaattcggtctactgccgcctgtttgaccaccgctcgctgacccccgagcggctctttattttcagctcgcagcccgagcgaccctttcgtaccctcccgcgaccgctggcgaaagatttctttccggaacgcggttggtcgcacctgctgggtaaagtactgtccgatctgccgctgcggctaccgtggcaaaacaaagcgcgggatatcggctatatcattgccagtctgcaggaggcgctgggggaggaactgctcgccacctgtcatctgcaggtcgccaatgagctgttctaccgcaataaagccgcctggctggtgggcaaactggtcatgccgatggcgacgctgccttttttgctgccgatccaccgcagcgaagagggtgagctgtttgttgacacctgcctcacaacccatgccgaagcgagtatcgtttttggcttcgcgcgttcctattttatggtttatgcgccgttgcccggcgccctggtggaatggctgcgcgagatcttgccgggtaaaacgacggccgagctgtacatggcgattggctgtcagaagcacgccaaaaccgaaagctatcgcgaatatctacactacattactcgctgcgatgagcagtttattgaagcgccgggtattcgcgggatggtgatgctggtgtttaccctgccgggctttgaccgggtgtttaaggtgatcaaggaccgcttcgcgccgcagaaagagatgaccgccgcccatgtgcgggcttgctatcagctggtaaaggagcatgaccgcgtcgggcggatggcggacacccaggagtttgaaaatttcgtgctggataaacggcaaatcgcgccggcgctgctggcgctgctgcaggcggaagcggggaacaaactcaccgatctcggcgaccgcatcgtcatcagccatctctatattgaacggcgaatggtgccgctcaacctgtggctggagcaggttaacggccaggcattgcgtgatgcggtagaagagtatggcaatgctatccgccagctggccgccgccaacatctttcccggcgatatgttatttaaaaacttcggcgtcacccgccatggccgggtggtgttctacgactatgatgaaatctgctatatgacggaagtgaattttcgcgagatcccgccgccgcgctatccggaggatgagctggccagcgagccgtggtacagcgtttcgcctggcgatgtgtttccggaggagttccgccactggctgtgcgccgacccgcgcattgggccactgtttgaagagatgcatgccgacctgctgcgcgccgactactggcgcgcactgcagatgcggattaaaaacggccatgtggaagatgtctacgcctaccggcgcaagcagcgttttagcgtgcgctatggcgccgacagtaggccggataaggcgtttacgccgccatccggcaaggtgcgccgatctgcctgatggcgctacgcttatcaggcctacttaaaatgcccctctggggcatttttttatttaaccccgccatacgccagcgtcacttccttcgccgccttgatcaccagcgcgcccagctcagtcacccgatcatcggtcatacgcgagatggggcctgagatggagattgccgcgaacggttcgcgatgttcatcgtaaatgcaggcggcgacgcagcgcaggccgagcgcgtgctcctcatcatcgaaagagtagccccgcttgcgggtctgggctaaatcttccttcagatgcagcggggagaccagcgtggcatgcgtataggcatgcagccctttacgatgcagcagactggtgacctgctcttcgctcagctgcgcgagaaacgccttcccggcgccggaagcgtgcatcggcagtttaccgccgattggcgccgacatccgcatcagctgggtgcactgcacctgatcgataatgatcgcctggtggtcgctctggtcgagcaccgctaaattcaccgtttcaccggaatcttccatcagctggcgcaggatcgggtggacaatggccagcagattgcggctttgtagaaagctgctgccgaccacgaaagcatgcgcccctacggcccagtgacccagctcgccaacctggcggacgaagcccagctgttgcatggtggtcagcagacggtgagtcgtggagttgggcagacccgcctgctgcgccagttcggtcagcgcgacgctgctgtgggactcggcaatccattcgagtaatttcaggccgcgggtcagcgactgaacctgaccgccagcctgctgggcagtggcagccgcgggttttctgccgcgtttcgcgggaatgggggtagtggccatcgcgaactcctttttctgtatcgtggaaataattttcgttttatttggcaataatgcaatcacaaccggactcatcggatgagtgaagctgaacatgtctcatattgcccgttgttgtcttttccgctccggtggtttatgccagtatggtttgttggctatttggcctgagtcgagcgttgtcgggagcaagtgtgagcagcaaagttgagcaactgcatcagcagttaaaagaacgtattctggttctggatgggggcatgggcaccatgatccagggctatcgtctgagtgagcaggactttcgcggtgagcgctttgctgactggccgtgcgacctgaaaggcaacaacgacctgctggtgctcagcaaacccgaagtgatccgcgagatccacgacgcctatttcgaggccggcgcggatatcattgagaccaacacctttaactcgacgaccatcgcgatggcggattaccagatggaatccctgtcggccgagatcaactttgccgcggcgaagctggcccgcgccagcgccgacgcctggacggcccgcacgccggaaaaaccgcgctatgtcgcgggcgtgcttggcccgaccaaccgcaccgcctctatctcgcctgatgtgaacgatcctgcgttccgtaatattacctttgaccagctggtggccgcctatcgcgaatccacccgggcgctggtggaaggcggcgtggatctgatcctgattgaaacggtgtttgacaccctgaacgctaaagcggccatctatgcggtgaaagaggagctggaggcgttaggcgttgacctgccgctgatgatctccgggaccattaccgatgcctctggccgcacgctttccggacagaccaccgaagccttttataactcgctgcgtcacgccgaagccttatcgtttggtctgaactgcgccctcgggccggacgagctgcggcagtacgtccaggagctgtcgcgcattgccgaatgctacgtcaccgcgcacccgaacgccggcctgcccaacgccttcggcgaatacgatctggacgccgacaccatggcgacgcaaattcgcgaatgggcggaagccggtttcctcaatatcgttggcggctgctgcggtaccaccccggagcatatcgccgccatgagccgggcggtagcgggcctgcagccgcgtcagttgccggaaattgcggtggcctgccgcctcgccggcctggagccgttgaatatcggcgacgatagcctgttcgttaacgtcggtgaacgaactaacgtcaccggctcggcgaaatttaagcggctgattaaagaagagaagtacagcgaagcgctggacgttgcgcgtcagcaggtggaaagcggcgcgcagattatcgatatcaacatggacgaggggatgctcgacgcggaagcggcgatggtgcgtttccttaacctgattgccggcgagccggacattgcccgcgtgccgatcatgattgactcctccaagtgggaagtcattgaaaagggcctgaaatgtattcagggcaaaggcatcgttaactcaatttcgatgaaagagggcgtcgaatcctttatccaccatgcgaaactggttcgccgctacggcgccgcggtggtggtgatggctttcgacgaggttggtcaggccgacacccgcgaacgtaaaattgagatttgccgtcgcgcctacaaaatcctcaccgaagaggtcggcttcccgccggaagatattatcttcgaccccaatatctttgccgtcgccaccggtatcgaagagcataacaactacgcacaggactttatcggcgcctgcgaagacatcaaacgcgagctgccgcatgcgctaatctccggcggggtctccaacgtctccttctccttccgcggtaatgacccggtacgtgaggcgatccacgccgtattcctctactacgcgatccgcaacggcatggacatggggatcgtcaacgccggtcagctggccatctatgatgacctcccgggcgagctgcgcgacgcggtcgaagacgtgatcctcaaccgccgcgatgacagtaccgaacggttacttgagctggcggaaaaatatcgcggcagcaaagcggacgacggcgcgaatgcccagcaggcggagtggcgcacctgggaagtgaaaaaacgcctcgaatattcgctggtgaagggcattaccgaatttatcgaacaggacaccgaagaagcgcgtcagcaggccgcccgcccgattgaggtcattgaagggccgctgatggacggcatgaacgtggtcggcgatctgttcggcgaaggcaaaatgttcctgccgcaggtggtgaaatccgcccgtgtaatgaaacaggcggtggcctaccttgagccgtttattgaagccagtaaagagcagggctccagtaacggcaaaatggtgattgccacggtaaaaggcgacgttcatgacattggcaaaaacatcgtcggcgtggtgctgcagtgcaataactacgaaatcatcgatcttggcgtgatggtcccggcggataaaattctcaaaacggccaaagaggtaaacgcggatctaattggtctttccgggctgattaccccatcgctggacgagatggttaacgtggcgaaagagatggagcgccagggctttaccatcccgctgctgataggcggcgcgactacctcgaaagcgcatacggcggtgaaaatcgagcagaactacagcggcccgaccgtttacgtacagaacgcctcgcgcaccgtcggcgtggtgtctgcgctgctttcggacacgcagcgcgacgagtttgtcgcccgcacgcgcaaagagtatgaaacggtgcgtatccagcatgggcgtaaaaaaccgcgtactccgccggtgacccttgccgccgcgcgggaaaacgatctggcctttgactgggaaagctacacgccgccggtggctcatcgtctgggagtacagacggtggaagccagtatcgagactctgcgcaactacatcgactggacgccgttcttcatgacctggtcgctggcgggtaaatatccgcgcattctggaagatgaagtggtaggggaagaggcgcagcgcctgttcaaagacgctaacgagctgctggataagctgagcgcagagaaaaccctgaacccgcgcggcgtggtgggtctgttcccggccaaccgcgtgggcgacgatattgaaatctatcgcgatgaaacccgcacccacgtgctgacggtgagccatcatctgcgccagcagacggagaaggttggcttcgccaactactgcctcgccgattttgtcgcgccgaagctgagcggcaaggcggactacatcggcgccttcgccgtgaccggcggcctggaagaggacgcgctggcggacgcctatgaagcgcagcatgatgactataacaagatcatgatcaaggccatcgccgatcgcctggcggaggcctttgccgagtatctgcatgagaaagtgcgcaaggtttactggggatatgcggccaatgagaacctcagcaatgaggagcttattcgcgagaactaccaagggatccgaccggcgccgggatatccggcctgtccggagcacaccgaaaaggggaccatctggcagctactggacgtcgaagcccataccggcatgaagctcaccgaatcgttcgccatgtggccgggcgcatcggtttccggctggtacttcagccatccggatagcaagtacttcgccgtggcgcagatccagcgcgatcaggtcgaagattacgcgctgcgtaaaggaatgacgccggcggaggtcgagcgctggttagcgcctaatctgggctatgatgcggactagtcgtcatctttccttacaacaaacaaggcgctctgtgagcgccttgtctctttattgaggttaaccccttatactgagataggttcctgaacttcggaaaacctataacgataaggagaagctgattccgtgttaactctgctacacctgttgtccgcggttgctctgctggtgtggggcacgcatatcgtgcgtaccggggtgatgcgcgtctatggcgctcgcctgcgtaccgttctcagtagcagcgtagagaaaaagccgctcgccttctgcgcgggtcttggcgtgactgcgctggtgcaaagcagtaacgccaccaccatgctggtgacctcatttgtcgcccaggatttagtgggtctgatgccagcgctggtgatggtgctgggggccgacgtcgggacggcgctgatggcgagggtgttgaccttcgacctgtcgtggctgtcgccgttgttgatatttatcggggtgattttcttcctcggccgcaagcagacccgcgccgggcagcttggacgggtggggattggtctggggctgatcctgttggccctcgagctgattgtccaggccgtacaccccataacccaggcgaacggcgtgcaggtgattttcgcctcgctgaccggcgatatcatgctggatgctttgattggcgccgtatttgcaatcattagctactccagcctggcggcggtgctgttaacggcgacgctgaccgcggcgggagcgatctctttcccggtggcgctgtgtctggtgattggcgccaacctgggttcggggctgctggcgatgcttaacaacagcgcggcgaacgcggcggcgcgccgggtggcgctgggcagcctgctgtttaagctggtggggagcctgattattctgccgttcgtccatccgctggccgcggcgatgcacaagctgccgttggccgagtccgagctggttatctacttccacgtcttttacaacctgctgcgctgcatcgcgatggtgccctttgccggaccgatggcgaagctgtgccagcgtctgatccgcgatgagcccgagctggataaccatctcaaacccaagcatctcgacccgtcggcgctggacaccccggcgctggcgctggccaatgccgcgcgcgagacgctgcgtattggtgacgcgatggagcagatgctggagagcctgcacaaggtgatgcatggcgaaccgcgtcaggagaaagagctgcgtcgtatggcggatgatatcaacgtactttacaccgctattaagctctatctggcgcgaatgccaaaggatgagctggcggaagaggaatcccggcgctgggcggaaattattgagatgtcgttaaacctcgaacaggcgtccgatatcgtcgagcgaatgggcagcgagatcgccgataaatcgctggcggcgcggcgcgccttctcggtagaagggttaaaggagctggacgccctgtacgatctgctgctcagcaacctgcagctggcgatgtcggtcttcttctccagcgatgtgcccagcgcccgccgcctgcggcgcagcaaacaccggttccgcattcttaaccgccgctactcgcatgcgcacgttgaccgtctgcatcagcagaacgtgcagagcatcgaaaccagtacgttgcacctggcgctgctgggggatatgaagcgtctgaacagcctgttctgctcggtggcttacagcgtgatggagcagccggatgaagacgacgaacgggatgactactgagccattccccggcggcgctgtactaaccggggttttgcgtttggacgttccgttgaggcagcccggataaggcgcaatgcgccgctatccgggaaacgttagccacccaggctcagaagcggtggcccgcaggcagggttatcgcttcttcccccggtttgaacaacagcgtcgggttcgggccaccgagcgtcgcgtgaccatcggtgacctggatccagtttccttccggcaaaccaatcaccgttaattccggcgccacgaccagcagttcgcggatacgctgttcgcgggtttcgccctgatgcccggtcggcaacgcgttggtgaagtgcgggttaatctgtagcgggaacagccccagcgcatcaaatccctgcggatcgacaatcggcatatcgttggtggtgcgaatggtcgggcaggcaaggtttgaacctgcactccagccgatatacagcgccccgcgtttgacgacatcgacaatcggcgccaacaaaccgcgactgcggcactctttcaacagctggaaggtgttcccgccgccgacgatcaccatctcggtgctttcaatggcggcgatagggtcgtcgacgctgtggataccggttacgctgaccgccatgggcgccataaccgcagccactttggccgtataatcatcccaggattgcgtcacgccagcgaaggggatgaataccgccttacggcggcctttgacctgaccggcaatcagcggcagggcgtgttccagccaggctttccccggcagcgtggagttactgagtaacagcagttccatcttttcttcctgttttaaaaatattattgaagcagaaattctagcatcgcccccataccgacgcgctgatatggcgcatgatgtgggtaagcggaatgctgttcacaagcccgacgaagcttctggataatgaatcacacaatccaggttttttctcgcccacaaggtagggtatatttcgcttttacaggagaatctatgctgcccgactcatcaacccgattaaataaatacatcagtgaaagcggcatctgctcgcgtcgcgaagcggaccgctttattgaacaaggcaacgtctttatcaatggcaagcgcgccacgattggcgatcaggtgaagcctggcgatttagtcaaagtgaacggacggttgattgagccgcgcgaagcggatgatctggtactgattgcgctgaataagccggtcggcattgtgagcaccaccgaagatggcgagcgcgacaacattgtcgatttcgtcaatcacagcaagcgtatctttcctatcggccgtctggataaagactcccaggggctgatcttcctcaccaaccatggcgatctggtgaacaagatcctgcgcgccggcaacgaccatgaaaaagagtatctggtcacggtcgataagccggtgaccgatgagttcattcgcggcatgggcgcgggggtaccgattctcgggaccgtgaccaaaaaatgtaaggtaaagaaagaagcgccgttcgttttccgcatcacccttgtgcaggggttaaaccgccagatccgtcgcatgtgcgagcactttggctatgaagtgacgaagcttgagcgtacgcggatcatgaacgtcagcctgacggggatcccgctgggagagtggcgcgatctgaccgatgacgagctgatcgacctgttcaagctgattgaaaactcctcttccgaagcaaagccgaaagccaggccgaagcctaaagcggcgacccccgggatcaagcgcccggtagtgaaaatggaaaatagcaacgataagggccgcccggctggtaacgggaaacgtttcacccagccgggacgtaaaaagaaagggcgttaacgcctgccgcgggtcggcgtattcgccgaccaggaaaaggtcgcttccttgtccgttttataagcctgctgttttctcacctggcgggctttcttcgcttccgcttcacgctgcgccatcagcttatcgatatattcctttttcacgctgttcgtttccgcattgctcagcgggcggccatgcgcaatacgcgcgcggtcaagcagcgttttcaattcgcgctgttcgcgctcggtcatctctttttgtgtaatacgggggagtgccatggtggtgccctcagtcagaccagagcacccagtgtacggcaatgaatattttactgatagcctgtatggcaactaaagcaggcacacgcccgggcctgcgcccggacgtatcacgctcagcgcttgtcggcttttttggcgatgggctttcctgaccagtacccggccagcagcgaaccggacaggttatgccagacggagaacagcgcgcctggcagcgccgccagcgggccgaagtaaattttacccagcgcggccgccaggccggagttctgcatccccacctcgatcgccagcgtacggcaggtggattcatcaaaaccaaacagacgtccgccccagtacccgccaagcagaccaatagtgttatgcaggatcaccgcgataatcaccaccaggccgacggaggcgatatgggcggcggaacccgccaccaccgcgctgatgatcgccagaatgcacaccatcgagaaggcgggcaggaacggctctaccgctttcaccaccttcggcaacagatgatggacaatcagtcccagcgcgataggaatgaccacaatctgcagaatgctgagcaacatgcccatgacgtcgacctgaatatgcgcgtcgacgtacagacgggtgagcagcggtgtcgccacgacgccgacgagggtggagaccgaggagatggtcaccgacagcgccacatcccctttggcaagaaagatcatcacgttggaggcggtcccgctggcgacgctgccgaccagcaccatcccggcggaaagctccggcggcatatgaaacagcagcgccagcagccaggcggcgagcggcatcaccagatagtgcagaaatatccccgcagcgaccggcgccggacgcgacaggacgcgtttgaaatcctccagcttcagatgcacgcccataccgaacatgatcagcatcagcagggtggtgacccatgggccaattggggtgaaggtagtgggagtgtaataggccagaacggagagcagcagtgcccataacgggaacagccgcgtcagagttgcgagcatgttgtgttccttgctatacgcgaaccgggccgcgccatcccgatgggcggcgagcaggtcagctggttgtgttgatgttgttataaaaaagccgggttcgagcccggctataggtattgtttatcgtgctaaggaattttattcaaacaaattatgatgcagcttctgcacaaccttctccgcatcgtcgcccggcaccaggaagcacaggttgtggctggaggcgccatagcagatcatgcggatgttaaacggctcgaggacgccaaagacctctttgccgacgccgcaggctttcgacagctcattgccaatcagggcgaccagcgccagattttcttccacttccacgcggcacagcgaagagagctcggtcagcagcgcctgggtcagcagggtatcgcccgcagaggtcgagccggtggtgtccatggtcagggccacgctcacttcggaggtggtgatcaaatcaactgagatgttatggcgcgccagaataccgaacacttcggcgaggaagccgcgggagtgcagcatattcaggctgtgcagcgtcagcagcgtttgccggcgacgcagcgccagcgcgcggaacagcggcgggttctcggtggttttacacaccagcgtaccgcccgctttaggctctttactggagccgacaaacaccgggatatcgctgcgcacggcaggcagcagggtcgccggatgcagcactttggcgccaaaggtggccatttccgctgcctcttcaaaggcgatgacgtcgatgcgtttcgccgccggcgcgacgcgcgggtcggtagtatagatccccgggacatcggtccagatatcgacgcgggtggcattcagcgcttcgccgagcagagcggcggtataatcgctgccgccgcggccgagggtggtggtgcggcctttcgcttcgctgccgataaagccctgggtcaccaccaggccttccgccaggcgcggcgccagctgctgctgggtcagttcggcgacggcggcgatgtccggttcggcgcggccaaagcgatcgttagtgcgcagcactttacgggcgtcaaaccactgcgcctgaataccgcgttcacgcagaatttccacaaacagcagggtggacatcagttcgccatggctgaccagttcgtcggtcagggcggttgaggaggcgagcgcggcggcttccgccagcgtcgtgatattttccagcaagcgctcaatctcttcgcggatcacgttgggataacgcaaacgctccagaatattgaactggatctgacgcagagcgtccagctgggaaaaacgttcggtgggttccagccctcccgctaaggccaccagaatgttggtcacgccggcagaggcggagagcacaacaatacgggtattggcatcgagcagcgccacatcgatgctgcggttcattgcgtcaaaatcagcaacgctggtgccgccaaatttggcgacgactagatctgtcataacaacctcgtgtcagggggcctgacttattaaaacgattcctgagcaccgatcctggcaggggctggacgccgccggatcgcaacaaaatgtcttaataagccaggccaaattattcagccatggcacaagggaagagcgataaacagggtggcgcagagtgataaacaactacgatgtcacccagaagtgctccaccttgtagacccgactcaccgctttgggcgctgaggtgttcgggtatgaaacgcccgactgcgaacgtttctggtgacaacccaggggattcagcccctgtggccggcgaggagcgtgaccagacgctctttcacctcggcgttgctccccctcacgtatcttccccggactggttcctccaatacggttacctgggcaacgcacctcttctggcaattactgacgtctttcacctggccgggggaacagggacattatatcccccgcgaataccctttcgctgtagcgtgaaatgcgcgagcaatagatacctaccaatacgtaagcactgcggatatataaaggcttaacgccagctatgtcaacgctgcggttatgcggatttttcatgcctctgcggctaacagaaaaaagccttatgatagctatactaatggggctttttactccgttttgacccgattcctgaccggcgtcagggtcaagtcacaaaaatcatcacaattttccgtcaccggcgctacaatcgaccgaagtcacaatctcaaatcagaagagtattgctaatgaaaaacatcaacccaacgcagacctctgcctggcaggcattacagaaacacttcgacgaaatgaaagatgtcactatcagcgagcttttcgccaaagatagcgaccgtttttctaaattttccgcgacgttcgacgatctgatgctggtggacttctccaaaaaccgcatcactgaagagacgctggctaaactgcaggatctggcgaaagagactgacctggcgggcgctatcaagtcgatgttctcaggtgagaagatcaaccgcaccgaagaccgcgcggtactgcacgtcgcgctgcgtaaccgcagcaatacgccgattgtggttgatggcaaagatgtgatgccggaagtgaacgctgtgctggagaagatgaaaaccttctccgaagcgattatctccggtagctggaaaggctacaccggcaaaccgatcaccgacgtggttaacatcggcatcggcggctccgacctcggtcctttcatggtgaccgaggcgctgcgtccgtataaaaaccacctcaacatgcactttgtctctaacgtcgatggcacccatatcgccgaagtgctgaagaacgtgaatccggaaacgactctgttcctggtggcgtccaagactttcactacccaggaaaccatgaccaacgcccacagcgcgcgcgactggttcctggcaaccgcgggcgacgacaagcacgtggcgaaacacttcgccgcgctttccaccaacgcgaaagcggttggcgagttcggcatcgacaccgccaacatgttcgaattctgggactgggttggcggccgttactccctgtggtcggcgattggtctgtccatcattctctccgtgggcttcgacaacttcgttgagctgctgtccggcgcgcatgcgatggataagcacttctccaccactccggcggagaaaaacctgccggtgctgctggctctgatcggcatctggtacaacaacttcttcggtgcggaaaccgaagcgattctgccgtacgaccagtacatgcaccgctttgccgcttacttccagcagggcaacatggagtccaacggtaagtatgttgaccgtaacggccacgcggtagactaccagactggcccaatcatctggggtgagccgggcaccaacggtcagcacgcgttctaccagctgatccaccagggcaccaaaatggtaccgtgcgatttcatcgctccggctatcacccacaacccgctgtctgaccaccatcagaaactgctgtctaacttcttcgcccagaccgaggccctggcctttggtaaatcccgcgaagtggttgagcaggaatatcgcgatcagggtaaagacccggcgaccctggagcacgtggtgccgttcaaagtgttcgaaggtaaccgcccgactaactccatcctgctgcgtgagatcaccccgttcagcctcggggcgctgattgccctgtacgagcacaaaatcttcacccagggcgcgatcctcaacatcttcacctttgaccagtggggcgttgagctgggcaaacagctggctaaccgcatcctgccggagctgaaagacggcagcgaagttagcagccacgacagctctactaacggcctgattaaccgttataaagcctggcgcgcataacgcttgcgcagctaagacggaatgccgaccctttggtcggcatttttatttatagccgccgcagcagcctcgccggattccccgcccacacgcctttctcggtaatggacttcgttaccacgctgcccgcgcctatcaccaccccatcgcagatgctgacggccagaatcgtggcgccgctgccgatcgacacgtcatcgccaatctcgatccgcccccagctggcgcggtcggcgtttggtttaccctcgcgaaacaggtcgttggcaaacatcacgccgtgaccgataaagcagcgctggccgatggtgacgtactcgcagataaaggtatgggactgaattttactgttcgcgccgatgcgggtattcccctggatctcaacgaacggcccgacgaagacgttatcgccgagctggcaatcatagaggttggcgggctggtaaataacgacattttccccacaaacgacgttacgtacaccggtatcacgaagctcaggcatagttcctctcaaatcggtttggccagaatatgtaaggtgctttgctggctggcggagtggaaaatcgtgtctctgatgtgctgcatcccctggcgttcgtaaaaacggcgcgcggcgggattcgcggcgagtacttccagccacagccaactttcaccggccgtttttgctcgcgtctcgacggcgtgaaaaatatgctcgccgtagcggtggccagtcttccccggcatcaggtagagcttatgcagcagcgtaccaatcttgccgtcgtcagccattcgctgctgatagctatatttagcgaaaccaacaggagagggggcttcggcgatgagccagtgttgggtcgcatccgcaagactccgacgtagcgcatcttcggcatattcttgcttaagaaataacgccagttcatcggcatcgcgccagagatgagcaaagtggtgatgatagctggcatagcccatcgcgctaagctggggcgcgtcctcgggacatgcctgtcgaatagttaacatgctgcgttcctcgcgtcgttctgcggctatattgcctgtaaagtgaacaatgtggaacgacaaaaatcggtgggagaaggctggaggcgctccctccagcctgggggttagcgggcgaaagcgatcgcttcgatttcgacgccggcatctttcggtaaccttgctacctccacacaggagcgcgccggaaaggccgcctggtgttcgataaagaaggcctcgtaggcggcattgatggcggcaaaatccgccaggtctttgacaaacaccgtagttttaacgatctgcccgaccgtgagtccggcagcttcaacgatggctttcacattttccagtgattgccgcgcctgttcggcaatgtcctcgggcatggtgccgtccagcggattaatcggcagctgaccggaggtgatggtcatcgcgccgagattgacgccctgcacgtacgggccgatagcagcaggcgcgtcagcggtggtaataatcatacggtttatccttcaaacggttacataaaataatttaacaacaccagcgagccgacgccgctcactaccacccacaccaggcctaaacggaagctggcgagcgtgcagatgatggcggcgatcaccttcggattttttaagtcgaactccatgctgcaattcacgctcaggatctgaatggtgatgatggccggcagaacggtgaccggcacgaagcgtagcgttttggtcacccgctcggacatctggatcttgccggccaggccgataaacgagaaacggatgagaaaagtcaccgcggccatgcccagcgtcagggcgataaaatagctattactcattttccatcgcctccactaacggcatatcggattcggtttttgccatctgcttgcgctcttccgccaggtcgacgcacaggccggcgaggacgccaagcactgaggcgacgacgatacccagcgaatagggtaggaccactaacagcacgccggaaacggcggctacaaccgcggcgacggtgcaggcctggcttttaatttgcggcaccacgatggcgataaaggcggcgaccatggcgaaatcgagaccgtatttctcaatgtggggaaacgaggcgccgaccagcgcgccaagaaaatcagccagcacccaaatcgcccagaaggtaatcatcgccgaaccataaaacagatatttttcctttttatttccttccatctctttgacggtggtggcatacacctcgtcggtgagcgcataggacataaagcattttttaaagaatgaagcttcgcgcacggtgccggaaatagaggcgctatacagcacgtggcgaagatttataattaatgtggtgaaaataatcacgccgagcgtggcgccggtttttaacatattcagtgccagcatttgcgccgagccggcaatgacaatcgccgaccacgccgtactctgccagacgctcatgcccgcgctaacgcttaatgcgccgacaataaatgaaaatggaaagtcgccgatgcataggggcataatagcgctggcgccgcggaagatgacttttttattcatctgctatacctgctaatttataaataatagtgtgggtagagtacgttaatcggggcctgctctttcaggcccgtgaaatggtattatttagcgaccataatgctgataatttctttatcggtgagagtcattggtttaatcaccagacggcacaggttattaatagtctgctcgacatcggcgcacacaataccgtcattggcgccagcgcagctattttgcatggccattagtaccgccttaaaggcgctggataccactgacgagactttcatcgcgcagctgttggaagcgccatcacaaatcatgccggtaatatcgctgaccatattaataattgcggtattaatggtattgatgtcgcgggtaaacagccaggccataccggcggcggcgcccatagcggcggttgaggctgcgcatagcgcagataagcgcgtataacgagaatgaattgagatggcggtgagatgagagagagacaaagcgcgagccagggtctcttcatcgacgccgagatgctctgcaaccaccactaccggcatggttgctgtaatgccctgattgcctgagccgaagttagacatcgctaccaccggcgcgccgcccatgcgggcatctgaagcggcgacggtgttgatgatcaccttgcttaacagatcgttgctcatcaggccgtttttcactgcgtcagaaaaggtaccgttaatgttcaggccatatttttttgttttgccttctgccgccagcgcggagtttaagcgcgcggcgtcgagaataaagcgaatatcattaaagtcgacgcgattaataaattcgtaagcctgttgtagcgagaaagtgggcagcgtttcgcgctgggtgcgcgtattctgtttttcgcttaatggctgcggttggccattaatataaagttcgaccacgttggtgtgggttcctttgaccacgacacgacagtaattctcgccagcagagagggttaaatcgagatgaataaaatccggggtctcttcgacggcaatatcaacggcgttattggcgatcagcttctgcgccatttcaacgtgtcgcggagtgatatcttccagcgtttttaatcccttttgcgggtcgccgccaaatgcgccaattgcggctgccagcggtacaccgcaaacggtggtgccgggtatggtgacgcccatcgcgtttttataaagattggcggaaataaaaccgctaattttagtgcaaggctgatccagatattgtgcggcgtaggcggccgcgaaggaaatagcgacgggttcagtacaacctaaagccggggcgacctcttgtttgagccattttacgtacagggaagcgttatcggtgttcataatgatttaatgtccaaaattaaattttattcagctgcgataatgctaagacaaaagataagaaaaaacttaccctaataaccataaaaagactgtggtttggagaaaaattttatcttacgggaggttttaagatacatctgtttcaaaaagtaaactttttatatttcagttggttgggttgattcgttctaagcgtaacggatgattttgttaatctgctcacagcgttgctggaaggacaattttctcttgttcgtacttttcgaatcaatagcccggagatagcgtaaggcgaaggaatcataggtagatctggatcacacttttgcgctatacagatcgacaacgttcatgcatttgaggtgtcactatgccgtcggtatatcgtccgctggttaatttcgttgcgaaggccatgcaggccgtgctgaatctggcactgctgtgcctgggaattattctggtggtgttcctgggaaaagagaccctgcatctggcgcacgtactgtttacgccggagccggtgagtaagtacaagctggtcgaagggctggtggtctattttctctactttgagtttatcgcgctgattgttaaatattttgaatccggttttcactttccactgcgctatttcgtctatatcggtattaccgcaattgtgcggcttattatcgtcgatcatgagtcgccgctggcggttctcatttactccgcggcgatcctgatcctggtgattacgctctggctgtgtaactccaatcgcctgaaacgcgaataaaaaaaagcggcctccagggccgctgaccaacagtcacaaatagaatttatgtagggtccagttgaggatagcagtggcattgaccttactttttcagctgagggcgacggcgacaatacccggttggggtcgtgtattgcggctagaccgtcggccctcctctgaaatttggggccggtgttacaaaaaaattaacctttcactccacccgccgtcaggccattaaccagccagcgctgcgccagcaggaagacaaccgtgatcggaatggcggagagcaccgccgcggcggcaaagtcgccccacagatagttctgcgggttgagatactgttgcatacctaccgccagggtatagctgttcacatcgcgcagcagcagcgaggcgaccggcacttcggtgatggccgcgatgaacgacagaataaacacgactgccagaatcggcaccgacagcggcagcagcaccagacggaaagcctgccatggggtcgcgccatccagcgccgccgcttcttccagcgagccatcgatggtttcgaagtagcctttaatcgtccagacgtgcagcgcgataccgcccatgtaggcaaagatgacgccgccgtgggtgttgaggccgacgaacgggatgtactggcccaggcggtcaaacaacgcgtacagggcaaccagcgacagcaccgccgggaacatctggaaaatcagcatccctttcagcagggccgctttccccgggaagcgcatacgggcgaaagcgtaggcgcaggtggtggagagagcgacgataccgatcgcggtgatcccggcgaccttaatcgagttccacagccacagcaggaccgggaacggcggcggcgtgacgcggccatcggcgtgttcgacgctgaagcctaacgccagacgccagtgctcccaggagatggtatccgggatcaggctgccggtggcgaagttgccttcgcgcagcgagatggcgataaccatcagcagcggaaacataatcgcggcgataaaaatcagtagcaggagatgcgtggtaaataaacgtagcttctgcgatttgggttggaccatagccattatcgttatctcccttaatcaaacttcatgcgcgtggctttcagattcacaatcgctaacgcgccaaccagcaggaagataagcgttgcgatagccgccgccaggccgaagtcctgaccgccgccgccttcaaaggcgatgcgataggtgtagctcaccagcaggtcggtataaccggccggggtggtggtgccgagacggtccggaccgccgttggtcaacaattgaatcaggacgaagttgttaaagttaaaggcgaagctggcgatcatcagcggcgttagcggcttaatcagcagcgggaaggtaattttaaagaagttctggaacgggccggcgccatccattgccgacgcttcgtacagatcgtccggaatcgccttcagtagccccatgcacaggatcatcatgtacgggtagcccagccaggtgttgacgatgatgatcatggtgcgcgcggtggtcgggtcgctaaaccatgccggcttaatgccgaacagcgtgctgagcatcatgttgatttcaccaaagctctggttgaacagccctttgaaaatcagaatcgaaataaacgacggtacggcgtacggcagaatcagcaggacgcgataaatcgctttgcctttcagcgcttcccactgcaccaggcaggcgaggatcatccccaccgcgacggtcagcatcacggtcagcaccgagaacaccaccgtccagacgaagatcgcgaagaacggtttctgaatgccttcatcgtggaagacgcgggtaaagttgtcccagccgatagtcacagtgtagcccgggctcagcttctcattgccccagctgccgtcggcgttaattgcctggtagaagccgacgtcgttgttcgggcggtatttaacgtgggtctgattgttggtcagtaccccgtcttcgccgagggtatacagaggctgggtaccggagaactggcgcagggagctcatgatgactttgctgtcatccggcagcacagcggtcagctggttcagcgcggtgcgattctgggtaatcacgcgcaggttggcgcgctcgccttccggcagggcgtcggtttcttttaacgccagcttctgctcgccgccaaatttaaaggcgtcagaaaggtagtttttaccgctttcgccgtcggtgagcgccagcttccactcgtcacccgcagggatcagcgtgaaattataggctttgccggcctggaaggaacgatccatcagcacctgctgcgcacgctcaaaggtcagctggttggtgctgctgtagttggtaaacgcgatagcgatagtgcagatcagcggaaacaggacaaacaggcccatgccggcgaggccgggataaacatagcgccaggcataagccttgcgattagcgaaaatatacaggccaactgagcttaaaatcagcgtcatgatggcgaacaggtactccccctgggcgtacatcaaaacaacaaggtaacccaccagcaggcacagtaagccaatcacagaccatgtgagttgcgggctttgccaccagtgtctctttttaacggcatccatggggatcatcctctacagcggtgaaaacttatttgtcaggtggcgcttcgcttacctgacctacggtccgagccgtagtggtagggcgggtaggcgcgcgcgccacccgccgttttcttacttagtgatacggctctgtgcatctttcagcgcagcatcgacagtctggcgaccgctggcggcgttgataaccgcggtacgaacggcataccagaaggcagacatctgcgggatgttaggcatgatttcgcctttctgggcgttcgccatggtggcagcgatgcgcggatctttttccagtttttcctggaaggatttcagcgccacggcacccagcggtttgtcgttgttaacggcttccagaccctgatcggtcatcaggtagttttcgaggaactctttggccagctctttgttcgggctggcggcgttgatccccgcgctcagcacgccaacgaacggtttcgatggtttgcctttaaaggttggcagcagggtcacgccgtagttaaccttgctcttatcgatgttagaccacgcccacggaccgttgatggtcatcgcggtttcgcctttgttgaaggccgcttccgcgatggagtagtcggtgtcggcattcatgtgcttgttcttgatcaggtcaaccaggaaggtcaggcccgctttcgcgcctgcgctgtccacgccgacgtctttcacatcgtacttgccgttttcaaacttgaacgcgtatccgccgtcggcagcgatcagcggccaggtgaagtacggttcctgcaggttgaacatcagcgcgctcttacctttcgctttcagttctttatccagcgccgggatctcttcccaggtcttcggcgggttcggcaccaggtctttgttgtaaatcagggacagggcttcgactgcgatcgggtaggcgatcagtttgccgttatagcgaaccgcatcccaggtgaacggatagagtttgtcctggaacgctttgtccggggtgatttccgccagcaggcccgactgcgcgtagccgccgaaacggtcatgcgcccagaagatgatgtccgggccgtcgccggtcgccgcaacctgcgggaatttctcttccagcttgtccgggtgttctacggaaactttaatgccggtgtctttttcaaactttttacccacttcagcgaggccgttgtagcctttgtcgccgttaatccagataaccagcttaccttcttcaatttttgcgagggcagaggcggaaaacatcatcgtggtcagtgccgacagcgcgaggatgcgagcgccagttttgattttcatatacccgtcctttttggtgttgtactcgtggatacacttcggtggcttaacgatgatgagtttccttttttaacaacccctttccatcctccccaggtctacgccccacccgctggttgtgtgatctccattgcaaaaacggccgtattgcgtcctggagcacagaaaaaagcgcccaattttgtcgcctccatcacgaaatcacgctccgcccgccatcccccgcggcgagagccaatctctcatcctcccatctcctcccccataaaaaagccggggggtggaggatttgcctgcgtaatgaatgccgcatagtcgacccatcttgaatgtgactgttagtgacaggttgtaacgaagggagaagggcatggcgagcgtacagctgcgaaatgtaacgaaagcctggggtgacgtggtggtatcgaaagatatcaatctcgatatccacgaaggggaattcgtcgtgtttgtcgggccatcgggctgcggcaaatctaccctgctgcgtatgattgccgggttagaaactattaccagcggggacctgtttatcggtgacacccgcatgaacgagatcccaccggcagaacgcggcgttgggatggtattccagtcttatgcactctatccccacctttccgttgcggaaaatatgtcgtttggcctgaagctggccggcgcgaaaaaagatctgattaaccagcgggtgactcaggttgcggaagtgctgcagctggcccatctgctggagcgtaaaccgaaagccctctccggcggtcagcgccagcgcgtggcgattggtcgtacgctggtggcagagccaagcgttttcctgctggatgagccgctttccaacctcgatgccgccctgcgcgtccagatgcgtatcgaaatctcccgtctgcataagcgactgggccgcaccatgatctatgtcacccacgatcaggtggaagcgatgaccctcgccgacaagatcgtggtcctcgacgccggccgtgtggcgcaggttgggaaaccgctggagctctatcactatccggctgaccgcttcgttgccggcttcattggttcaccgaagatgaacttcctgccggtcaaagtcaccgcgacggctatcgatcaggtgcaggttgaactgccgaaccgtcagcaaatctggctaccggtggacagcgccaacgtgcaggcgggcgccaatatgtccttaggtattcgaccggagcatttactgcccagcgatatcgccgatgtaacccttgaaggcgaggtccaggtcgtcgaacagctcggtcacgaaacgcaaattcatatccagatccccgccatccgtcagaacctggtttaccgccagaacgacgtggtgttggtagaagagggagccacattcgctatcggtttgccgccagaacgttgccatttattccgtgaggatggcaccgcttgtcgtcggctgcataaagagccgggcgtgtaaggcttcccattaaaaaagcgcgaacccggctggcgatataccggcgaagcgtgcaaagaaaagcaatgatctcaggagatagaatgatgattactctgcgcaaacttcctctggcggtcgccgtcgcagcaggcgtgatgtctgctcaggcgctggctgtcgatttccatggctacgcgcgttccggcattggctggaccggcagcggcggcgagcaacagtgcttcaaagcgaccggcgctcaaagtaaataccgtcttggtaacgaatgtgaaacctatgcggaactgaagctgggccaggagctgtggaaggaaggggataagagtttttatttcgatactaacgttgcctattccgtgaatcaggaagatgactgggaaagcacctctccggcgttccgtgaagccaacatccagggtaaaaacctgatcgactggctgccgggctccacgctgtgggcgggtaaacgcttctatcagcgtcatgacgttcacatgatcgacttctactactgggatatctccggcccgggtgcaggtctggaaaacgttgaccttggcttcggtaagctctctctggccgctacccgtaactcagaaagcggcggctcttatactttctccagcgatgacaccaaaaaatatgctgcgaaaactgccaacgacgtctttgatatccgtctggcgggtctggaaaccaacccgggcggcgtgctggagttaggggtcgattacggccgtgctaacccgcaggatgactatcgcctggaagacggcgcgtcgaaagacggctggatgtggaccggtgaacatactcagtctatctggggcggcttcaacaagtttgtggttcagtacgccactgacgcaatgacctcctggaacagcggccactctcaggggaccagcatcgataacaacggcagcatgatccgcgttctggatcacggcgcgatggacttcaacgatgactggggcctgatgtacgtggcaatgtaccaggacgtggatctggacagcaagaacggttctacctggtacaccgtgggtgtccgtccgatgtacaaatggacgccgatcatgagcacccagctggaaatcggttacgacaacgtgaaatcccagcgtaccagcgaaaacaacaaccagtacaaaattactctggctcaacagtggcaggcaggcaacagcgtctggtctcgtccggctatccgtatcttcgcaacctacgcgaagtgggatgaaaactggggctacagcaacacctccggtctgcagacgaaagacagcagcggaagcggcgctttcacctccagccgcggtgacgacagcgaagttaccttcggtgcccagatggaagtgtggtggtaataccgtccgcaggacgggtgtaacctgggaggggcgtcagcccctcctgattattcagggttagcgcgctattgcctggctaccgctaaaccgatgctatccaaggtgagaagaatgaaaatgaagaaaactctcgtcgctctgtgtttatccgcagggatgttggcatgcgtgccggggatgagccttgccgatgttaactttgtaccgcagaacaccagcgccgcgccggctattccagccagcgcgctgcagcagctgatctggacgcctgccgatcaatcaaagacgcagagcgttgatttaaccaccggcggtcaacgcctggatgtcccggggatcgtcggaccggtcgccgcctggagcgtgccggccaatatcggtgagctgaccctgacgctcgacagcgaactgaacaaacataaacagatttttgcgccgaacgtgctgattctcgaccagaacatgacgcccgcggcgttcttccccagcaattactttacctatcagcagccgggcgtgatgaccgctgaccgcctgggcggcgtgatgcgcctgaccccggcgctgggccagcaaaagctctatgtgctggtgtttaccactgaaaaagatctccagcagaccacgaccctgctggatccggcgaaagcctatgccaaaggcgctggcaatgcggccccggatatcccggatccgatcgctaaacataccaccgatggcgtgctgaagctgaaagtgaaaactaatagcacttccagcgtgctggtagggccgctgttcggctcttccggcccgggtccggtaaccgtcggcaacaccgcggcgccggtagccgcgccagccgccgccgcggcgccggccgccaaaagcgaaccgatgctcagcgataccgaaacctacttcaacaatggtattaagcaggcggtgaaacaaggtgacatcgacaaagccctgaaattgatgaacgaagctgagcgcctcggctcgaaatccgctcgttccacctttatcagcagtgtaaaaggcaaggggtaatcgtctccccacaatgctgatgtttaggcacagcctttaggtgcatcctccgggatgcacctttttttgcacgcgcggcagcctgttgcatgactgttgcgtgaatgatcgtatattgacgtttgcccgccaccaaccgcctattctgcgatacaatgctttcacgttatgtaccggagaatcaggcatgtcccatcctgcgcttacgcgactgcgtgcgctgcgctattttgccgttatgccatccctgccgccgccgctaagtgactggctgctgctggaggactcaatgacccagcgctttgaacaacaaggaaagcaggtcaccgtgaccctggttaacgaagggtatatcggccgtgacgcgctgactgacgaagcggcgctgctgcccgacgagccgcgctactggctgcgggagattatactcaatgccgatggcgagccctggctggccgggcgcacggtggcgccggagtcgacgctgtgtggtccggagctggcgctacagcagctcgggcaaactccgctgggccgatacctgtttacgtcgtccacattaacccgcgattttattgaaattggtcgcgatgcagcgctgtgggggcgtcgttcccgcctgcggctgagcggcaaacccctgctgctgaccgagctttttttgcctgcgtcgccgttgtactaagaggaagaaaaaatggagtggagtctgtcgcagaataagctgttggcgtttcatcgcctgatgcgcactgacaaaccgatcggcgctttgctgctgctgtggccgacgctgtgggcgctatgggtggcctcgccgggcgtcccgccgctgtggatcctggcggtattcgtcgccggcgtctggctgatgcgcgccgccggctgcgtggtgaatgactatgccgaccgaaaatttgatggtcacgtaaagcgtaccgcccgccgtccgctgccgagcggcgatgttaccgagaaagaggcgcgaacgctgtttatcgtgctggtgctgctctctttcctgttggtgctcaccctcaacaccatgactattttgctgtcggtggcggcgctggcgctggcgtgggtctatccgtttatgaagcgctacactcatctgccgcaggtggtgctgggcgcggcctttggctggtcgatcccgatggccttctcggccgtcagcgaatcgctaccgctgagctgctggctgatgttcctcgccaatattctgtgggcggtggcctacgatacccagtatgcgatggtggatcgcgatgacgacgttaagatcggcatcaagtcgacggcgatcctgtttggcgaaaacgatcgtctgattatcggtatcctgcaggtggccgtactggcgctgatgggcgcggtgggttggctgaatgggctgggctgggaatattactggtcgctgttcgtggcggcgggtctgtttggctggcagcagaagcttatcttcaatcgcgaccgcgataactgcttcaaagcgtttatgaacaataactacgtcgggctggtgctgttcctcggcctggcgatgagctatctgtaacctcctgtccgctgccccccggcattccggggggcagcaaacgccgcgttacgcgtcgtcctgcgtgacgctctcaatggtcagtcggacatccgacgtaatcaaatccgccagcatccgataaaccttcagggtctcttccggctcggcgtcgccggtgtcgctgatatagccttcatcgcgcagggtcaacaccagggtgctgaacaccgctttgtcgaagaactccggcgcattgatgccgtgtagcaccgacagacgctgggccacggtgcgactctctttttccagcgagctgcggttgatcgccgggttagcgctcagcagccagaaggtgatggcatagcgctgcagcgtctcgcgggcgccagcggccagcagctgcagggagcgagagtgcgacgggttgaggctcatgacatcgccatcgacgacgatcagctcctgacgcagcatctcggcaatcagcgcatccaccactccggccagctccgctttttcccagcgcaggaacagctcggccttgaggaacggatagagtgtttccacatgacgcagcacttcggcgcggctgagatgacgatgctgagtcaccagagcggctaacagcgacggcatcaccagcatatgggcgatattgttgcgatagtaggtcatcagcaccgcctgctcgcgcggcaggatgatgatgtcgccaatggtgtccttctccacttcgaacttgttcatctgcagcgcatgatcgatgagctcgctggccgaagcggatggggcggtcgcatccggagaatagggcacattgcgcagcagcgcgaggtagcactctaactgctgggtgagctgctcacgggtcagcgaacgttggcgggaggccagtagcgccgtacagcacaggttcatggcgttggccgcgccggcgttattgatgcgcaccatcaggtcagcggcgatgctattcaccgtcggcgtcagccaggaggggcgaaccgcttcgatcgggtcgatcgcttcccgccaatccggcacatgctggttaagataggtcatcagcggcagcggttcgccgaagttaacgtaaccctggcccaggttgcgcagcttgcttaaaccgcgcaccatctgcggcagactctctttctctttagtggcgccgcgcagctctttggcgtaggttcctacctccatcacgtgctcatagccgatgtaaatcggcaccagggtgatcggtcgggttccgccgcgcagcatcgcctggatggtcatcgacagcgtaccggtcttcggatcgagcaggcggccggtacgggagcggccgccttcgacgaaatactccacggaatagccgcggctgaacagttcgccaaggtattcgcggaacacggtggaatagagtttgttgcccttaaaggtgcggcgaataaagaaggcgccgaggcggcggaagatcggtccggccggccagaagttgaggttgatgcccgccgcgatatgcggagggaccagcccctgatggtacaggacgtaggagagcagcagatagtccatgtggctgcggtggcaggggacatagacaatttcatggccgtcgtgcgccagctggcgtacgcgctcggcgttatgcacgttgatgccctggtacaggcggttccaggtgaagccgagaatgcggtctgtcaggcggatcatctcgtatgagaagttcgccgcaatctcttccatcagcgcgatagcgttctgctgtgccttctcgtgcgaaattttcttgctgcgcgcttcgtcttccaccgcgcgggcaatcgctttcgaggccagcagtttattaaacagatcctggcgggccggcagacgcgggccgacggcggccagccgctggcgggcaaaatgcatgcgagcgacgcgagccagcttctgggcgatgatcttatcggtaccgtgctcatccgccatgcggcgcagcgaaacggacggcgagaagcgcacgaagctgtcgcggccgagccaggagacggcgaaaaatttctgaatgccgttcagcatccgcagcggcggattgacttctcctttctcgcgacccggcgaacggccgaacatgaccgaaaccggcaccatttgcacatcgaggtccggatggttgcggtgcagatcgaggtaatcgtggaacagcttgatggactcttcttttggcgtgtaataagtaaatacgcgcggcccaccgtggatgaatacgtaacgcggcagcagggcgccgtcgatttccagcggttcaagcgggtcaggtaaatcatgcgccaggcattgggcgcgcagcgtcagcaggtccgccttcgaattatagggcaggacgtacatgaccggacgcgaggtatcgagtcctaattcctgggcaggctctgccggaatagacttgctttttaccagcacctgtaatggtaaattcagtaatttatagtaaattcgttgccagccggacataaacgatgtgaagcctctggttaatcatgcaaatgcgcggcaagaataacagaaagtgggcaaaatttccgttaccacgcggcaaacgcgcacactcatcgacgtcatttacgtaaaaaggttttgtgatggccaataataccaccgggttaacccggatcattaaggcggcaggttactcctggaaaggatttcgcgcggcgtggatcaacgaggctgcgtttcgtcaggaaggcgtcgccgctatcgtggccgtcgcggtagcctgctggctggacgtcgacgccatcacccgcgtattgctgattggctcggtcctgctggtgatgatagtcgaaattctcaacagcgcgattgaagcggttgtggaccgtatcggctcggattttcacgagctttcagggcgcgccaaagatatggggtcggcggcggttctgctggcgattatcatcgcgctgatcacctggggaacgctgctgtggagccattatcactaacgttcttcgctaaacctcgcaaaatatgaacaatccgccgatttttgtgtgccatgtggttccaaaatcaccgttagctgtatatactcacagcataactgtatatacacccagggggcggaatgaaagcgttaacgaccaggcagcaagaggtgtttgatctcattagggatcatatcagccagacgggcatgccgccgacgcgtgcggaaattgctcagcgcttggggttccgttccccaaacgcggcggaagaacacctgaaagcgctggcgcgtaaaggcgcgatcgagatcgtctccggcgcttctcgcggtattcgcctgctgacggaagaagagcaaggcctgccgctgatcggccgcgtcgccgccggtgagccgctgctggcgcagcagcatattgaaggccactatcaggtcgacccgtcgatgtttaagcccaacgccgatttcctgctgcgcgtcagtgggatgtcgatgaaagacatcggtattctggatggcgatttgctggcggtccacaaaacccaggatgtgcgtaacggccaggtggttgtcgcgcgtatcgatgaagaagtgacggtgaagcgcctgaaaaagcagggcaatgtcgttgaactgttgccggaaaacagcgagttttccccgatcgtcgtcgatctgcgccagcagagttttaccattgagggtctggccgttggcgtgatccgtaatggagaatggctgtagcgcctgcctctgcgcagcgtcatctgttgcgtgacgctgcgacgtttttcctcaatcaggtcctcaaacatgctgctcaacgctgccgataaagcgctgtggcgtcttgccctccctatgattttctccaacatcaccgtcccgctgctggggctggtggatacggcggtgatcggccacctggacagcccggtatacctcggcggcgtagcggtcggggcgacggccaccagtttcctcttcatgctgctgctgttcctgcgcatgagcaccaccgggctcaccgctcaggcctggggcgccaaagatccgcagcgcctggcgcgggcgctggtgcagccgctggccctggcgctgggcgccggggtgctgattatcctgcttcgcctgccgctaattgacctcgctctacatattgtcggcggcagcgaggcggtgcttgagcaggcgagacggtttctcgaaattcgctggctcagcgcccccgcctcgctggccaacctggtgctgctcggctggctgctgggcgtccagtacgcccgggcgccggttattctgctggtggtgggtaatctgttgaatattgtgctcgatctgtggctggtgatgggcctgcggatgaacgtccagggagcggcgctggccacggtcaccgcggagtacgccaccctcattattggcctgctgatggcgaagcgggtgctgacgctgcgcggcgtgtcgctggcgatgctgaaaaatgcctggcgcggggatctgcgccgtttattggcgttgaatcgggacatcatgctgcgctcgctgctgctgcagctgtgctttggcgcgctgaccgtattcggcgcccgtctgggcagcgacatcgtggcggttaacgccgtactgatgaccatgctgacctttaccgcctacgcgctggatggctttgcctatgccgtggaggctcactccggccaggcctacggcgcgcgcgacggtagccagttgctggaggtgtggcgggcggcctgccggcagtccggcatggtggcgctggcgtttgccctgatttacagcctggcggggcagtacattatcgcgttgttaacctcactgccttccctgcagcagctggccgatcgctatctgatctggcagacgatcctgccggtggtcggcgtctggtgctatctgctggacggcatgtttatcggcgcgacgcgcggcgctgagatgaggaacagtatggcggtcgccgcggcggggtttgctgtgacgctgcttacgctaccggtgcttggcaaccatggtctgtggctggcgctggcggtgttcctcgccctgcgcggcctgtcgctggcgctgatctggcgtcgtcactggcgacgcggcacatggtttagttagtcatctcccgtcattgccggtagccgtgaccttccccggtcgcgctacgtttacagggcgattcaatagcccggctcagcgtggcgcaggccgggaacatcctcttcgcgttatcccgcggtgcgatggttaaaaattccgaataacgaatcgacgccagcattctcatctatagttaataccatgtccggcacaaaacgggctgtaaacccaccgaatgatgaggacgttattatgaataaagacgaaataggcggtaactggaaacagtttaaaggtaaagccaaggaacagtggggcaaacttaccgatgatgatatgaccgtaatcgaagggaagcgcgaccagctggtcggcaaaattcaggagcgttacggttatgagaaagatcaggctgagaaagaagtctcagactgggagcataagaacgactatcgctggtagcgttccttgatccgaagaatgaagcatttgtgttagtgcctgtctgaatggcgcagggacgcgccgttaaccctttttcccgctgcggcagccgctcagcgggctttctttttgagctgaatagtatgatcgtgctggcagtgtcccggggtgctgcaggcttcgacttccacgcagcccgcgcaaagcccgtgagcttctatcacattgtggcgcagggcaaaccccatgcgggccgccagcgtatgcatgatatcttccaccccttccgccgcttcttcttttaccacgccgcagcggtcgcagataaacatggccgagctatgggtcggctggtcgaacagatggcacagcacatagctattggttgactctaccttatggacaaaaccctgctcgagtaaaaactccagcgcacggtaaaccgtcggcggcttcgcctgcggctctttctcacgtagcaagtccagcagatcgtaggcgctgattgccccttgctgcaggctcatcaggcgcaacacttccagacgctgtggagtcaggcgtacgccgcgctgtgcgcaaagcttttcagcatgcgctaacatctcttgcgaaggggtcttatccatgagcatcctcgggttgcgtgaatttgaatctgttactttatcacgttcctcagaaaacaccgagagccggcaggtgatacgggtcatacttcaggttgtcggcaccggcgcccgtcccgagcgctggccgcttattctcgagcagactacgccttagccgctcgctaaaaccaccatgtccgatttaatcacaacacgcccgaccctgggtatgctatatctgaagtgtctcattttcgggagaaaacgatgaaacgacctgattgcattcgccactggcgcgaactggaagggcccgacgatgctacttatcccgacagcccggagcgtttttcaatcggcgcgccgctggggcgaggtttacgtctcaaccggctggggatccaccacgagcggctgccgcccgggcggcgcacctcttatccacacgcggagagcgatgaggaagagttcatctacgtgctggagggctatccggaagtgtggataaacggctatctctggaagctggagcccggcgacagcgtgggttttcccgctggtaccggcatctgccacacctttctcaataataccgagcaggaagttcgtctgctggtggtgggcgaggccaacaagaagtacaaccgcatttattacccgctcaatcccggctatgccgcgacgcgccaggatcgttgggttgaccatccgccgcagttcttcggtccacacgacggcaagccgcggaaaaagtaatcatttcaggtgaggggcgaagcgcggcgcactatgcgcctgtggtgtatctttatgctatagtagcgcccctttttacccggatgcttatttattcgccatgatgcctgaatcaacgtcacctgttttccctgctcaccgcttctccatcgcgccgatgctcgactggaccgaccgacactgccgctacttcctgcggctgctgtcgcggcatacgctgctgtataccgaaatggtgaccaccggggcgattattcacggcaaaggggactatctggcctatagcgaagaagagcacccggttgctctgcagctcggcggcagcgatccccaggccctggcgcagtgcgcgaagctggccgaggcgcgcggctatgatgagatcaacctcaacgtcggctgcccctccgaccgcgtgcagaacgggatgtttggcgcttgcctgatgggcaatgcgccactggtggccgactgcatcaaggcgatgcgcgatgtggtgtcgattccggtcacggtgaaaacccgtatcggcattgacgaccaggacagctatgagtttctgtgcgatttcattgagacggtctccggcaagggcgagtgtgagatgtttattattcacgcccgcaaagcctggctctccggcctgagtccaaaagagaaccgcgagatcccgccgctggattacccccgcgtctggcagctgaagcgcgatttcccccaccttacgatggcgatcaacggcggcatcaaatcgctggacgaagccagagtacagcttgagcatatggatggggtgatggtcgggcgtgaggcctatcagaacccgggcattctggcctcggtcgaccgcgaaattttcggcgtcgccggcgcggatgccgatccggtagcggtggtgcgagccatgtacccctatattgagcgcgagctcagcaagggcacctatctgggccatattacccgccatatgctggggctgtttcaggggatccccggcgctcgccagtggcgtcgctacctgagcgaaaatgcgcataaagccggcgccgatattgcagtgctggagcaagccctgaagctggtggcagataaacgttaatttctgaccaaaacctggtgaaattgaccacgcctcgcgcaccgtcgcggggcgttttcttttaaagtcaagtgcttatgtttggcatgctttttgtaatacctgcagagtgaagtattcattctttggggagagaaccatgctggaactgctatttgtcattggattttttgtcatgctgctggtcaccggcgtatcgctgctggggattatcgcggcaatcgtggtggcgacggcgctgatgttcgtcggcgggttgttcgccttgatgatcaaattactgccgtggctgctgctggcggtggcggtggtgtggattattcgggcgctgaaatccccgaacggaaatgcttttcgcgacaataaccgttggcgttactaaggtattgaggggtgcgtcacaacctgaacaattttgcagacaaccgcgtaggcattgctgcgcaaatctgtcactattagcgcgttaacgaattcatcgcgctgtaccctacatacagccgaactaaaaaaaagtaagggcttcccaggtggaagccctaaacttttgccccttctgccaacttatggcagcagcaaactcgaaccctgcgtcacccggctctccagaacttcatgcgcccgccgcgcttcgctcagcggatagatctgactttcagccacgtccactttaatcaccccgctggcgatcagcgaaaacaattcactgcaggcttcctccagttcttcccggttggtgatatagccctgcagcgatgggcgagtgacgtacagggagcctttttgattcaggatccccagattaacgccggtcaccggaccggaggagttaccaaagctgaccatcaggccgcggcgctgcaggcagtccagagaggcctcccaggtatctttccccaccgagtcgtagacgacggccactttcttaccgtcggtgagcgccttgagccgctccacgatagactcctcgcgatagttaatcacctgccaggcgcccgcctctttggcgcgctgcgctttctgcgcgctgccgacggtaccgataagtttcgcccccagcgctttcgcccactgacaggctatcagccccacgccgccagcggccgcgtgaaacaggaacatctcatcaggcttaatttcataggttttgcgcagcagataccagaccgttaatcctttgaggaacgacgcggcggcctgttcgaaagagatagcgtccggcaggaccgccgctttgtcggccagcacattgtgtaccgtgctgtaggcgccgagcgccgactgggcgtacaccacccgatcgcctaccttaatatgcgtgaccccatggccaactttactgacgatgccggccgcctcggtgcccaggccgctcggcagcgacggcggcggatagaggccgctgcgaacataggtgtcgatatagttgatgccgatggctttgttttcgacctgaatctcatgttctgcgggatcgcgtggcgtgaactcaaccgcctgaagcacctccggtcccccgtgtttcgaaaattcgatgcgtgttgccatgttcgctcctgtgttgttccaagattattcagtaagcttaacagcctgcgccggcggcgacggattttcttacccgcctcaggcctgccacgcttaatgggttctttagcggcaatggctttctcgctatactgtcacgctcttttccggatcggtgaaatgttaggctatggcaggaaataaacccttcaacaaaccacagacagaaacccgcgaacgcgatccgcagctcgccgggctgaaagtcccgccgcactcgattgaagcggagcagtcggtgttgggcggtttaatgctggataacgagcgctgggacgacgtcgccgaacgcgtcgttgccgacgacttttatacccgtccgcaccgtcatatttttaccgagatggcgcgcctgcaggagtccggcagtccgattgacctgattacgctcgccgagtcgctggagcgtcaggggcagctggacagcgtgggcggcttcgcctatctggccgaactgtccaaaaacacgcccagcgcggctaacatcagcgcctatgccgacatcgtgcgcgaacgcgcggtggtgcgcgaaatgatttcggtggccaacgagatcgccgaagccggcttcgacccgcaggggcgaaccagcgaagatctgctcgacctcgccgaatcccgggttttcaaaatcgccgaaagccgggccaacaaagacgaagggccgaagaacatcgccgatgtcctcgatgccaccgtcgcccgtatcgaacagctgttccagcagccccatgacggcgtcaccggggtcaacaccggctacgacgacctcaacaaaaagaccgccggcctgcaaccgtcggatctgattatcgtcgccgcccgtccatcgatgggtaaaacgaccttcgcgatgaacctcgtggaaaacgcggcgatgctgcaggacaagccggtattaatctttagtctcgagatgccctcggaacagatcatgatgcgttctctggcctcgctgtcgcgcgtcgatcagacccgcattcgtaccggtcaactggacgacgaagactgggcgcggatctccggcaccatgggcatcctgctggaaaagcgcaatatctatatcgatgactcctccggcctgacgccgacggaggtgcgctcccgcgcgcggcgtatcgcccgcgagcacggcggcatcggactgattatgatcgactacctgcagctgatgcgcgtgccgtcgctctccgacaaccgtacccttgagattgccgaaatctcccgctcgctgaaggcgctggcgaaagagctgcaggtgccggtggtggcgctgtcgcagcttaaccgctcgctggagcagcgcgccgataagcgcccggtcaactccgacctgcgtgagtccggctctatcgaacaggatgccgacttaatcatgttcatttaccgtgatgaggtctatcacgagaacagcgatcttaaaggcatcgcggaaattatcattggtaaacaacgtaacggcccgatcggcaccgtgcgactgacctttaacggccagtggtcgcgtttcgataattatgccggtcctcagtatgatgatgagtaatccttccgccttcttttattaaggaattcaaatgcaagcggcaactgtagttatcaaccgccgcgctctgcgacacaacctgcaacgtctgcgtgaactggcgcccgccagcaaactggttgcggtagtgaaagcgaacgcctacggacacggtcttctcgagaccgcgcgaacgctgaccgacgccgacgcctttggcgtcgcccgcctggaagaggcgctgcgcctgcgagcggggggcatcgcccagccgatcctcctgctggaaggcttttttgctgcggaagacctggcggtgatcgccgcccagcgcctgcatacggcggtgcatagccccgaacagctggcggcgctggagcaagccgatctccccgagccggtgaccgtgtggatgaagctggataccggcatgcatcgcttaggggtgcgcccggaggaagccgaggcgttttatcagcgtctgagccagtgtaaaaacgtccgccagccggtgaacgtggtgagccacttcgcgcgcgccgatgagccgacctgcggcgccaccgaacgtcagctggacatcttcaccacctttaccgaaggcaagccgggcttgcgctctatcgccgcctcgggcggcattctgctgtggccgcaatcgcattacgactgggtgcgccccggaattatcctgtatggcgtgtcgccgctggacgatcgctccaccgggaaagatttcggctgccagccggtgatgaccctgacgtccagcctgattgcggtgcgcgagcataaagcaggggagcccgtcggctacggcggcacctggatcagcgaacgcgatacccgtctcggcgtggtggcgatgggctatggcgacggttatccgcgcgcggcaccgtcgggcacgccggtgctggtcaatggccgggaagtgccgattgtcggccgggtggcgatggatatgatctgcgttgacctcggaccgcaggcccaggataaggccggcgacgcggtagtgctgtggggagaggggctcccggtagagcgcatcgccgagataacgaaagtgagtgcttacgaacttattacgcgactgacctcccgcgtcgccatgaaatacttcgactaagcctctggcgtaccggatagcacagaggctgatccggtacgcaccaggcctgcggcgctcaaaaaagcggtttataccgctgcgcggtcactttcccctcaacatcctctcgacctgccgtcatatccggtttattgtgtaagaacctgccccatgtaaacctggagatacatcgcgtgtttcaaaaagttgacgcctacgccggcgaccctattctttctctgatggaacgcttcaaagaagacccgcgaagcgacaaagtcaacctgagtatcgggctgtactacaacgatgacggcattatcccgcagctgcaggcggtggcggaagcggaagcacgcctgaacgccgagccgcatggcgcctcgctgtatctgccaatggaagggttgagcggctaccgtcaggcgattgcgccgctgctgtttggcgcagagcataccgcgcttaagcaaaatcgcattgcctctattcagacggtcggcggttcgggcgcgctgaaggtcggggccgacttcctcaaacgttactttcctgagtctcatgtctgggtcagcgatccgacctgggaaaaccacatcgccatttttgaaggggctggcttcgacgtaagtacttacccctggtttgataaagccaccaacggcgtgcgctttgaggacctgctggcgacgctgcaaacgctgccggcccgcgatattgtgctgctgcacccttgctgccacaacccgaccggcgccgacctgacgccagcccagtgggaccgcgtggttgaggtattgaaagcgcgtcagttgatccccttcctcgacatcgcctaccagggctttggcggggggctggaagaggatgcctacgctattcgcgccatcgccagcgccgggatgccgatgctggtcagcaactcgttctccaaaattttctcgctgtacggggagcgcgtcggcggtctgtccgtggtctgtgaagacagcgaaaccgcgggccgcgtgctggggcagctgaaggccaccgtgcgccgcaactactccagcccgccgagctttggcgcgcaggtggtggcgacggtgctgaacgatgccgggctgaaagccacgtggcaggcggaagtggacgccatgcgcgcgcacatcctgaccatgcgccaggcgctggtcgacgcgctgcagcaggttgcccctggcagcaaagtggattacctgctcaagcagcgcgggatgttcagctataccggatttagcgcggcgcaggtggatcgtctgcgcgatgagtttggcgtctacctgattgccagcggacgcatgtgcgtggcggggttaaactcacgtaatgttcagcaggtagcgaaagcttttgccgcggtaatgtaagccgctctccagcaggttgtctctgccggtcaacgggcaggggcaacccctcggatgtgatcatcctctttttctatgacatctgcgcgaaaaaggcttttcatccatgccgccggcgggtaaggtcgggacgttgataagcatgcacattattgaaaacaataatgattgatagatttagggataaatatgcgcaaacttactctcgcccttgcggcggcttctctcctgttcacgctgaacagcgccgttgtggcgcgcgcctccacgccgcagccgctgtgggtcggcaccaacgtggcccagctggccgagcaggcgccgatccactgggtttcggtggcgcaaattgagaacagcctgctggggcggccgccgatggccgtcggctttgatatcgatgacaccgtccttttctccagtccgggtttctggcgcgggcaaaaaaccttctctcccggcagcgaggattacctgaaaaacccgcagttctgggaaaaaatgaacaatggctgggatgaattcagcatgccgaaagaggtggcgcgccaactgattgcgatgcatgtgaagcgcggggacagcatctggttcgtcaccggccgcagccagaccaaaaccgaaaccgtttctaaaaccctgcaggatgattttctcatcccggccgccaatatgaatccggtgattttcgctggcgataagcctggccagaacaccaagacccagtggctgcaggcgaagcagataaaggttttctacggcgattcggataacgatatcaccgccgcccgcgaagcgggcgcccgtggcatccgcgtgctgcgggccgccaactcctcctataagccgttgccgatggctggcgcgctgggcgaggaagtaatcgtcaattccgaatactgatgaccgcctgaacgcgataaacggcagcgacggcgctgccgtttttttatgcaaaatcaggggtggaaggttttaccttttcacgtattgctgcacacttagaaggattcattcgcaaaaggagtcaatgatgtggtatcagcaaaccctgacgcttgggccaaaatcccgcggttttcatctggtcaccgacgaaatccttggccagatccgcgggctgtccggggtgaaggttggcctgctgcacctcctgctccagcatacttccgcttccctgacgctcaacgaaaactgcgatcccaccgtccgctatgacatggagcagtattttctcaacgccgtaccggacaatgcgccgtatgaacatgactatgaaggccctgacgatatgccgtcgcacatcaaatcatcgatgcttggcgtgtcgctaatgctgccggtcgaggacgggcgcgtcaggctgggaacctggcagggcatctggctgggggagcatcggatacacggcggttcgcggcgcatcgttgcgacgctcatgggggaataaaagatgacaatttcggagttattacagtactgcatggcgaaaccgggagcagagcagagcgtccacagcgactggaaagccacgcagattaaggtctcagacgtgctgtttgccatggtgaaggaggttgaggaccagcggccggcggtcgcgctgaaggcgagtccggagctggctgagctgctgcgtcagcagcatcgcgatgtccggcccagccagcatctcaataaagcgcactggagcaccgtctatctggatggctcgctgccggattcgcaaatctactacctggtcgatgcgtcttatcagcaggcggtgaaaatgctgccggagccggtccggcagcagcttacccgctaattatttcagcatgggcttgaggaagcgcgcggtgtgcgaggcttcgcactcggcgacggtttccggcgtaccggagaccaggatttcgccgccgccgctgccgccttccgggccgagatcgacaatccagtcggcagttttaatcacatcgaggttgtgctcaatcaccacgatggtattgccctgatcgcgcagctggtgcagcacttccagcaactgctggatatcggcgaagtgcagaccggtggtcggctcatcgaggatatacagcgtctggccggtaccgcgcttggacagctcgcgcgccagcttcacgcgctgcgcctcgccgccggacagggtcgtcgccgactggccaaggcggatataggtcaggccgacgtccatcagggtttgcagcttacgcgccagcgccggtacggcatcaaagaattcacgcgcctcttcaatggtcatatccagcacttcgtggatggtcttacccttgtacttaatctccagcgtttcgcggttatagcgtttgcctttgcactggtcgcacggcacgtagatatccggcaggaagtgcatctcaaccttaatgacgccgtcaccctggcaggcttcgcagcgcccaccgcgaacgttaaagctaaagcgccccggcgtatagccgcgtgagcgagactccggtacgccggcgaacagctcgcgcaccggggtaaacaccccggtataggttgccgggttggagcgcggcgtccggccgatcgggctctggtcgatatcgatcactttatcgaaatgttccagcccctggatatcgcgatacggcgctggttcggcgatggtcgcgccgttgagctggcgctgggcaatcgggaacagggtatcgttgatcagcgtggatttacccgagccggagacgccggtgatgcaggtaaacaggcccactggcagggtcagcgttacatccttcaggttgttgccgcgcgcgccggtcagcttgaggactttttccgggttggcgggcacgcgctgtttcggcacttcaattttgcgtttaccgctcatgaactggccggtcagggattccggtaccgccataatggcctccagcggcccttccgctactacctggccgccgtgaacgccagcgccgggaccgatatcgatcacatggtcggcggcgcgaatggcgtcttcgtcgtgctcaacgacgatcaccgtgttgcctaaattacgcaggtggatcagggtgccgagcaggcgttcgttatcgcgctggtgcaggccgatagagggttcatccagcacgtacatcacgccaaccagcccggcgccaatctggcttgccagacggatacgctgggcttcgccgccggagagcgtttccgccgagcgggagagcgtcaggtagttgaggccgacgttgacgaggaatttcagacgatcgccaatctctttcagcactttttcggcgattttcgcccgctggccggagagcttcagattgttgaagaaatccatcgcatggccgatgctcatatcggagatggtcggcagcggggtgttttccacaaacacgtggcgcgcctcgcgacgcagacgcgtgccgtcgcagctggcgcacggacggttgctgatgaacttcgccagctcttcgcgcaccgcgctggattccgtctctttgtaacggcgctccatgttatgcagcacgccttcgaacggatggcggcgcaccgaggtatccccgcggtcattcatgtatttgaattcaatactttctttacctgaaccgtacagcaccactttctgcacgttggcgctgagggtgccccatggcgcttcgacgtcgaatttatagtgctccgccagcgacttcaacatctggaagtagtagaagttacgccgatcccagccgcggatggcgccgcccgccagcgacagctcgggattttgcaccacgcgatcgggatcgaaatattgctgcacgccgaggccgtcgcaggtcgggcaggcgcccgccgggttgttaaaggagaacagacgcggctccagctcgcgcatgctgtagccgcagatcgggcaggcgaagttggcggaaaacagcagttcttccgctttctcatcatccatattagccacaatggcggtcccgccggagagctccagcgcggtttcaaacgactcggccaggcgctgcgccagatcgtcgcgcaccttgaagcggtcgatgactacctcaatggtgtgcttcttctgcagctccagcttcggcggatccgacagatcgcagacctcgccgtcgatccgcgcgcggatgtagccctgactggcgaggttttccagggttttagtgtgctcgcctttgcgctctttaataatgggcgccagcagcatcaggcgcaggccttccggctgggcgaggacattatcgaccatctgactgacggtttgcgccgccagcggcacgtcgtgatccggacagcgcggttcgccgacgcgggcgtacagcagacgcagatagtcgtgaatttcggtaatagtacccaccgtcgagcgggggttgtgagaggttgatttctgttcgatggaaatcgccggcgacagcccttcgatatggtcgacgtccggcttctccatcagcgacaggaactgtcgcgcataggcggagagcgattcgacgtagcgacgctggccttcggcatacagggtgtcgaaagcgagtgaagatttgccagacccggaaagcccggtgacgacaatgagtttgtcgcgcgggataacgaggttgatgtttttgagattatgggtgcgggcgccccgaacttcgatcttatccattcacctttcccggtaggtagatacacggattgcctggtttgcttgaaggacaaacggcagaaacggctaattatgacacaatttaacctgaatgaatatacagtatcggaatgcaaattcgggtcgagtgtgcaacaatgccgtagccgggtactatctctggaatcagcctcgcagctattaaaatgctacgtggaaatggtacactcgcgcgtttacactattaagaaacgtattcaggagacacgaacatggccagcagaggcgtaaacaaggtgattctcgtcggtaatctggggcaggacccggaagtacgctacatgccaagtggcggcgctgtcgccaacttcacgctggcaacttccgaatcctggcgtgacaagcagaccggcgaaatgaaagagcagaccgagtggcaccgcgttgtgctgttcggcaaactggcggaagtcgctggtgagtatctgcgtaaaggctctcaggtgtacattgaaggccagctgcgtacccgcaagtggaccgatcaatccggtcaggacaaatacaccaccgaagtggtggtgaacgtgggcggcaccatgcagatgctgggcggccgtcagggcggcggcgcaccggcaggcggcggccagcagcagggcggttggggtcagccgcagcagccgcagggcggcaaccagttcagcggcggcgcgcagtcccgtccgcagcagcaggccccggcagcgccttccaacgaaccgccgatggacttcgacgacgacatcccgttctaaggcttgccttaggcgcactgtctgcgcagtcgaaaacagaaagccccggtttcgccggggctttttctttgttattcctgcaccgtcatttcaggatggaatttgacctacggtaacgagcgattcagatgacgggcacctgagcggtggcggctgtcgccacgctgggctgcggtttggctggctgcgccaccggctcctgccgcggtacggccgtcgctttctgtttgcgggccatgtcatcgacgatcagccgataggcgatgtaatacttatagatattgctgacgtaggttaccgtctcggcgccaattttttctgccgccatattttcgacgttaccgaaccagacgttcgggtcaaatcctcgctgtttagtcatggtgcgcaggcgggcgatacgcgccggacccgcgttataggaggcaaaggtaaacagcgctttatcgagccgggtcatgggctcatcggcatagtaccgatccatcatccagcgcatgtatttcacgccggcatggatattgggatccagctgtttaatatcgcccaccttcagctcttttccagtgctgggcatcacctgcataacgccgatggcgccgacgtggctccgtaccgactgattcagccgcgactcctggtatccctgggccgccatcagcagccagtcgacgtcgtaacgatcgccgtacttgcggaagacatctaccatcgcgaggaatttgcgtcgttccttactcgccgcggcatttttgacatatttagcatttttcaggtaacgcagcaggagagtattgcccagcgtggtgccctgacgattctttttgacgaagttgttcagtaccgtcagcagctgcgggctgtctttgcgtaccgcccaggcaatgtcgccgccgtcgcgcagcaccacgttgtcatggacctgaatttttggaaacacctgtttccagaacaacgccttatgctgatcgacgacgatcagcggaatcagcccggcgttgagcatttccagcagatcttcatcctccagcgcttccggcgccgcctccagtatcaccggtgggcgcgattcaccggcaaatcgggcgttcagcgcttgcaggctgtcgtaatagctggaggagcggcgaacaaagacggtttgaccagagagttgctccagactgtcgaccttcggtgaagccgggccggagatcagtaattctttcacgttgctgtagagcggctgggcgaaatcgacctgtgcttcccgcgagggcgtgatagtcagattggcagccgcaatatcgcctttaccttcattaagcgcgataaagagattgtcccgactgaccggcacaaaaacgatatgcagcttcaggtggcgctgtttgagctttttatccttcgctagctgtttattcagatcgttttccagcgcgataaaaatgtcgtgcgtcgccccgcgctgggtgcctttatcaataaaaaagaaggtcttgctgtaggtggttaatacccgaatggtacgacggtcgatcatgccaggcaaatcgcctctccatggccgtagcatatcgtcgatatgaatcgatagcgtgttgtcttcggctgctgccggcggcgctttttccgcctctactgccggcagcagaggagcgaataacagtgtcgcgaggcaggtgagccaggcgataaacagacgtgatagcgagtaggcgttcatggaggaatactccgcaggggatgtgattattttagcagaacggccgccgttagccgggcacgacaagggcgtaaaaaacataacaatgccgacaaatagttttctcccattttatcgcttactattaatatgtttttatctttaatttaactatggagataatatggcgaaaatgtgtgtttttaatgataaatagaaaataatgatgatgtttttattttatttctccccatctgttttgttgtaaccttttgattgttggtgtttattttgtttttcttcgagattgattattatcatcttgataatgaatctcatttttattaccgtaacacggcacattactctaataacacgctgtctggattacgctatcaaagaatagcgcgcagcgctttttctctaatgatgaaacagggcacttaattttattatgcctcatgctgttttcttattcccatgactatcgggaaggggctgacctacgccaaaatctggcgaggcgcagaggcgagtattttatcccattgttttttcaattggggaaggcgttatgcccgacagcaacagaaaacagggcatattctatgaaatacacgtctcacttcccgctggggatcgtcattcctctgctcgcctgtagcgtgccgctgcaggcggcagagaacatgaccgaacaatcgacgcctgacgagagcgccgccactgccgaaaatcacgaggagacgatggtcataaccgccgccaggcagaacctgcaggcgccgggcgtgtcgaccatcaccgcagaagagatccgcaaacatccccccgcccgcgatgtgtcggagttaattcgtacgcagcccggggtaaacctgaccggcaactctaccagcgggcagcgcggcaacaaccggcaaattgatatccgtggcatggggcccgagaatacgttggtgctggtcgatggtaaaccggtgaccagccgtaactcggtgcggtatggctggcgcggcgatcgtgactcccgcggcgataccagttgggtgccagcggagatgatcgatcatatcgatgtgatccgcggcccggcggcggcgcgctatggtaatggcgcgatgggtggggtcgtcaacatcgtgaccaaaccgaccacaccagaatggcacgggtcgtggaatacctatatgaacgctccgcagcaccgtaaagaaggggcgacgaaacgtactaactttagcctcaatggtccgctgtcggacagtgtcagcttcaatctctggggtaatctgagtaaaacccaggccgatgcgcaggatattaacgccgggcatgaagcggaacgtaccggttcctacgccggttcttatcccgccggacgtgaaggggtggtgaacaaagatattcacagtaagctgcgctgggagtttgccccgatgcaggccctggagtttgaggccggttacagccgccaaggtaatctctatgccggcgacacacaaaacaccaataccagtacgctggtgaagagtatgtacgggaaagagaccaaccgtctctaccggcaaacttacggcgtaacatggaccggcggctgggataatggcgtgaccagcaacagctatgcccagtacgaacacacccgtaactcgcgaatggatgaagggctggcgggcggtacggaagggatcttctccagtagcgagttttcagatatcgatctggccgatgtcctgctacatagtgaagtgaatattccgtttacgctgggggtcgatcagaatctgacgctggggacagaatggaatcagcagcggatgaaagatggcgtatcgacaacccaggcgctctcttacggcactatcgatggcgtatcggctaccggtcgtagcccgtactccagcgccgagatcttctcgctgtttaccgaagataatatggcgctaacggacagcaccatgctgacacccgctctgcgcttcgatcaccacagcatcgtcggcaataactggagccccgcactgaacctgtctcaggagctgacggacgactggacgctgaagctgggcattgcccgcgcttacaaggcgcctaacctctaccagttgaacccgaactatattctctacagcaacggtcaaggctgttacgccagtagttccgcctgctatctgatggggaatagcgatctgaaagcggagaccagcgttaataaagagattggtcttgagtacaagcatgatggctatcaggcggggatcacctggttccgtaacgactatcacaataagattgagtcagggtatgcggcggtgggtaccgccagcaacggcaccaccaatatctatcagtgggaaaacgtaccaaaggcgttagtggaaggcctggaaggaacgctgaatctgccggtgggggaggcggttaactggagcaataacctgacctggatgctgcagagcaagaataagacgaccggcgaccggctgtcagtgatcccgcagtttaccctgaactcgaccctaagctggcaggttcgtgaagatctctccctgcagagcacctttacctggtatggccgacagaaaccaaaacgcttcaattataagggcgaggcggtcagcggcagcgaactaaacgaagtcagcccatacagcattgtcggcctcagtgcgacctgggatgtgaacaaaaatctgagcttcaccagcgggatagataacctgtttgatatccgccactaccgggcagggaatgcgcaaacgaccggcaacgcgacgacgggagcttatctgtatggcgcgggtgccgagacctataacgaatcggggcggaccttctttatgagcgttaatactcatttctgatgatcctgatgaggagtaaaccgggtgcaacgcgacccggtttttttatttcagatgagagcggaggaggcggttataaatcgtgacaaaatcttcacgccctctacattattagctcaacatatccttttatactgatttccgtcgcgcaaggtcgttgatcccgaccgggctcgataatagcatcctgctatttcccttctgtaatatcccctgtcccccttccattcccaaccgcagcgatgcggaggagggggacctccttatttttgccgcgtgatctgatagcgatactgagtgggcgtgagcgcatgatattttttgaaggtacgattaaacgcactgagatcgtcataaccgaccatcatacaaatatcgacgattcggtaaccaggcgtcgtcagcaataaacggcgacacagcgacatgcgctgctggcggatatattccattggcgaacgatcaaaataatgacggaagagccgaaacaaatgccagggggaataaccagagatatcgctcagatcgtcgacggtcagtttcttatccagattattatcgatccacaagagcaggtcgcttaataccgattgctggagcgttttgctacgcataattgcggccaatcccataacgcagggctcctcagtgaggagccctggggtttattgaacagtgagtgtgccgtggcgaacctgataatttttttgattatcagggccaatatagtcgctggcgggttttgccagctgcagatgaccaaaggcggttgtttgctctgcatgataattttcgccgtcattcacgtcgccgcgcccgttataacgggcaatggccgggaagggatacaccggacgagtcgcgataaccgctggagcggcgtcagcgtaaggctgactgactttctgcacgccgtgaaactgcgtttgcgcatctggtttttctgtcatcggcggcaggtcggcagcggctgttgcccgtttgccggccatgatctcctgcggcgcgatgccttcctcggtccagcgcatcagcggggtaaggagatcaatttgatcgtaaccttcgccattaccgcaatgggctaccccaggcagcaggaataaccgcaggaaggtatccgttgcggcatggcccatctctgcttctacgccgcgataataggcgatagaaaaggccgggctgacggagtcatcggccagaccgtgccagaggataagcttgccgccgcgctgttgataggcatgaagattggtatttgccgcgttatagagcggcgccagttgggcgacggcgtcaaaattctgctggttaagcgggaaatcccgcatcgattggatcttctgtttttctcctggcaggagcacggattgcagagccggtagtaccatcatttccgacattgagtggccggtcggcgtctcgggcaccggccagcgtagctcggaacccagcggcagaccgcccgcgacgaactgggcgccgtggctgtcgtaagcgccgcggtagagctttttcaccacctcgatctcttcctgcgtcaggcaggtagaacggtcccgagcatcggcaggacagcgggggagccatgactcagagaactgacaggcatacggattttgcaggacaccatcctgcacgccggaaagcgtcgggcagtgagccagcacggcctggtgaatcagaggaaggcgatttttcagcaggatagcggtaccgtccgggcgctgattggcggccacattccagccgtggaagaaggagttctgaaactggaaaaaggccgctggcgcgccagcgctgataccgtcaaaatcctgcggaaagcgctgcgcttccatcaatgcttcgcgaccgccgtctgagcagcccataaagtaggcatactttggcggctggcggtaaagcgtctgcatcaccgctttggccagcacggcggtcaggtggttggcgcgccaggcaaaatcgatgcgcttttgcggatcttcggcccatgacgcatccatcatactgccatggtgccccatatcggttgctgccaccacaaactcgccgttcattgccggcaggcagccgctggcattcgacagattcaggttaatactcccgcacagtccgccacagccgacctgcaaaaaacgttgactccagcgttgggtcggcagggcaatctgcacgccaatctcaggggcgatagtggcgctcaccttgcaccagcttccctgcgcggaggtctgcatttcagtgtggttgatagtgacctttgcgccaacggccgcgctgaagtcggtagtgcttagcgcatcgcatgtcagcgcgggaagaacgatcggcagactggcgacagcctgcgtgggtgaagcgaacgataacccgaagagggcgcagaggatgatgggcaagattgtcttgagtaagcgtgtcatacgcagttccctgtggctgatgatgggaggcggcaggatggcgaaacctatgcctcaccttccctggcgaggcgccactgcttggctattgtagataacgatagactttccttgatgccttgataaggcgaccctactgtattctgctattttgaggaaaatatggagatgtttgccaacggcgtctggcggtgaattcggggtagaatgttgtgatatcagttgcataatttattcaatttctcttcattaaatctgctgggttgcaggttatttttctccctgttcctggtgatcccagagagcatcattcctaacgagatccttccccctttccattaataagaaagggggctttttattaataaaacgttcaggcaaatctaaatatagtactggtgttggccattagaacaatgcgcttcagaaaaagttccatcattaaatatatttttaaagatgctttaatatccattttttctccattttgtcgccataattgcatgtaattctgcgcctcgctcaggttattttctgtcgcatattttagagatgcatcctgaacaaataagctcaacgccagcagaacactgctattgctcattatctcgtagacgacacattcatgttaaaaaagactcatatcatcagcggattattgatcgcccctttaacgttatatgccgcaacatcatatcaagttgatgatatccgttttgaagggctacagcgcgtgaccgtcggggcggcgctattaagtatgccattgcacgcgggagatgcggtgacgccagaagatgtcagcgaggcagtgcgcgcgctgtatgcgagcggcaatttcgaaaatgtgcagatcctgcgcgatgggaaaacgctggtggtgcaggttaaggaacggcccactattgccagcgtcagtttttccgggaataaggcagtgaaggatgatgcgctaaaggaaaatctcaccgcgtccggtatttctgcaggtagtgcactggatcgaaattcgcttagcgaaatagaaaaggggttgcaggatttctattacagcgcggggaaatacagtgcgcaggttcacgcggtggtgaccccgttaccgcgtaatcgcgttgacttaacgttcgtttttcaggaaggcatctcggcgaaaatcgcacaaataaacattatcggtaatcaggcgtttcgggaagagacgctcctggaccagcttcagctacgtgataatgtgccgtggtggaacgtggtagccgataaaaaataccagaagcagaagctggaagccgatctggaaacgctgcgcagtttttatctcgatcgcggctatgcgcgctttgctatcgagtccacgcaggtcagtatgacgccagataaaaaatccctgtatatcactatcgccctcaatgaaggcgaacgttatcgggtcgaccgaactcaggtgatgggcgatctggctcagcatgggccggagatcgaggcgcttgcccagccgctggcgggggcatggtatagcggggcgcaagtcaccacggttgaaaatgagatcaaaaagcactttggtaagtatggttatgcctggccgcaggtgacgtccacgccggaaatcgatgatgcgcatcaccgcgtggtgctgcatattcaggtcaacgcgggccgccgctactcggtacgccagatccgcttttccggtaacgacacctcccgggacgcggtgctgcgtcgtgaaatgcgccaaatggaaggggcgtggctcaacaacgaaaaagtcgatcaagggaaggtacgtcttgatcgaacgggtttttttgagaacgttgaacagcagatcgttccggtcaatggaacggcggatcaggtcgatgtggtctacaaggtgaaggagcgcaacaccggctcattcaatgtgggcctgggatttggtacggacagcggcgtgagctatcagcttggcgtgacgcaggataactggctgggaacgggtaatagcgttagcttcaatgggacgcgcaacagctaccagtcttatcttgaactgggggcgacgaacccgtggtttaccgtagatggcatcagcctgggcggaaagattttttataacagctatgatgcttctgatgcggatgccgggagctataaccagcagagctatggtttaggtagtacgctagggtttcccattagcgaaaataactccctgaacctgggactggattatgtccataatcgcctgaccaatatggatccggagctgacgacctggcgctacctcagctctcggggaatcgagcccagcgtggtgacgaaagatggcgacagcggcgcaaaatatagcgccaacgattattttgtgagtcttggatggggctacaacgatctcgatcgcggcttcttcccgcgtgcgggaaacaagagcagcctgagcggtaaagtgacgctccccggttcggataatagctactacaaactctcttttgacaccgcccagtatctgccgctgagcgagaacaagcgctgggtctggatggaacgcctgcgcgcaggctatgccggcgggttagacggcaaaagtgtgccgttctacgataacttttacgcaggcggttcgtcgtcagtgcgcggattttcttctaacactattgggcctaaagcggcctattaccgctgtaacggtagcgaaagcagctatagcgcctgcccgctggacgcctcgtctgatgcggtcggcgggaatgccatggcggtgctgaacagcgaatttatcattccaaccccctttgtgaatgataagtacgccgatagtctgcgaacctcgctgtttgttgacgcggggacggtctggagtacatcctggcacaacaccgcgcagacgctggcggcagggatccctgactacggcgatccgagtcatattcgtctctccgcggggattgccgtgcagtggatgtctcccctcggtccactggtcttctcctgggcagagccgtttaaaaagtacgatggtgataaagcagaacagtttcagtttaatatcggcaaaacctggtagggctccaacggggcctgatagaccggcgtggctatattctgtggactgtcctccgacatagcgattgagcagaatatactcaaccgctatgtcgatattatcgctaaggaatgcgatctggcgggacacccgcgacatttacccgagcgcggtctgcgggcctcgcggacctggtgacgtacgacgaggtaaccacgcaataaatagctgcctgctatggtcctctcttcttgccaaaccgcgggtaatactcagtgctgcatcatctaataccaatggctgaggcctcatccagagggactaagacgtattgtcaattaagtttatattatcttattttttattgtattttcttttttaaggttaatttggctgtttttcatcaggcctaaccataaatttagagagggagatgaaacgttactaataatggagtatgttgttaggaattgtcttaaatcacataattgtcaggggtgcttgcgatttataacaatgaatgctatcactatatattgtaataatttgtagcatctttataaggaaggaatatgaaatggactattcttaataccctgatctgcccgcaatctggtatcgccttctcggctatatccagtctgcgtttcttgaaatttatcatgtggtacgaggctgatgtaatcctgttgcccggtgagtcgataagactctattcctcgagagttttaattaatgaccagtatcattcattaaaaatctataatattacggtgtacgacgaggcgcagtgggaaaaattacgtgagcgaccatcgtgcccttaccatgccggtggcgagcggtctgactcctgtttttaccagtccttttgcacgattaagcgttgcccgaataatattccccgcagtgaaccctggcgttagccagtccacgccgccggtcagacaccggcggcgtgacctcatttcgccagcagggcggccagtcgaggctggacgcttgcgcagccggccagcacgaggttgcctcgccgcaggcccgcattggcgagaaacgcattgcacgttccgcccgcctcctcaatcaatagcatgcctgccagcgcatcccagctgttcatatgcgcttcataataggcgtggagctgaccggcggcgacatgcgccagcatcagggcgcccgcgccaaaacggcgatactccagaccggcgtcgagcagcgtgtcgatggcccgggcgtagtcgctggccggggcccggctggagcgccccatgccgatcaccaccgcatcgggctccggctcgcgtagcgtcaggcgccgaccgttgagatacgcgccttcgccgcgggcggcgaagaaaaattcatcgcgatcgggggcgtaaatgatgccgagcgacagctcgccctggcacactcgcgccagtgagatgcaccagtaatccatgccgaggataaagttggtggtgccatcgacaggatccagcacccagacggtctggtcgtcgccttcaaaaccgctctcctcgccgaggaaaccctcctcgggaaagtgggcctgcagccagcctttaatctcttgttctaccgcgagatccgcctgcgacacaaagtcctggcgcgcttttttatcgacctgtaatcccgcatcgcgcagcgcctgggcgtgggcgcctgcctggcgaatcaaggcgcataatgactctcgttgtgcttccgtcatagtcctgctctcagataacaaagggcgacgtgcgccggtgaattaaggttacctccacccaggtggtgcgtgaaggttgcgaagggtcggcggcgcgctccagaagccgggcgagcgcctggcgggcgatcgccgccacatcctgatgtagcgtggtgagctgatagctatattgcgcggtcgtcggcgtgttatcaaaaccaatcagctgaaaatccgccggagcctctctgccgcgctggcgcattccatcgagaaagccacatgcaagctgggcgttggcgcagaagatcccctccagcgcctcgtcggcgagcgccgcagcctgtaacccgcccgcgtaaccttcttgctgacaggcgaggatcgccaggtggcgttcgacgtccactccgcgcgtttgcagcgcccggccgaacgcttccccgcgcatgcggccggcccaggtggaaggatggtggttgagccagccaaagcgctgacagccgctgcgcagcagttggtcggcggccagttcggcgccggcggcgttgtcagaacaaacgtaatccacgccggggattgtcggctgacgattaatgcccacgaccggaatatgctgctggacgcactcgttcaccagcgcctccggcggctggccggaggtgacgataacgccggagacgcgaaactgagcgaaacggcgcaaggtctgcgccagatcctgctcgctgtggatctcgctcaccagcgcctgaaagccctggcgctggatctcgttaagcagcgcatcaagcagggtactgcgaaaaggatcgctgatgcgcgagacgatcacgccgattaagtggctgcgctggcggttcagcccctgggcgaggaagttaacctgataccccagctcttcggcggcgcgcagtacccgcgcccgggcgtcgggagagatgctgccgttgttgctcaacgcccgggacaccactgcccgggagacgcccgctcgccgggcaacatcctgggcggtgacgctgggtttgcgtgggttcataggaggtacgtctcgtcagtgggcgtgggacgcggcagcgttaaggtgagtccatcccgggaaacgaataagcccggccacggctgacaggcctgctttagcgccgacagggaagcatcctcgcagtgatagagccccagcgccgggagctgcagcgttctgaacagcatcaggcaggaggggaaatcgccatgcgaggcgtcatcgtccagggctgctaccgaggcgcactcctgaaacgccagcccggcgccggccatcagggctatcgagtcggcggtcggtcggccatcgccgctgtaaaacagcgtctgcccggcaatggtgatgcggatggcgcgattactcagctcatgctgggtgggggcagtgcggatctgccagtcctgccacgtccaggcttcgcggcattcctgccagtcgatggtgaaaccaaggtccgcctgcggccagttcgccagcgcggccagttgcatgagcaccggctgctgcgccggctggcagtagataatgactggcttctgacgggaataacttttccagtggttcagtagcgccgtcaggccggtgcagtggtccgggtgaacgtgggtgaagtagatcgcgtcgatatcgttgacctcgccgccgcgctgccagagcgcgcggggaacggtggggccgcagtcgattaaccactgtttgttgtccgcatcgatcacccgcagcgcggaggtattttgcgtgcaggaaaaggcgctcccgcagccaagcacatctattttcatttaccctcgccaaaattttttgccgcttaattaaattgtcataaatacccgacaaagtaggctcatatcatgtcgagtcaacgttgcattttttttacagtcaaatgaacacgtgttcaccttgctaaaaaaaatgccgcagcagcgctttcaggtagcgaatatgagttatttacagatctccggccttaaaattagttatggcgataaggtggttttacataatatcgatctggcggtagagcagggagagatgattgctctactgggcccgtcgggatgcggaaaaaccacgctgctgaacgccctctgcggctttattccggtgcaaagcggcgaggtggctattgccagccgaacgatcactcatcttgcgccggagcagcgcaatatcaccatggtatttcaaagctacgccctgtggccgcacctgacggtagcgcgcaatatcggctatggcctgaagctgcgcaaatggcgcggggcggatatcgcgcggcgggtggcggagctgctgcgaatagtcaatctcgaagggcttggcgaggtgaaagtgaccgaactgtcgggcggccagcggcagcgggtggcgctggcgagagccctggccatagagccccaggtgctggtgttggatgagccgttatctaatctggatgccaaagtgcgcctgaatgtgcgccatgaaattaaatctctgcaaaagagactggggttcacgtcattaattgtcacccacgatcagcaggaagccttagtgatggcggaccgcattgcggtattaaatcaggggcgtattgaacaaaccggcacgccggaagaaatatatcaacgccccgcgacgcccttcgtcgctgattttatgggggccgataataaaataatttccggtgaattatccgctgccgcaatatccggtttatctgccgctcagcagggtgacaacgttatttattttcgcagcgccgatgccgcgctcgctgaattaacgcagcctgcgccgcaggaggggctggctctggaaggcgtggtggagcaaagcgcgtttctgggcaatctgtatcgtcacagcgtgcgctgccatgaccgcctgctgctggcggatgccgcgcagtgctggccgacaaaaagccgcgttcggctccatgtgccaacgccggccctgcatatttttcctttaccactatcacagtgatatcagcgtgttcattctggggacaatccatgttgactaagacgaaagcagcgatcgtaacgaccctcttcctgagccttggcgcacaggccgacaccattctcaacgtcgccaccgcgggcgatcagaatatggtggattatgtaaaaacctggctggggccaaaatttgaagccgctcatcccggcgtcaaggtgcgggtgatcggtaccggccccggcgacgccgggtcgaataaaattagcgagaagctaacggcccagcaggagagcggcgcgcagcagtgggatatcgacgtcgcggtagtgcaccagaaggcgggcggtgagcaggtggcaaagggattgctgcaaaaataccgtcaggatattcagaccggcggcatggtgagttcgccgagcgccacccaggcgctgggcgttaacgttgacggatacgtgatgccgatgttcttaagccagaccgctatcgcctggaacagcgatctggtcactaccccgccggcgtcgtatgacgagctggtggcctggacgcagaaacacccgcaggcttttggctataacggcatcaagaatggcatgtccggcgtcagctttgtggtgggctggatctacgcctacgggaccgacgcccagcgtctctccgccgggccctatgataaaagcgtcgaaaaaagctggcagcaggcctatgagaagctaaaggcgttcaataaaaacgtaactttcaccccgggcaacgccgggacgctcgatatgctgagccggggggaaatcgccatgggcccggtgtgggtcgatatgttctatagctggaaagatcagggcaagctgccgccgtcgatcaagcttgctttactggcgccgggcatgcctggccagccgatgtattacgtcatcccggcgaaggcggcgaatccgcagctggcgcgcgactttatcgcgctggccaccagcccggaagtgcaggcgcaggggatcgtcaagcagttcaactggtatccgggcatcgacgccgggcaggtgaagccgaagctggatacggcgacctggcaaaagctgtttgccgaaatctcgccggaagcgctggcgaagtatggcaaaagcttcccgatcgccccctactttgacgatatcaaagagggttacgaaagccaggtggctaattaaacctttttccagcccgggccgccgtcccgggcgcttgcttgtgctgacgccaggtttattatgtccagttcattaaaatatctgctgctggttgccccggcggcgctgatgatcgcgatcctgtttttgtatccgctggggttttcgctggtctcggcgtttaccgcgccgggacagccgttcaccctcgatcacttccgcaaggtctatgcgctctacgccagcgatgtgctcttttcgctgcttattgtgctgatctcggtggcgctgttagcgctgctcgccattaccctgtcggcagtgattgcgctgtcaccctgccgacccgttgtgcgtttgctgggttttttgtatcgcctgccgctgtttattccttttatcgttgttgcccagatgatgcgcacttttctcgccaaaaatggcctgatgaacaatgcgctggtggcggccgacctggtcacgccgctggagacgctctcctggctgggatggaaagggatagtgatcacctttgtctggaagcaactggcctttgccacgctgctgatctgcggggcgatggcggcgctggagtcgtcgcagatccttgctgcacgtaatcttggcgcctcccggccgcggatcctgttcgatatcatgctgccgcaggtcctgccgactatcggcgtggcgctggtgctgtcgacggtgaccatgatgtcggtgctgtcggtaccgttgatgatcggcgtgggaaccccgacgatgctaaccgtggatatggcgtttcgcgtcaattcctatggtgattacgcggtggcgaatgcgcttggcgtggtgtcgctggcgatctgcggcgcgctgtcgtggttttacctgcgccacagcctgcagcaaaaaggcggtgaatcatgaaagcgctggccctcgtatcaacctcggcatggtgggtgaaagggcgccgtaaagtgcgcgccagtccggtgctgcagaccctgctgctgctgtttatgctgctggcgatgtttggtccgctgctgaacctgttgatctggaccgtagcggaaagctggtattttccccattcgctgcccagccggtgggggctgaagtactggtatcaggttttcaatccatacagcgatgtctccagctcgctgttaaccagcgtgctgatcgctctgttatcggtgggggtctgtttgctgatttccgtacccgccggctatgcgctttcccggcggaaaatgccattacggatgctgttcatgctgctatttcttatcccgcaggcctttcctaacctgacggtatacatgaatgttgcccgattgttttatcagtggggattgaacggcagtatcgcaggggtggtgctggtgcatagcgtccacggcctgatgtattcggtgtggatctgtgtagccgcgttttcagccatcgacccgctgctggcgcgggcgtcgcgtaaccttggcgccgggccagtgtataccttctggcacattgtgctgccgcaggcggcgccggggatcgttgccgccagcatctttgtttttctggagtcgctggatgagtttaccggcactttcttcgtcggggcgccggatatcaccacgctgccgctgctgctctataacgccagcatgtcgggtaactatcaggtctcgtcgattaccgcgctgattttgctggccccatcgctgctctttatggtggtgatccataaatttatgcgtccggagatgatggcgaaattagggaaataagggctgcagaaaacgaaaaagcttcccgtcgggaagctttttaacctcaggtcatcatcattggccattctggcggtgtctgactcatgacttcaatcatcacatctttgatattgccccagattttggcaatatcgagcagggtgataccgagcaaaccggtggcgaaccagcaggcggcggccaggccgaggcagctgcagatcaccgccagaccggcgtaatcgcttttgcgaagctgaatattcagtgagctggcgagaaacatcagtaccgcgctcaccaggggccagcgcaataatacgacactggtagtaatggaagccattaacctatcctcaaagaaagtcgggagccatggacgacctggcgcgactgacgatggcatagcgctctggtctcaactggcgtactagagagtgatgaaacgccatttctgtttcatcaacttgtgtgaactatatcacacttggcgctttattcaccagtcaaaaaatgagcttttgctgcgtttaataactatgaagtttgtgtggatattggtgagcaatcccgggaagcatattttcattcactgcctaatgattattattctgcgggttttattacctgttcttgtttattacacggagaaaccgagtcagatgcgcgtctattcttaatcttgccggaatatcttccgaatacctgataaataagtattattcatcaccatcagaggtaaaactgacgctcgtgagggctgtcggatgtcagctgatgtctatcgcaatcgcgattgctaacgtgttcgggctaccttaattaaggcatatcgcatggatgtaagcgtaaatgggtgacagtgcgccgcataaggcgctaagactcatcggaacaggtttggttattttattgccagtggtgctggcattgtggtttgcccagctgcgggctaaagccgaaaccattgatcaattacactcattttcgcagctggcgctgcaaaaaacggaaatggtcatccgggaagcggatcaggctcgggctaaagccagccagtatcgcggtgagttgtgttcagcggatcaccagcgttatttactgcatattgtgcgcggcctgctgtatgtggaagatctgatctacgctaacggccagcgctttatctgttcaacgtccgttcatcagcaaaccggctggcggatgccggcggctaattacaccaaaaagccggatgtcgcgatttactattaccgggacacgccgttttatccgggctttgccatgaattatatgcagaaggggccctatgttgtggtggttaatcccttctcgtacagctcggtgatcgccagcgaccgcgatttagcctatggcgttttcgataccaaaaccaacctctttttctcggtaagtaacaatgtcgagcccgcggaactccatgcgttaattcgcgaaggcgataccttttttaatcagaatggccgggtgtatacgatcgcccgctccgctattcgccccatcgccgtcattatgtccacctcgcgggccagctactatcacaacttttgtgaccaggccagtctgacgctgccgctggggataatttgcagtattttactggtgctggtgtggtcgcgcacccgccgacagtatcactcgccgcgcaatatgctgcagcgggctctgagctgccgccagctgcgcctgcactaccagccgattatcgatattaaaaataaccgctgcgttggggcggaagcgctgctgcgctggcctgggtttgacggtccggtgatgaacccggcggagtttattccgctggcggaaaatgaaggcatgattgcccaggtcacggactacgtggtggatgaactgttttatgaaatgggtgagtttctggccagccatccacagttgtatatagccatcaatctctctgcgtcggatttccattcggcgcggctgatttcacagatcagtgagaaagcgcacagctatgcggtctgtatcggacaaatcaaaatcgaagtgaccgagcgcgggtttatcgacgtaccgaagaccacgccggtgatccaggcgttccgcgaagcaggctatgaaattgccatcgacgatttcggcaccggctactcgaatctgcataatctgcacgcgctgaacgtcgatatccttaaaatcgataaaaccttcgtcgatacgctcaccaccaacaacaccagccacctgattgctgagcatatcatcgagatggcgcgcgggttgcggttaaagacgattgcagaaggcgtggagacgccggagcaggtaagctggctctacaagcgcggcgtacagtattgccagggctggctgtttgcgaaagcgatgccggcgcgggagtttatgcagtggttagccaatgctcccgcgcccgcgaacgtgcctcagccgccgcgtcacgcggagatctgatggcgatagtcgctgggagtgcggtcaaactcgcggcggaacacccgtgagaaggtttgctgcgagacgtagcccagatccatggcgatatcaaagatcggccgctgggtggttcgcaacgcttccgccgccagcagcaggcggcgctggcgaatatagtcccccagcgtctgatgcatcacggtacggaacatccgctgcaggtaccacttcgagtatcctgactttctggcgactatatcaatgttaagtggttgatcgatatgttcatcaatccattcaatcaaagtttgaataatatcctgatgggacataaagcggcctctctcaattctcgattcgtcgttttgtctgcaggcgagtataattcctcaagttaacttgaggtaaagcgctttatggaaaagaaatcaccccgcatcaaaatgctgttgacgcctggagaagtggcaaaacgaaccggcgtggcggtctcggccctccatttttatgagagtaaaggattgatccacagtcagcggaatgccggcaatcagcggcgctaccggcgtgacgttctgcgcgcggtggcgattatcaaaattgcgcaacgtattggcatcccgctggccactatcggcgacgcgtttggcgtgctgccggaagggcacaatctcagcgcaaaagagtggaagatgctgtcatcgcagtggcgtgaggagctggatcggcgcattcataccctgacggcgctacgcgaccagctcgacggctgtatcggctgcggctgtttatcgcgacgcgactgcccgctgcgcaacccgggcgataaactgggggaagagggaaccggcgcccggctgctggaagacgagtgataaaactaaagcgccacaactgggcgctttagttgttttccggtcttggtctttcgcattatctcgctggttcgcgagagggtttcccccgacgtcgacgtccctcagtattgcgcaatctgttgatggaggttccggtttgcgtcgacactttaactatggcatctgccgtcgctttttcctcactattttgctgaaattttcccggcaatgagcgcctgtttctatagttaatttgaacaaactacgggagaggctcatgctgacggtacatcatcttaatcaatcacgatcgcaacgcgtactgtgggcactggaagagctgcagctgccttatcagatagtccgctatcagcgggagaaaacgatgctggcgccggcggcgctgaaaaaaatccatccgttgggcaaatcaccggtactggaagataacggctatgtgctggcggagtccggggcgatcctcgagtatttgcaggaaacctgggacagcggcgggttgttgaagccgcagggaattgacgacaaactgcagtaccgcttctggctgcactatgccgaaggctcgctgatgccgctgctgttaatgaagctggtgttcgccagccttggcaaaccccctgtgccctttggcgttcgctcgctgggttcgctgctgggcaaggggatacagaaaacgtggctcgatccgcagctggccacccatgcgcggttcattgacgaccatcttgccgcgcggccatggttcgctggcgagcggctgagcatggccgatatccagatgagcttcccggtgatggcattgttggcgcgcggcggcatgcatgaccttgtccatatcgaggcctggcgtcagcgagtggaacagcgaccggcctggcaacgcgccatcgagcgcggcggccccttcaccttacccggcgcctgagatatcagcggatccgatgacgtcgataaatgaaagcaactcactaaaaaattgttagcggattgcgcatagacgataacgtttgcgcatcggctggtcattttctgttcgtcataagcgaaatttagcgaaatacgataaacatcggttgaaaagggttatctaaaggccggataatcgtttgcctttctgtttcgctcccccttttttctgctgtccgggggaggcgataaggttgaccaccgtagtgtatgcgcggagttaaacgtttgcttttttgcggcccccctggcgctgcgattcggtacatggagatcgcgtttaactggcagtggacggtccaccacgcatatcaacgaacgataaaaattttcaggggaagttttctatgtctacgccttcagcgcgtaccggcggttcattggacgcctggtttaaaatttcggcgcgcggcagcaccgtgcgtcaggagattgttgcaggtcttactacctttctggcgatggtgtactccgtcatcgtggtgccgggcatgctcggtaaagcgggcttcccgccggccgcggtgtttgtctcgacctgtctggtagcgggcgttggctcgctggcgatgggattatgggcgaatctgccgatggcgatcggttgcgctatctcgttgaccgccttcaccgccttcagcctggtgctggggcagcagatcagtattccggtagccctcggcgcagtattcctgatgggggtcctgtttacggtgatctcggcaaccggcatccgcagctggatcttgcgtaacctgccgcagggcgtggcgcacggtaccgggatcggcattggcctgttcctgctgctgatcgccgccaacggcgttggtctggtgatcaaaaacccgctggacggtttgccggtggcgttgggcaactttgacagtttcccggtggtgatgtcgctgattggcctcgcggtgatcattggtctggaaaaaatgaaggtgccgggcggcattctgctgaccattatcggcgtgtcgattgtcggcctgattttcgatcccaacgtccatttctccggcattttcgctatgccatccctgagcgatggccagggtaattccctgatcggcagcctggatatcgtcggcgcgctcaacccggtcgtgctgccaagcgtgctggcgctggtgatgacggcggtctttgacgccaccggtaccatccgcgcggtggctggccaggcgaacctgctggataaggacggacagatcatcaacggcggtaaagcgctgaccaccgactccctgagcagcgtcttctccggtttagtcggggcggcgccggcggcggtttatatcgaatcggcggcgggtaccgcggccggtggtaaaaccggtctgaccgcggtgacggtcggtgtcctgttcctgctgatcctgttcctctccccgctctcttatctggtgccggcctacgcgaccgcgccggcgctgatgtacgttggcctgctgatgctgagcaacgtggcgaaaatcgatttcaatgactttgttgacgcgatggctggcctgatcaccgcggtgtttatcgtgctgacctgtaacatcgtgacgggcatcatgatcggtttcgcgaccctggttattggccgtctggtctccggcgagtggcgcaaactgaacctcggcacggtgattatcgctgtggcgctggtggtgttctacgccggcggctgggcgatttaaacccttcgtgctcctcacgggcggctcaggccgcccgttttatttttaagccacatcctgtttccatttgcgttaatctgggtagcgtatgattcacaggcacgacgccttacaggtataaaagaaaacgcagcaaacagggaacacatggaaatattctttaccatcctcatcatgacccttgtggtctcactctccggggtagtgacgcgcgtactgccctttcaggttccacttccactgatgcaaatcgccattggcgcgcttctggcgtggccgacctttggtttgcacgttgaatttgatccagagctgtttctggtactgtttatcccgccgctgctattcgccgacggctggaaaacgccaacccgcgaatttattgaacacgggcgcgagatcctcggcctggcgctagcgctggtggtcgtgacggtggtcggcatcggctttctgatctactggattgtgccgggcattccgctgatccctgcgttcgcgctggcggccgtgctgtcgccgaccgacgccgtggcgctttcgggcatcgttggggaagggcggataccgaagaaaatcatgggcattctgcagggggaggcgctaatgaacgacgcctccggcctggtctcgctcaagtttgccgtcgcggtggcgatgggcaccatggtctttaccgttggcggcgccaccgtagaatttctgaaggtggcgattggcggcgtgctggccgggtttgtggtgagctggtcgtatggccgctcgatgcgcttcctcagccgctggggcggggatgaacccgccacgcagattgtcctgctgttcctgctgccgtttgcctcctatctgattgccgaacatatcggtgtctccggcatcctggcggcggtagcggcggggatgaccatcacccgttccggcgtgatgcgcaccgcgcccttggccatgcgcctgcgcgccaacagcacctgggcaatgttggagtttgtcttcaacggcatggtcttcctgttgttgggcctgcagctgccggatatcctctccagttcgctggtagcggcggaggccgaccccaacgttgagacctggatgctgtttaccgacattatcctgatctatgccgcgctgatgctggtgcgttttggctggctgtggtcgatgcgtaagctcagtcagcgcttcctgaagaagaagccgatggagtttggctcctggaccacgcgcgagctgctgatctcctccgttgccggggtgcgcggggcgattaccctcgccggtgtgctctccattcctctgctgctgccggacgggaatgtctttccggcgcgctatgagctgattttcctcgccgccggggtgatcctgttctcgctgttcgtcggggtgattgcgctgccgatcctgctacgtcacattgaatcgagcgataatgtgcagcagcggaaagaggagcgtctggcgcgcgcggcaacggctgacgtggcgattgtggcgatccagaagatggaagagcgtctggcggcggataccaaagagaatatcgatacccagctgctgaccgaagtcagttcgcgggtgatcggtaacctgcgccggcgcgccgatgggcgtaacgacgtggaaacctctatgctcgaagagagtctggaacgccgcttccgcctggcggcgctgcgctctgagcgcggcgagctgtatcatctgcgcgccacccggcagatcagtaacgagacgctacagaagctgctccacgatctcgacctgctggaagcgctgttaatcgaagatcaataacctgtaatccggatagcgcgacgcttattcggactactggcgagactgcagtaaatgtgtagccccggtaagcgttagcgcgaccgggggaaacccgggcagcggcgcaagcgcctgacccgggctaccccttcccttgcggaacgcgttgtcaccagggaattattccagccagaacgctttgctgcacgccagccaggcctcagcgctgcgcgacatatatacgccttcccgccaaatcatccccagctcccagcgcagctcgctttgcaacgggatccagcaaaaattctgccggtcgagacgctggcaaatcggttccggcaggatcgctacgccaatgcccgcctgcaccatggcggcgagaaaatcccactggccgctgcgcaccgcgatacgtggcttcacgtcatgctcggcaaacagccgcatcagctgctggctaagggcaaattcctcgttgtagataaccagcggatgcgacgccagctcggccggcgagagcgaggttttaccttcccactccgcggtccttggcgtcaggacgcacagcgggtgattgaacaacggcagaatggtgaggctgctatcctcctcgacaggcagggcggtcatcgccatatcaagttcgccattgctgaccgcctgctggaccgtcaggccgccaaactcggcgatcttcagctcgacgcccggatagcgctggcggaagcgactgatcggctcggccatcagcatcccgaccatcggcggaatgccaagccgcagcacccctttatgcaggtggttgatatcgctcagctctgactccagctggctgaactcgcccaagatcgcctggccgcgttcaaaaacgacgcgcccggtatcggtgagcagtagtttgcggccgtcgcggatcaatagcgtgcagttcagctcatcttcgagattcttgagcatcttgctgatggtgggctgtgtgacaaacagcttttccgccgcgcgagtaaaactctgctgacgaaccacttcaacgaaatagcgcagcgttcggatatccataattattccctgagactatacctgcgatgattttaattcatttctgtccgcttcggcggctctctatactgctcgcctgacttctttttttcaggactatcgcacatggccttcgcgccagctcgcgttgcccccgccgtggcgcaacgacttcagatcccggtacaggtacttctctacgtcgggttattcatcttcgcacaatatctggtgaacaggtggcaggtaccgctgccggctaacctggtcggcatggtgatgctcctgctgctgatcgtctgccgggtgataccggtaagctgggtgcgcgccggcgcccgctggctgctggcggagatgctgctgtttttcgtcccggcagtggtcgcggtggtgaactacgcccagctgttgatggtcgatggttggcggatttttctggtgattgccttaagcacgctgatggtgctaggcgccaccgcctgggtcgttgacaaggtctatcgttacgaagtgggcaggttaaaaaaatgagcgatgccgtactgagtatcctgtgcctggtggcgacgctggtcctctattacgccaacaaaaaactgtatcgccgttttcataaactccctctgatgccgctggtgttcacgccgatcctgctggtgctgattctggtggtaggccacatctcttatcagagctatatgggagagacccactggctgctgtggctgctgggcccggcgaccatcgcctttgccgttccggtgtatgaaaatgtcgcggtgattaaacgccactggatgtcgctcagcgccggggtggtgacggcggtagtggtggctgtcaccagttccgtatggctggcgcgcgggtttatgttgtctgatgaaattcagcgtagcctggcggtgcgctcggtgaccacgccctttgcgctggcggcggcgaaaccgctcggcggacaacccgatctggtggcgctgtttgtggtgatcaccggcgtgtttggcatggcggtgggagatatgctgttcttacgtcttgctatccgggaggggatggcgaaaggagccgggttcggcgcggcttcccatggtgcgggaacggcgcgctcgtatgagctgggccagcaggagggcgtggtggccagcctggtgatgatgctgtcaggcgtagtagtggtgctggctgcgccggtcgtccgctggctgctgttttaacattatcgccagagtgaatgttaataaatattgaggagaggaatagctatcggctattccctgtttttgttattgatgcatttaacggttcatcataaaagattaagccaattcttatatcagcactgactttgtaactaaatgtttctctgcatgcccgtatttaattatggggtaaatattatataaatatccaattatctttgcgaattttataactttataactgtttgatttttatggttttgaatatgaccacgcatgcgttgcgatgttatatcgcaaaaaatcaatttttacattaataattgagttcttacctcatgctagttattatttttacgcgagcttgtattattgaatggattcaaatgctggtcgtttatttatgaataatattaattgtcataaaccatatgtcatgtaaatacatgcatgacgccgcgctgcttgaatttcattctctaatatcgctgcataaaacaattgacggactgattgtcgtttataatggatatgggaataaatatgaagatgagtaaaaaatttctggcgggtgccctgattttctctgcctgcagcgcgctgtctaccgttgcgcaggctgataacaccattacctttaatggtattgtttccgataccacctgtacggcgaccattgatggcggtgtaacggctattgatatgggcaccacctcagtggcggatctgaaagcgtataccttcggcgctgccaagaacttctcctttagcttagctgattgcccgaccgcggaagaaggtggcaacagtatcgcccgcgtcacttttggcggtgtttccgataccgcgaacagcgattattttaaaaaccaggcaactgatgagccggcaaccggcgtcgctgtggcccttttcgacgaagcgggcaatgtgatgaagaataacgaagagggttctgatgttgatatctcttcgggtgcagcaaccattccgttcaccgttaaaatggtgaaatcgggtgatgccgatccgacgaaaggtaccgttcagacaaccgtgacttataacgtgacctatcattaattcggcttcttgttgaatggagaaaggggaatcgcctgctattccccttaaattaaacatatgagatatcctttttttgcgatcggtttattgctgtcttcttccttcgcgcaggccagcgtggtcgttggcggtacgcgtctggtttttgatggtacgaaaaataacgctgtaataacggttgagaataaagatcagaacagcaatatcgttcagtcctggctctcggtggttgatgcagcctcacccgccaaagacgcatttattattacgccgccgctgtttcgtctcaaagccggggagaaaggatttgtccgcgtagttcgatcaggaaagaaattacccgacgatcgcgagtcgatgttttggctcaatattaaagggatcccggcaacagaatatgtacctgataaaaatgtcgtacagtttgcgattaattcgaaaataaaattgatttatcgacccgctgcgttaaaaggtaatacaccggaagcgtacgctgaaaaattacagtgggggaaagaggggacgtcggtgacggtaaaaaataactcaccgctgtatatgaatttctcacaggttagccttaacggtaaaaatatttctggcgcatggtttgctgccccgttttccactttaaaaatacccgtgaagagtagcctgtcggcgacaggaaaaaaagagatcacatggagcgtgattaatgattatggtatgtcagggaagaaatataccgctatcattcagtagcgttgagctgctattttcaactaaaagtatctgcgtcgctattattctgtgcctaagtactctaccctctcgcgcggaggccggcgaatatttcaacccaaatttactcgaagtcgctgagagtcctgcggcttcggttgatctatcctatttttcgcaagatggcataccgccgggcacctatcacctggatgtttacatcaacgataagtacgtcagttcagactcgctgacttttcaggaaattagccatgacgcaggcgcgactgcttctccctgcctgtccgcggagtatctgaattcatggttgattaataccaccgcctatccgcagttgttcgaggcaggggaaacctgcgcccggctgtcggcgatccccgggatgacgttctcggtatctcttgcccagcagcgcattgattttaccgtgccgcaggccgccatgctgaatcgccccagagactatattcccgagagccagtggcaacaggggatcaatgccggtcttctcaactatagcgtcaccgggcagcgtaatgcgccgcggcataacggcgccactatcgacagtcagttcgtcagcctgcagccagggctgaatctgggaccatggcgcctgcgcaactacagcacctatagccacagcgataacaacagccgctgggagtcggtttactcctatcttgcccgcgatattcacaccctacgcagccagctggtggtcggtaatacgtatacctcttccggcattttcgacagtttgagttttaccggtctgcagctcagttcggacaaagagatgctgccggatagcctgcatggctttgcgccgacgattcgagggatcgcgcgcaccaccgcggaggtctcggtttatcagaatggttacagcatttataaaaccaccgtcgctcccggcgcctttgaaattaacgatctgtacgccaccggcagcgccggcgacctgtacgtcaacattaaagagtctgacggcagcgagcaaaactttgtggtgcctttcgcgtcgctggcgatcctgcaacgtgagggccagctggactatgcgctgagcagcggcaggacgcgatcgggtagctccgacgataaagaatataactttattcagtcttccctggcctatggcgccaccagcaacatcactttttatactggtttccagcaggcggaagataaatacaccaacctgttgttaggcgctggctttaacctcggtactatcggtgcgctgtcgtttgatggctctcagtcgtgggccgacgtgaaaaccagcgatacggccttgtcaaccagtacagagcaagggcaatcgtatcgcgtccgcttcagtaaaagctttctgcagacgggcaccagcttttccgtggccggttatcgctactccacctcgggatattattcgtttcaggactttgtcgataactcttccacacagcgcgactgctgtacgcagagcggcagaacgaaaggccggtttgacgcatcgttgtcgcagacgctgtttggctatggttcgctctcgctttcgttggtcaatgagacctactgggacagttcgcgtatggaatcggtgggcgtgggctatagcgggtcgattggcaaggcctcctactttattaactattcctataaccgcaatgtgcaaagcaccgatgacagcagcaataaccggccggccagcgatacggtcgtctccctgacgttaagtattccgcttggcgagacgctctcggcaaattacaccatgaaccatggtcggcataacgataccacgcacagcgtggggctcaacggctcggcgtttgaggatcgttccctgaactggagcgtactggaagggtacaacacgcaggataaaagcacctccggcaacctcagcgtcaactaccagggctcgaaaggggatgtggctggcggctatggctacgaccgctacagcaatcactacaactattcgctgcgcgggggcatggtcgcccatacgggcggactcacgctatcacgctttcttggcgagagttctgcgctggtcgaaacgcctggcgtcagcgatgtgacagtgcgcggtcagacaaacgtgacgacggatgccgccggatatgcggtggtgccttacgtccgtccgtaccatcgtaacagcctggcgctggatgaacaggaaatacctggcgctgaagtggataacgtcgccagaacggtggttccgacgcgcaatgcgatcgtcaaagtgaagtacgacacgcgaattggctataaggcgatgctcaccctgcgtacccgcaatggcgtggtgcctttcggcgcgctggtgaccctcgataatgatcacggtagcgcgtcgcgcagcaatatcgttggcgatgaggggcaggtgtatctaacggggctgcagaaaaaaggccagctgttagcgcgctggggggagaaaagcagtgagcagtgcaccgttcattatgacttctccggcatggcccttggcgacgatattctgttctatcaggccgaatgtcggtaatggatgcaggttttcaacatggaagaggggctgatatgaatatgcgagacggcagcacaaggggcctcctggtggccattttgctgctctcccttccggcgctggcttatgagggcagcagcacggtcaattttaacgtcacgggcaccatcgaagcgccttcctgtgaggtggccgtggagccgtcgaacagtatcgatttaggcaccgtctcctcgcagacgttctccggacatgccggggcgagcggcgccagcgtgccggttaagctggtcttttccagctgttccgccgatgcgtcggcggtgaccatcgcgtttagcggcaccagcttcgatagcacccacgcttcaatctataaaaacttccagactggcagcaacggtgccagcggcgtcggtttgcagctgcagagcatggccgaccagcagccccttggccccggcgaccagtatctctatacctttggggacgatgcggatatccatacctttaatatggtggcacgtatgttttcgccttatggccaggtaaggtccgggatggtcgggtttaccgccacgttcgatgtggcttacaaataacgtttcgacagggatgggtatgaaaaaactgatcttattgctcatattggcactgtgtcccgtctatagctgggcggcctgcacgggaaccaactatggcgatgtctcgatgaccaacctgccggaaaagatcctggtcaatgccgggagctataccgcagggacggtactgtatgactcggggaagattacgcgctcgcaaacggaattgcttaactgtgaggggagcacctacgcggtttttgcctggtcctcgaacaatgccggggcactgataggggataatatctatgccacctcggtgcaggggatcggtatccgcgtcaaggtgtggctcaatatcagcggtgaatatggcgatgacaccgatgatttcagccccgactcgcaggtgcattatattggtgatgtgaattattacctcggaaagccgacaggtcttttcgactctttcgcgtcgactcattataccccggcgtatcagctgcagctggtggccaccggcggcgccatcgccagcaagagtcaattatcgttcagcgacccggtggccacggtatcggccaaggataaaaaggggaccatcgctatttcacaactgcacatcagcggcacaaccagcatccagctaatcccgatggggtgtattgtcggtagcaataatctcagtttttccatgggcagcatcaatgccagtgagtttaataccgcgacgaaggtgggtagcgcgcggcagtctctgagcctctcctgcgagccgggaactaacgtttcgatgcgtgtggcggctgcttctgcaagcggggataaccctgacaatacggtgatggccctcacggcggaacagaatgccgccactggcgtgggagtgcagttaaatttgaatggcaaagcactgccgttaaataccgatatcagcctctatacttcgagccgcacgacggtgaccaacagcggcgcggacgccagctacagctatttcaccaatcccgacagccccggaggcgcagcggccatgcagacgctcgctttatccactaactattacaggacggggagcgcggtgaccgcggggacagccaacgccaccggggtgatcacctttacttataactgaggggagaatcccttccccgaacgatgccggggaagggagaggacgattaatgcgcctggccgcgttcgataccgatcccggtttgtgaacggataaactgggcgcggaactgctcgcgctcgcgcatcccttccggtgagttatcggtggcggagaagacccagatgccaatgaacgcgatggcaatggagaacagcgccggatattcatacgggaacagcgctttctcatggccgaggatctgcacccaaatggtggggccgaggatcatcagaatgaccgcagtcagcaggcccagccagccgccgaccatcgcgccgcgggtggtcagcttcgaccagtacatcgacagcagaataatcgggaagttacagctggcggcgatggagaaggccaggccgaccatgaaagcaatattctgattttcaaacagaatacccagcagaatggccaccaccccaaggatcagcacggtgatcttggagaccttcagctcctgacgctcggtcgcgcccttgcggaagacgttggcgtacaggtcgtgcgacaccgctgacgcgccggcgagggtcaggcccgccaccaccgccaggatagtggcgaaggctaccgcagagataaacccgaggaacaggttgccgccaaccgcatccgccaggtgcaccgccgccatgttattgccgccgataagctgtccggccgcgtctttaaacgccgggttcgcgccgaccagcatgatggcgccgaagccgatgataaaggtcaggatatagaaatagcccataaaaccggtggcgtagaagacgcttttacgcgcttctttggcgtcgctcacggtaaagaagcgcatcagaatatgcggcaggccagcggtaccgaacatcagacccagacccagagagagcgccgatatcggatctttcaccagtccgccgggactcataatcgccgcccctttcgggtggacggccatcgcctcggtaaacaggttattgaagctgaagccgacgtgcttcatgaccataaaggccataaagctggcgccgcacagcaacagaaccgctttaataatctgcacccaggtagtcgccagcatgccgccgaacaggacatagagcaccatcagcacgccaaccagcactacggcgacatggtaattaaggccgaacagcagctggatcagcttgccggcgcccaccatctgggcaatcagatacagggccaccaccaccagcgaaccgcaggcggagagggtgcggatcggcccctgcttcaggcggtaagaggcgacgtcggcaaaagtgtagcggccaagattgcgcagacgttcagcaattagaaacaggataatcggccagccgacgagaaagcccagcgagtagatcagcccatcgtagccggaggtatacaccagcgcggagataccgaggaacgacgccgctgacataaagtcgccggcaatcgccagcccgttctggaagccggtaatattgccgccggcggtgtagtaatcgctgcgcgaacgcacccgttttgaggcccagtaggtgatgtacagcgtcagggcgacgaaaatcaggaacatgacaatcgcctgccagttggtcggctggcgctgtaccgcgccggtaatagcgtctgcggcgtgggcgccgaggggcagcagcgtggcggcgagcgccgtcaggactctcttgatcatgcttttacctcgttgagaacgcttttggtcaaacggtcgaattcaccgttagctcgccagacataaataccggtcaggataaacgaaatgacgatcacgccaatgccgagcgggatcccgcgggtgacgctggttccggcgtgcagcggggtgccgagccagccgggtgcaaaggcgataagcaaaataaagcccacgtagatcactaacataatcactgacagaatggcggcaaaccgttgccgtgatgcaactaactccctgaaatgcgcactattttctatccgctgacaaagttgttcattcatcttagcgtctccagaggtctccctttcgtcatccactcggcggacgctggcgacagcaacccctccggcgacggagccgggacaggtgttgctgacggcgttcctgcgagtgaaatcctgggggagggacttatttttatcctctccccggaaggggagagggtgtagggaatcggtctttacttacgatggcatggtaatggcctgcttctcttcgagcagtttttccacgacgccaggatcggcgagggtcgaggtatcgccgaggttgctggtgtcgcctgcggcaatcttacgcagaatgcggcgcatgattttgcccgagcgggttttcggcagcgaatcggtccagtgcagcacatccggcgtcgccagcggaccgatctctttgcgtacccagttacgcacttcggcatacaactccggcgtcggttcttcgccgtgattgagcgtcacgtaggcatagatggcctggcctttgatgttatgcgggatccccaccaccgccgcttcggcgatttttgggtgcgacaccagcgccgattcgatctcggcggtccccagacggtgtccggagacgttcaggacgtcatccacccggccggtgatccagtaatagccatcttcatcacgacgcgcgccgtcgccgctaaagtacatatttttgaaggtggagaagtaggtttgctcaaagcgctcatggtcgccgaacagggtacgcgcctggccgggccaggagtcggcgatggcgaggttgccctcggtggcgccatccagcggcaggccttcgttatccaccagcaccggctggacgccgaagaacggacgcgtcgcggagccggccttcagctcaatcgcgcccggcagcggagtgatcataaagccgccggtttcggtctgccaccaggtgtccatcaccgggcacttctcgttaccgatcttcttccagtaccactcccaggcttccgggttaatcggttcgccgaccgagccaagaatgcgcagcgaggagcggtctgtgccttcgatagctttgtcgccttccgccatcagggcgcgaatagccgtcggggcggtatagagaatgctgaccttatgcttatcgacgacctggcacatgcgcgccggcgtaggccagttcggcaccccttcgaacatcagggtggtggcgccgcaggccagtgggccgtacagcagatagctatggccggtgacccagcccacgtcggcggtgcaccaataaatatcgcccggatggtagtcgaaaacgtatttaaaggtggtggccgcatagaccagatagccgccggtggtgtgcagcacccctttcggtttaccggtggagccggaggtatagaggatgaacagcggatcttcggcgttcatttcgacgggccggtgttcggcgctggcgttcgcaatcaggtcgctccaccacagatcgcggccttcctgccagtcgatattgccgccggtgcgtttcaggaccaccccgtgctcaatgcttttcacgttcgggtttttcagcgcgtcatcgacgtttttcttcagcgggatggcgcgaccggcgcgcagcccttcgtcagccgtgatcaccaggcgtgagctggagtcgataatgcgtccggccaccgcctccggcgagaagccgccgaaaatgaccgagtggattgccccgatgcgggcgcaggccagcatcgccaccgcggcttccggcaccatcggcatatagatagcgaccacgtcgccttttttaatcccgaggtcgagcagcacattggcgaaacggcacacgtcggcatgcagttcacggtaggtgatgtgcttgctttggctggcgtcgtcgccttcccagatgatggcggtttgatcgccgcgttcggcgaggtggcggtcgagacagttagcggcgaggttcagggtaccatcttcataccatttgatggaaatattacccggtgcgaaggaggtgttctttacacgggtatagggccgcatccagtcaaggatcttgccctgctcgccccaaaatgtatcagggtcggttatggattgttggtactgcgccttgtactgatccgggttaatcaggcaacgttccgcaatattagcgggaatagggtgtttgtgaatttggctcatggctttttttctcctttgaacttgttaaatatatgtcaaacaaacgttaagagtaggggttttgacagctttgtttgttaattggggggcagatcacgcaatgattaaactgggtgaaatttcatcaaatgaaactttgaagcgaaataattacgcaaatgaatttatagaaacggaagctgtgaaattttttttattacaaatacttatgcaatataactgggggaaattcgctgctttatgcataaaagcagaggaaagccctgttcttaaaggcttgcgcagcatgccgtgcaaatgatactgatattgcgcgttaaataaccccacaaagcaacgcaacacaattcataccccctgcagtgggtaccatgacgaaaaggaatggtgcctttcattgaggaagtcagtagtgaagaaaacaaaaaaagtcagtctggcctggcaaattttgctagccctggtgctgggtatccttctgggcagttatctgcattaccacgctgaaagtcgcgattggttaattagcaatttgctgacgccggcgggcgatatctttatccatctgattaaaatgatcgtggtcccgattgtcatttcgaccctggtggtcgggattgccggcgtgggtgacgccaaacagttagggcggatcggtgccaaaaccattatctatttcgaagtgatcaccacggtggcgattgtgctgggtatcaccctggccaacgtcttccagccggggacgggcattgatatgtcgcagctggcggcagttgatatttcgaaatatcagaacaccaccgccgaagtgcagagccatgcgcacggcctgatgggcaccatcctgtcgctggtgccgaccaatatcgtggcatcgatggcgaaaggcgatatgctgccgattatcttcttctcggtgctgtttggcctggggctctcctcgctgccggcgacccaccgtgagccgctggtgacggtcttccgctctatctccgagaccatgtttaaagtcacccatatggtgatgcgctatgcgccggtcggggtattcgccctgatttcggtaaccgtcgccaccttcggtttcgcctcgctgtggccgctggccaagctagtgttgctggtttactttgcgatcctgttcttcgcgctggtggtgctggggattgtcgcgcgcctgtgtggtctgagcatctggatcctgatccgcatcctgaaagatgagctgattctggcttattctaccgccagttcggagagcgtactgccgcgcattattgagaagatggaagcctacggcgcgccggcgtcgatcaccagctttgtggtgccgaccggttactccttcaacctcgatggttcaacgctgtatcagagcatcgcggcgatctttatcgcccagctgtacggtattgacctctctatctggcaggagattaccctggtgctgaccctgatggtgacctcgaaagggatcgccggcgtgccgggcgtctccttcgtggtgctgctggccaccctgggtagcgtcgggatcccgctggaagggcttgcctttattgccggcgtcgaccgtatcctcgatatggcgcgtaccgcgctgaacgtggtgggtaatgcgctggcggtgctggttatcgccaagtgggagcataagttcgatcgcaaaaaagcgctggcctatgaacgcgaagtgctgggcaagtttgataaaaccgcccaataaaacacaaagcccggcgcgatagcgccgggctttttcttatcctttactaatccggtcaaactcttcgcagccggtatcaaacccctccaggcaactgacgttgagccagtgcagcgccttctgcttattcggttcgataaagcctttctctccctgctggaacatcatcccggcccagtattcggcatagccggtgcgggaaagtgatgaactgcctttaaagtattcacttgctttcacatcatcctccgggccgtgtacgccgctggcgtagatcagccccagcagcatctgggcatctaccgccgcatcgctttcgctatcccgggcagcatcctgcagcagcgtgatggcgtgcgctacgtcggtggcgccagcctgacggttgaccagcacccgcgcgaggacgatctctccggatttactgccggcctcgacggctttttccgccagctggcgggcctgcggatagtccgcctgttgggggttacggattttgagctgcgccagcagcgccaacgcatcgccatcgccctgggcggccgccttctgcgcccagtattcggctttttgataatcgccggagctgacccaggtatcggcaaggtaatattgcgcgcgtcgatcgccggcttcggcctgctgttgatactgactgccaggttcggtggcgaccgctgcgccgctggtgaaaaccagtagaaataaaaagaggtatttcatttgtatttattatcagtaaggaacatagcgcgcagtataaagggaggcgaaaaagaagaaaatggcgggtatcggtaggtaaggccgatttgcgctacctgaccgtaggcccgcgcaagcgcagcgccgccgggcgacagactgcggacacggagccgcttgtgtgccgggtggcggctgcgcctgacccggcctacgcatcgcgcgagccgggtcagaccgccgaaccttaacccatcgcgctttcgcgcaggcgggatttcagcttgttgtactcgtcgatcacgtactgttccgcggcgcgctgatcggcaatccgctcaacgttgaccgcgcagtacttgtactccggcgttttggttatcggactcaggttctctgagaccagctcgttacaggcgccgatccaccactggtaggtcatgtacaccgcgcctttattcggccgatcgctgacctgcgcgcgggtgatgatgcgccccttacgcgaattgacccataccagctcttcatcttcgatgcctagccgttcggcgtcggcggtgttgatttgcgcatagcctggttcatccgccagcgccgccagcgccgcgcagttaccggtcattgaacggcacgagtagtggccgacctcgcgcaccgtcgacaataccatcgggtactcgtcggtaagcttatcgatcggcgcgacccagtcgcaggtgaagaactgcgccagtccgttcggggtatcgaacttctctttaaacagatacgacgttccctgatcggcgtcggactcatcgcggcacggccacatgacatagccgagctcacccattttctcgtaggtggcgccgtagaagtccgggcacagatgccgcaactcgtcccagatctcctgggtgttattgtaatgcatcggatagcccatccgggtggcgatttcgctgatgatctgccagtcggttttcaggtcccacttcggctccaccgctttaaagaagcgctggaagccgcggtccgctgcggtatacacgccttcgtgctcgccccacgaggtggacggcaggatgacgtcggccgcggaggcggttttggtcatgaaaatgtcctggacgataaccagttccagatcgtcgaacgctttgcggaccgccgagagttcggcgtcggtctgcagcggatcctcacccataatgtacgccgcccgcacttcaccgtgcgccgcgcggtgcggcaattcgctgatgcgatagccggtatgcgcaggcaggctttccacgccccaggctttggcgaatttctcgcggttctccgggaacttgacgtactgatagcccggataggtatccggtagcgcacccatatcgcaggcgccctgaacgttgttctggccgcgtaccgggttgacgccgacgctcggcttgccgaggttgccggtgaggatcgcgaggctggtcagcgaccgcaccgtctccacgccctggtagaactgggtgacgcccatgccccacaggatggcggcggatttggcgctggcatacatccgggcgcaggcgcggatctcctgggcgctgaccccggtgatctcctccaccgactccggcgtatagccttcaacgattttgcgatactcctcgaagccttcggaacggctggcgacgaaggatttatcgtacagatcctcttcaataatcacgtggccaatggcgttgagcagcgcgatgttcgagccgttcttcagcgcaatgtgcatatcggcgatgcgcgcggtttcaattttgcgcgggtcgcagacgataattttcgccccgttgcgtttagcgttaatgacgtgattcgccacgatagggtgggaatccgccgggttgtaaccgaagataaacaccagatcggtgttatcaatctccgtgatggcattactcatggcgccgttaccgaccgactggtgcagacctgcaaccgaagggccgtgtcagacgcgagcgcagcagtcgacgttattggtaccaataacggcgcgcgcgaatttttgcatcacatagttggtttcattaccggtgccgcgggaggagccggtggtttggatcgcatccgggccatatttggctttaatggcgctgaggcgggtggcgacgtaatccagcgcctcgtcccaggagacggcttccagcttgccgccgcgttgacggcggatcatgggggttttcaggcgcggcgttaggatctgggtatcgttaatgaagtcccagccataatagcccttcaggcacagggttccctggttggttttcccctgcgccgcttcagcccgaacgattttgccgttatcgaccaccaggttgattttgcaacctgatgcgcaatacgggcaaaccgtgacgacttttttcatcggtcttgctccagttattcaatgggcgcgtttgcgctatcgcgccgtcactatgcatcttctatgccatattttcattgtgggtattccttgatgatacgcgggttttttgggcggaatgctgacgaaaaacagcctgtcgacagatttgacgtgtcgataccctggagatgtgacggcgcttgaaaaaatgtcaccgggagaggaatttgtcggcgcaggcttgcagaatcgatcagactgacactaattcccggcgggcagaggcaaaaatgaaaccagtcattttagtggtggatgatgacagggcgatgggcgagctgctcagcgatgtgctcggcgcgcacgcgtttgaagtgcttgtcagccagaccggcaacgacgcgctgacgacggtggcgcagcgggcggatatcgcgctggtcttactggatatgatcctgccggatacccatggcctgcaggtgctccagcagctgcagcgcacgcggcctgagctgccggtggtgatgctctccggtctgggcagtgagtctgatgtggtggtgggcctggagatgggcgccgatgattacatcgccaaaccgttcagctcgcgggtggtggtcgcccgggtgaaagcggtactgcgacgcagcggggcgctggccggcgaggcgtcgggcgccggtgctggcctgacgtttaacggctggcggctggataccacgcgctgtgaactgtataacccgcagcagcaggcgatcccgctgacccagggagaatatggcctgctgctggcgctggcgcagaacgcgcgccgggtattgaatcgcgaacagctgctggcgctgacccataacgaaagcaccgaggtattcgaccggaccatcgatgtgctgatcatgcgcctgcggcgcaaaattgagctcaacccgcatcagccgacgttgattaaaaccctgcgcggtctgggctatgtcttttccgccgacgtgacccacagcgagaaggcggcgtagggcgggtttgctgccaacccgctgttgactttatttggcgcagggagtttactttttttattaaagtgacactctgggttaatctatggcaacaaaattaaactggctgctgcaaaacagcgctcccggagatgtgatccttcagtcctggttaagccagcatgccatctctccctctctggcctttaaatacgcgcaaagtggctggttaaaaaaaagaggcaacggcgtatatgcgcgtgcgggacgtgagccggagtggaacgatgcattagcatgtttgcaaaatcagcttgccgctccggtgtatgttgcggggctcagtagcttagtctggcagggccgttcacactatctacagctaaaacaaaaccagtgctggcttagtgtggaaaataaagcgctgctgccgaaatggttcagggaattcccgggtgtggagtggatagtcatatcggggaaaaaactgccggtgctggatgatagataccgtgtaacgcttgatataaaagggaaaaaactcatcggcagtgcgccagaactggctgcttacgagttgctgagcgcggtgccggggaccctctcatttaaccacgctgcagagcttttccaggggctggttaatcttaatcctcgtaaagtagagtatcttctttccgtcagccagtccgtgcaggccaagcgtttgtatctcttcttcgccagtttttacgagcatggctggctcaaacgaatcgatagccaaaaaatcgatctgggagcgggcaagcggcaaatcgtggaaaatggaaagttcaatgctcaataccaaatcacagtgcctgaacgctttcaaaaggaataaaaaatatggatatacaggcgccttattatcggcaggttgctctgctaatgcaggttttaccctatgttgctgtcgaacgggaatttgcgctgaaaggtggcactgccatcaatctctttatccgcgatttccctcgattatcggtggatatcgacctcgcctgggtgcccctggaaagcagagccatcgctttacctcatatacgggatgcgcttgcacgtattgccgccaatctgcaacaacaggcaggtatgagcgctgtattacaagctaatcgttcagatgagatgcgtgtcattgttactaccgatagcgcgcaaataaagatagaggtttcaccggtcgcccggggaacattatatccaccacaggagcgagaagtggtgggggcggtagaggacgtttttggctatgccagccttccagtggtttcgttgcctgacctctacggtggaaaattatgcgcggcgctggatcgccagcatcccagagatttttatgacgtgaaattacttcttgatgcgcaggagcttgaccgtcccattttcaatgggtttatcgcgtatttactgagccataatcggcctctggttgaagtgctgagtcctcgctggaaagatattgctgaacctttttaccgtgaattcagcgggatgacatttgagacgatagccctggaggaactgacagcagtccccaacaggatgattgctgcgttaaaatcctgtttcacacaacaggatgtcgattttttactgtcatttaaacgaggcgaaccagactggcgtttagcgccggaaatgcgtattcaggatttgcctgccgtgcagtggaaattgcgcaatattcatcagatgccagcgataaaacgcgctgagtcattagataaactggaaaaggtgctggccgagtggcgcagttagttacctggcccgcccttgttgaactcagcgtaaaacaggcgtgatttgaataaaccgtatcccttttctcgccatgacacgccgttctcctgtggcatcgccctgatagcgggatctactcgatctaaacattctgcaactgaataaacgcctgcagctcagggagcgttttggcgccgtcgatcgcgttggcggcctgcaggccggcgcagaaggcgtcccccgcgccgacgctgccgataatctcctccggcggcagccgccatgacggtacccagcgcccggcttcggtacgggagacgccccatgccccctccggacaatggatcactacccgctggcgtacgccggcgtcaagcaatgcgctggcggcgcgggcgatattggcgacgtgcggctcgccgttgggtagacgaatctccagcccgctaaactcgctggcttccagttcattgatggtcaggtagtcaagatgcttcagcgccggcaggaccagcggccggtagcgcgggtcgcccttgcgcgacaccagatcgagggacacctcatagcctcgctcgcgcatctgcgccagcagtcgcgcgctgcgggtgccgtacacttcatcggggcgatcgaggctttcgagcagcagcagatagccgagatggaaaattttcagcggcgcatccagcggctcaaaagccgggagatcaagcaggcggttggcgccgggagagtgaaagaaagtgcgctggccttcggcgtcggtcatcacctgggtcatcgaggtgggggaggagctggtgcgctgtacgagctggcgattgatatggtactgatcgagcatggcggtgatgtagtcgccatcgttatcctcgccaatcaggccgaccgcctgcagcggcagcccggcgtgcattttggccagggtcagcaggacattcagcggcgcgccgccggtggcgcgttcgctatggacaatttccaccagccagccgcgctccggccactgcccgatctggtggacatgatcgaccagcatgttgcctgcggcaataatgcctttccgttccatgatcgctactccgcgccgtcatattcgttaagcgtagcgcacaatcggcggaacgattgtgcgccgggttgcgcttatttcacggtccagcctttgtaagagctgacgttatttttgtcgatcatcgtcaccgggatcagtaccggcgcggtcggcgcaggtttgccctgcaggatgtcgtagccaatctccactgccttcgctgccatcacctgtgggtcctgcgctggggtggcgacgaacagcgagttcttacgcttcagcgcctcttcgccgtccgggctgccgtcgacgccgacgatgaagaactcgctgcgctgcgcctgtttcgctgccagatcggcaccaatcgccgtcggatcgttgatcgcgaacacgccgtcaatcttcggattggccgccagcagggaggtcatcacctccaggccgccttcccggctgcctttggcgttctggttggcggagaggattttaatgtccgggtgttttttgaactccgtttcgcagccttcgacgcggttttgtacggcggagaccggcggcccgttgatgatcaccacgttgcctttgttgttcaggcggtcgctaatgtatttacaggccagctcgcccgcctgggtgttatcggaggtgatggtggcgtcggccccttcggcggcgacgtcaaccgccaccaccacgatcccggcctctttggcccgcttcaccgccgggccaatgcctttcgaatctgcggcgttgaggatgatcatatcgactttggcggcgataaagttatcgatctgcgccacctgctggcccagatcgtagccgctggagaccagcgtcactttgacgttatcccccgccagcttgcgggcctccagctccgcccctttggtgatctgtacaaagaacgggttggcaaggtcgcccaccgtcacgccaatcgctttcagctctttggccgacgcaaaaggggaggcggccagcagcgcgccagcacacagcgcggtgactatcggttttaaacgcattcgcttttcctcgcaggtaagatgttgttgttatgcactttgatgatgtcgggtacggtatttgtcgatcagcaccgcaatgatgatcaccgcccctttgatcaccagttgccagaagtaggagacccccatcagggtcatgccgttattgagggtggcgataattagcgcccccaccagcgtaccggtgatggtgccgataccgccgacgaagctggtgccgccgagaatgaccgcggcgatggcgtccagctcgtagccgacgccgaggttgccgttggcgctgtacagccgcgaagcgctcatcaccccgccaaggccggagagcaggccgctcatgccatagacaaacagcagcaccagccagactttgatgccggtcagccgcgccgcctgcatgttgccgcccaccgcgtagatatgcaccccaagggtggtgcggcgcaggataaaccagcacaccgcgatcaccgccagggcgatgactaccagccacggcaccgggccgaggtagtcattgccgatccactcgaagctgatatcggagttgatcaccgtggtgccgtcggccagcagataggcggcgccgcgcagcgccgtgtaggtgccgagggtgacgataaacggcggtagcccggcgaaggcgaccagcgcgccgttgaacaggccgagcagcaggccgagcatcagcgccgccggaatcgacagcaacgcaaactccgggatcagcgacaccaccatcgcggccactgcggtggtgccaaggatggagccgacggaaaggtcaatgccgccggtgaggatgatgaaggtcattcccgccgccagcacaatgttgatcgaggcctggcgggtgatattcagcagattgctttccgtgaaaaagttgggggcgataaagccgaaaacggcgacgatcaggatgaggatcggcagaatgccgacggtctgcatcaggtcgcccatcaacatttttttcgccgaagcggatttcgcgaccggcgcggaggtctctttcggtatgctcatagttgccctgccttaaggtgagaatcggtcacgccggtggccagcgtcatgatactttcctggctaatatcaccggcctgtagctcgccggcgataacgccctcgcgcatcacatagacccggtcgctcatgcccaccacttcgggcagctcgctggagatcatcagaatggcgacgccctggcgcgccatgtcgttcatgatgcggtaaatttcgcttttcgcgccgacgtcgacgccgcgggtgggttcatcgaggattagaatgcgcgggccaatcgccacccagcgcgaaattaacagcttctgctggttgccgccggacagtccgccggcgcgcacctgggcgtgcggcacgcggatgttaagcaactggatggcgtcatcggagatggtttgcgccttccggcggttgagcatcccccaggtcgcgtcgcgctccagcgtcgccatggtgatgttttcctgggctgccagttcgagaaacaacccctgttctttgcggttttcggtcagaaagccgatcccgaggtcgatggcttcccgcggcgagtggatcaccaccggctcgccgtcgatctcaatcaccccggcggtggctttgcgcaccccgaagatcagctgcgccagttcggaacgcccggcgccgaccagcccggcgaggccgacgatttcgccggcatgcaccaccaggctgctgggcttaatcttgccgccatcggtcagatcctcgacccgcaggcgcggctggccgcagggaatgtcccgttctttattgaacagatcgctgagcgggcggccgaccatcatgcgcaccagctccggtgcgttgagcttgtcgcgcaccaggctgccgacatactgcccatcgcgcaggacgctgacccggtcggagagctcatacacttccgccatgcggtggctgatatagatgatcgccatcccctcatcgcgcaggcgcaggatgagctcgaacaggcgctgggtttcccgcgacgagagggcggcggtgggttcatccatcaccagaatgcggctttgacggtgcagggcgcgggcgatctccacctgctgctgttcggcgatggtcagggtcatcacccggtcgctggctttgaactgggcgccgagacggtcgatcaccgcctgcgcctggctgagcatggctttgcgctgcaccagaccaccgcgcgccagctcgctgccgaggaaaatgttttccgcgacggtcaggttcggcgccagctgcatctcctggtagatcaacgtgatcccggcggccagcgcgtccttggggccgcggatcgtttgcggttttccgtcgatcaggatctcgccgctggtggcgctataggcgccggcgaggatcttcatcagcgtgctttttccggcgccgttctcccccatcagggcatggatctcgccgggccagaccgtcaggtcgacgcccttcagcgcgtagaatttgccaaaagctttggcgatatggcgcatttccagtaccggggtggcggtcatcgcggcgctcctgtctgtaagaacaatagctgcagtccaccaccggaaaataaatgcagaatgtcagaatccattcatatttgtcatagtgataaatagttaaccgcgatcacagttacgcggcgtcattttctgcaccgtcacgcttatctgccgaccgatccttcaccggagttgttatgaccgctcgccgacacccgtttttcaccagcgcccgtggccgcctgctctcctttaatctgctgatgggcgtggtcaccctgttggtcagcggcgtggcggtgttcggctttcaccacgccagccagctgcaggagcaggtgcagcgccagactctcaacgacatgcgcggcagtatggatctggcgcgggacacggcgaatgtcgccacggcggcggtgcgcctgtcgcaggtggtgggggcgctggagtacaaaagcgaagcggaacggctgctggcgacgcagcaggcgctgaagcactcgctggcccagctggcggcggccccgctggcgcagcaggagcaggcgcgggtggccaatattattcgccgcagcaacgcgctgcagcagagcgtggcggagatgctggagcgtggccagcggcgccatctgcagcgcaatgcgctgctgagttcgctttaccagaatcagagtaacctgcgccatctcgccgatcttaacgatcgcggctgggataaggcgatcgatccgcgccggctggccgagatggaccggctgatcgtggctgcgatccataccgtcacgccgcggtcgatcgtcctgcaactcgaccagctgcgcggtgccctgccgacacgcagcgccgatcccgcgctggcgtttgtcctccctgatgtgacccgcgagctggcgacgctggccccgctgtcggcccagctggaggagagcgacctgacgatcagctggtacatgtatcacatcaaagcgctggtcgcgttgcttaacgaagatatcaatcagtacgtgacccgggtggcggaagcctcagagcagcgggcggcgcagagccatcgggagctgcgctccatcagtatgtttattctgctttccgcgctgctggcgctggcgatcaccggctgcgccgggtggtacatctaccgtaatctcggctcgaacctgaccgccatctcgcgggcgatgtcgcggctggctcagggagagccgaacgtctcggtgccggccctgcagcggcgcgacgagctgggggagctggcgcgggcctttaacgttttcgcccgcaatatggcgtcgctggagcacaccacccggctgctgaaagagaagaccaaccagatggagatcgatcggattaagcgccaggagctggaggaggcgctgctgcatagtcagaagatgaaggccgtcggccagctgaccggaggtctggcgcatgactttaacaacctgctggcggtgattatcggcagccttgagctggtggagccggatgcgcgcgatgcgccgcgcctctccagggcgctgaaggcggcggagcgtggggcgcttctgacccagcggctgctggccttttcgcgcaagcaggcgctgcatccccaggcggtggcgatggcgccgctactggagaacctcagcgagctgatgcgtcactccctgccggcgaccttaagcctggagattgaggcgcagtcgccggcgtggccggcatggatagacgttggccagctggaaaacgccctgatcaatctggtgatgaacgcccgcgacgccatggcggggcgcgacggggtcatcaaaatacgcacctggaatcagcgggtcacccgcagcagcggccagcggcaggatatggtggccctggaggtgatcgatcatggcagcgggatgtcgcaggcggtgaaagcccgggtgtttgaacctttcttcaccaccaaagccaccggcagcggcagcggcctggggctgtcgatggtgtatggctttgtgcgccagtctggcggccgggtggcgctggagagcgcgccggggcaggggacgacggtgcggctgcagctgccgcgagcgttgaccgaggttgagaaggaggtggcgccagcggtggacgagccgtccccggcgggcgagcggctggcgctggtgctggaagatgaagaggatgtccgccagacgctatgtgaacagctgcatcagctgggctggctgacgctggaaaccgccagcggtgaagaggcgctgcagctgctggaggcctcgccggatattgccctgctgattagcgatctgatgctgcccggggccctgagcggcgccgatgtgatccataccgcccgacgccgctttccggcgctgccggtgctactgatcagcggccaggatttgcgtccagcgcagaacccggccctgccggaggttgagtggctgcgtaagccgtttacccgagcccagctggcgcaggcgctgagcgcggcgtacgcgaggatttgagattcctccgctacccgggtttcatgcggatgattaaggtagcggcaggactctgatgagattggccccgatgaaacgttacgcaaccgcactgctcttttgcactctgtcgctgaccagcctggccgctcgcgccgatattatcgatgacgcgatcggcaatattcagcaagccattaacgacgcctataacccgggcagcagtcgctccgatgacgacgacagatacgatgacgatggccggtatgatgacgggcgctatcaggggagccgtcagcagagccgtgacagtcagcgccagtatgacgagcggcaacgccagctggacgagcgccgccgccagctggatgaacgccagcgtcagctcgaccgcgatcgtcgtcagttagaaagcgaccagcgtcgtctggatgatagctactgatcgccccccgcaggccagcgcttaatccagcgctatttccatcccgtcatagcccgcttcgaaacctgtcggcagcgggttatccatcatccagatgtcaaactggtggctgatatgggtgaggatcacccgcggacagccaatgatctggttaaggctgcggacggtgtttagatcgttatggttacgcggggtctgcgcgcgcggctcatgactgcagtcgatgatcatcgcctgcgggcggttattgagcaaaaacttcagcgacttgtccggcagcccggcggtatccgagagccaggccagccggctgtgggccgactccagcagataaccaaaggtcagcttcgagtgattaaggggtaggggcgtcacccgcagcccctgcaggttaaacatcacaaacggcgtgacggtatggctaaagtcaagcagaccggggtgtttgagcagatcgtcgcagccggcgtcatccggcgggccatagaccggaatcgacgcgccgactccccagcgcagcggaaacagcccatgcacatgatccagatggtagtgggtcagcagcacctgttgaaagctgccggcgggatgatgctccatcagatccggtcgtccggcatcaagcagcgtcacggcgctgttgaacgtgaccactccgctacaggggcggcgtcggtggctctcctcgcggcgggcgcggcggcaggccgcgcagtcgcagccgaagaccggcaccagctgagcgccgccggtgccggttaagcggagggtcaggctcatcgtgtcaccttttgtttataccagttgatccgcttcgcgcgccgcgtggctgcgcagcaggcggaaaaattcatcgaccgattgtcggagactgccgtcgttattcaatgtcaggcagttgtccggcttatagcgcgcggcgcgttccagacgctgggcgatttccagcgcgttttcccggccgcgctgctccagccgctggcgcagcaccggcggcgagacggcgagacagatcggcaccagcacctcgccgtaacgttcccgggccagcgccaggtgggcgcgggagccgttggccaccacgtcaaagccggcgtgcagccagaggtcgatctccacgccaatgccatagtaagtattgttggcgtgccagctgagagcaaaaagatgctgctcggcgcgggtaaaaaactcatgttcgctgagggcgatatgattctcgctgcccgcgttaaacgggcgggttatgtaacgatgggccaccagcagctgcgggtgctcgcgctggcgcagcgccgccagcaggctatctttaccggagccggaggggcccaccagccaaatcagttttcctggcattaaaagaccctctttccctggcgccagacatggtcgatctggatatgttcgccgcgacggtgcgccagcaccaggtcggcgcgtttcccctcggcgatgacgccgcgatcgtcaaggcccagcgtctgcgccggatgctgactgaccagacggatcgcctgtggcagggtgaaggcattgtcctcggcgtcggcgatgcggaaagcggcatccagcaggctggcggggtaatagtcagatgagaggatgtccagcaaaccgtggctcgccagctggtgggcggcgacgttgccggagtgggaaccgccgcgcacgatattcggcgcccccatcaggacgtgcatcccgtgctgacgtgaagcctgcgccgcggccagggtggtgggaaactcggcgatgacgctacccagctggtgggattcagccacatgcgcctcggtggcgtcgtcgtggctggcgagggcgatacggcgggcgcggcacatggcggcgatggtctggcgattgggctgcgaccaggtggcggccagagccatctgctcggcttcaaaacggtccatttcgtcatgcgtcagatgatattttccctgatagtaatcgcggtacttgctgcgatcggcgtactgacgctggccgggcgagtggtccatcagagagaccatgctcaccgactcgcggtcgatcagcttttcaaacagcggcagcgtggtgtgatgcggcagctcgcagcgcaggtgcagacggtgctctgcgcggttaagaccgcgcttttgcgtctcttccaccgcattgaccatcttctccagattctcaagacgatcaccgccatcgcgcacgtcgccaatcgccacggcgtccagcacggtggtgatgccgctggcgaccatcatggcgtcgtggctgctcatcgccgagtgggccggccagtctaccttcggccgcggggtaaagaacttgtcgaggttatcggtatgcagctcgataaggcccggcagcagccagccgccttccccatccagcgcctgcggcagccggctctggctttcggcgaaggcgaggatgcgaccgtcctggacttccagcgaaccgtggaccacctcgtcgtcgagaaccagttttacgttattgataatcatgctgtcattcccatagagtgcagtcggtcggcgacctgacggcgtaccccttcgtcatggaaaatccccacgatggccgcgccgcgcgctttggcatcgtggatcaggttgaccacggcagcactgtttttgtcatccagtgaggcggtgggttcatcaaggagcaggatcggatagtcgaccgcaaaaccgcgggcgatgttgacccgctgctgctcgccgccggaaaaggtggacggcgcaaggtgccacaggcgttccggaacgttgaggcgggtcaggagctgggcggctttcgcggcgctcgcttcgcgcggcgtcccaagatcgagcagcggctgcatcaccacctccagcgccgaaatgcgcgggatcacccgtagaaactggctgacccagccgatggtggttttgcgcacttccagcaccttgcgtggggtggcggtgaccaggtccacccattcgtcgccgtggcggatatggatatggccgctgtccggcagataattggcgtacagcgaacgcagcagggtcgatttgccgctgccggagtgaccgtggagcaccacgcactccccggcgttaacggtcagcgaggcgtcggccagcaccggcagacgcacgccgtgctgctggtgcagaacaaaggttttatggacgttttcaacgcggatcatgttagctctcacgaggttgggttgccgggtggcgcttcgcttacccggcctacgaataacgcacctgtgggccgggtaaggcgcagccgccacccggcaaaacagcattaattctgcaacaccgacgacaccagcagctgggtgtaaggatggtgcggatcgtcgagcacccggtcggttaagccactctccaccacctggccctgcttcatcaccagcagacggttcgccagcaggcgagcgacgccgagatcgtgggtaacaatcaccaccgccagattcagctccaccgccaggccgcgcagcaggtctagcagccgcgcctgcacggacacatccagcccgccggtgggttcctccataaacaccagcttcggctgggtgaccagattgcgggcgatctgcagacgctgctgcatgccgccggagaaggtggtgggcaggtcgtcgatgcgcgagggcgggatctccacctcctgcagccacttttcggcggtggcgcgaatgttgccgtagtggcgggcgccggtggccattagccgttcgccgatgttgcccccggcagggacctggcgaggcagaccgtccatcgggtgctgatgcactacgccccattcggtgcgcaacaggcgtcggcgttcggcttcgctcatggcgtacagcgagcgctgctggtacagcacctcgccctgctgcggcgtcaggcgggcggagattgccttcagcagggtggttttaccggagccggactcgccgacgatgccgagcacttctcccggccacagctcgaaggagacattgcgaaaacctttatccggggcgtagagatgagtcaggttattcacagcaagtaatggctggttcattttttctgcccctcgctctgctggcggcaatagtcggtatcggagcagacaaacatccgctggccgctgtcatccagtaccacttcgtcgaggtagctgtggcgcgagccgcagatggcgcagggctcatcccactcctgcacggtaaagggatggtcgtcgaaatcgagactctccaccggggtatagggcggcacggcgtagatccgcttttcgcgcccggcgccgaacagctgcagcgccggcatcatgtgcattttcgggttatcgaatttcgggatcggcgaagggtccatcacgtagcggccattgaccttcaccggataggcgtaggtggtggcgatatggccgaagcgggcgatatcttcatatagtttcacctgcatgacgccgtactcttccagggcgtgcatggtgcgggtttcggtttcacgcggctcgataaagcgcaatggctccgggatcggcacctggtagatcaggatctgatcctccaccagcggcgtctccgggatccggtggcgggtctggatcagggtggcgtcttcggtacgctcggtggtggcgacgccggtgacgcgcttaaagaactgacgaatcgacaccgcgttggtggtgtcatccgcgccctggtcaatcaccttcagcacgtcgttctcaccgatgacgctggcggtcagctggatgccgccggtgccccagccgtagggcattggcatttcgcgcccgccgaacggcacctggtagccgggaattgctaccgctttgagaatagcccggcggatcatgcgcttggtttgctcgtcgaggtaagcaaagttatagccagtcagtgggttagccacgttcgttctcccgttgcaggcgtttcagcagcgccagttcggcctggaaatcgacatagtgcggtagcttcagatgcgagacgaagccggccgcttcgacgttatcggcgtgagccagcacaaactcttcatcctgcgccgggccggcaatctcttcgtcatagtccggcgcctgcagcgcacggtcgaccagcgccatggccatcgctttgcgctcgctcatgccgaaggtcaggccgtagccgcgggtgaagtgcggcggctcctcctgcggggcgacgaagccattaaccatctcgcactcggtcagcagcagctcgccaatattgacgctaaagcccagctcttccgggacgatttccacctgcacgtagccgctgcggatctcgccggcaaacggatggttgcggccatagccgcgctgggtcgaataggccagcgccagcaggtagccttcatcgccgcgcatcagctgctgcaggcgcgaggaacgcgagcaggggtagcccggcggggtgcgggtgatatcgtcgggcggcgtgccgcgatcttcctcggtcttcgccagcccctgctgcgtgagcaggctaaagacgtgcggcgtcggctctgcttcgccatcggcttgctgcacagacggcgcttcgccattggccagcagggtaaaatcgagcaggcggtgggtgtagtcgtaagtggggcccagcagctggccgccggggatatctttatacactgcggagatgcggcgttcgaggcgcatctccgcggtattaatcggttcgctgaccgccagccgcggcagggtggtgcggtaggcgcgcagcagaaatattgcttcgacgttatcgccgctggcctgcttcagcgccagcgccgccagttcgcggtcggcgatgccgccctcggtcatcacccggtccaccgccaggctgagctggtcgcctatctgttcgacgctcagttcgggaagccgtccatcgccccgtcgtttctgttcctgtaaggcgtgagcggcgcggatcgccttctcgccgcccttgacggcaacgtacatttagcacacctccacgtgggtggtgcgcgggatcgccagcaggcgctcgccgcaggtgaggatcaggtcgatgcccagcgggaacggatgcgggcgttcggttaattcgtcgatgatgcagtccggcagctgcggcgcgatcattcgctcttcggcaatgcctgccccggtcaggcgcagcatgcgtccgccgctgaggctggcaagctgaacgatcagtgtgacgccggtttccggcgcggtgacggtgccagcggaaaggacgttgagctgctcggcgctgataccgtcattggcgacggcaaagaccgcctgctgcggctggtccaccagcggcgcgccggtatgaaagcgcagattctgtcccaccagatcgttacgcagagcgctggcgagccagaccggtgtttcatgatcggcaagggtcaacagcaggctggtggaggccacgttcaatggctgccagccgtgctgaagctgctgcagggagacaatcacccccggctcgctcatcgctttcagcaggcgacgaaaactgtgttgggcatcctgcacagccagggtaaaagcgggttgtaaggtcatacgttatctccgcgaaccagggtaaagaagtcgacccggctggcgttgacttcggcgcgtcgggcttcaatgcgcgcgctgcgtagcgcttccagcggggttatcagagtttccattaaggtgtgaaaatggcggggcgactgcagcagggcgtcgatcgccgcgcagcgttcagcgtgcgggcggtcgcggcctaagatccagctgtaaccgagggtaccgtcagccaggcgtaccgctgcgcgggtaagggtggcgtcgccggcaaagaagcggtcgccgataccgcccatgcgggcctggagctgtaccagcccggtttccggggtgcgaatcaattcatattccggcgccagctgcagggactgcatgcgcgccagaaggtcctgcggttcactgtgggccagcacggacatccagcgctggcgggtggcggtatcgaagtgcattcagtgctccatggtaaattcaatcatgtcggcgcgggtcaggctgacggagtactccgccgtgagcgactcgccctcgcggctattgagcgtgcggacgcagagcagcggcgccatattggggatttccagcagcttgctctcttttgcctgcgcgcggcgggcgctaattttggtgcgtacgcgggtcagttcgacgtcgagccgatcgcgtagcagatcgtgcagcgagccgtggctgaaggtctgtagcaccggccagaagcgcaggtcagcgaagtagtggtcgatcaggcacagggcgacgccattgacccggcgcagggtacgcaggtggatcacgttctcgccctcattgatgccaaaggcctcggcgacatgggcgctggcggggcgcagcaccgacagcagcttttcgctggtgggatcgctgccttgttccagcaggttttggctgaagcgcgcctgggcgttaagcgggtagtcgatggggcgcatcagcaccagcacacccacgccctgacggcgctgaacccagccgcgctcaaccagctggtcgatagcccggcgcagggtgtggcggttaacgtcgaagcgcgtcgccagctgctgctcggcgggcagatagtcgccgcagcgatagtggtggcgcagctcctgctcaagtcgggcggcgatttcctgatagcgcgtggggtaactggtcggatgtctggacaggtgcatggtcatcaagcctcacacagcataggcgaggagcttcctcgcgttgtgggccgatcctgaccggtttatgttgcatttcggttaagtgacgatgaccaaaggatgaagagttgatgccaggcggatgacagggcggccgggccgccctgggggcgtcagccttgtttgaccacgttgatcatccaggggacgccaaagcggtcgacgactttgccgaagccgtgggcccagaaggtttcctgccaggccatctcaatgcgcccgccgacagccagcgcgtcgaaccagcgctggccttcagcgacatcgctgggatcgaggacgagggtgaagccggcgtaatgcacatcgggcccgaaggcgctgtcgctcagcatcagctggccattattgatgcgcaggctggcgtgggcgatagcatcatccgccatcttctggccagacgggcagccgtctgacgcttcctgcgccgggggcggcatttcgccaaaggtcattttaaacatcagctctgcgcccagcgtctgctggtagaaggcgatcgcctcggcgcagttgcccgcaaaggcaaggtagggacttaaggacatggtgaatacctcagtgaccgtaacccgtaaagcgtagtcgcccggcaggcgattgagccagacggcagggcgaaaaggggcgctgaaatatgacggcaggcgacagcgtaaatagcggttgccggcgagggaaataacaggatgcgccgggggacaaacggccaccaggatatcgggagcggcgacggttatgtgaaaaaataatcgtgccgcctacccgaaattaaatcagttctttttcacaaattccgatttgagcttcatcggaccaaaaccgtcaattttgcagtcaatattgtgatcgccttcgaccagacggatatttttcactttggtgccgattttcagcatcgaagagctgcctttaaccttcagatctttcacgacggtaacgctgtcgccatcggccagtaaattgccattggcatctttaacgatcagaatgtcgctctcttccgtcgcctcggcagggttccactcatgggcacattccgggcagatgtacatgccgctatcttcataagtgtaagtcgaatcgcattttgggcagtgtggcagttgcatgacgctcctcatgatgtcgtcgaaaaacaggacgttggtcctttaaacagcggctgagagccgaaagtgggtatgattatagcgcaatcacccacttttgtcgggtgtttttttgctaaaaagtagccgtggtattattccgggaaaaagcgaataaacgctgaaattaaccgcccgaagtggagcaaaatcgaagaaataatttccgcgcgatcggcaggaaatgaacttatttattttccgacactctgtaatgaggcggtaaatttctgtgaagttgatcgcagatataaacactgttagggtaaaaaaggggagcaggtcaatttcatcaagcatcacgatgagccgctccatttattcaccagtagccagagcaggcgtcaacaggttcggttgtacattctgtcagcagacagtgcaggcaaacctgctacgcttgaaatgaggagcacagcaattcaccgctcctgacgcacgatgcgaatggccttgccattcggcgaagaggcgtgcactcaaggcggagtagcagaggaaaaatatgcttaaaaggaaaaaaataaagcccatcacccttaaggatgtgaccatcatcgatgatggtaaactgaaaaaggcgatcaccgcggcctccctgggcaacgcgatggagtggttcgatttcggcgtctacggctttgtggcctacgccttaggtaaagtcttcttccccgatgccaacccaagcgtgcagatgattgccgcgctgggtaccttctccgtaccatttttaattcgtccgttaggcggcctgttcttcgggatgctgggcgataaatatggtcggcaaaaaattctcgcgataactatcgtgatcatgtcgataagtactttctgtatcggccttattccgtcgtatgccacgataggtatctgggcaccgatcctgctgctgctgtgtaaaatggcgcaaggcttctcggttggcggtgaatataccggggcgtcgatcttcgtcgcggaatactctcctgaccgcaagcgcggctttatgggcagctggctggactttggctccatcgccgggtttgtgatgggggccggcgtggtggttctcatctccagcgtggtgggtgaacagaactttctcgactggggttggcgtatcccgttcttcctggcgctaccgttaggtatcattggtctctacctgcgccatgcgctggaagagacgccagcgttccagcagcatgttgacaccatggagcagggcgaccgtgaaggactgcaggacgggccgaaggtctcttttaaagagattgccaccaagcactggcgtagcctgctgacctgtatcggtctggtgatttccaccaacgtgacttactacatgctgctgacctacatgccgagctatctgtcgcataacctgcactactcggaagatcatggagtgctgatcatcatcgctatcatggtcgggatgctgtttgtacagccggttatcggtatgctcagcgaccgtttcggccgtcgcccgtttatcctgattggtagcgtggcgctgtttgccctgtcgatcccggccttcattatgatcaacagcaacgtgactagcctgatcttcgccggcctgctgctgctggcggtggtgctgaactgctttatcggggtgatggcctcctcgctgccggcgatgttcccgacgcacatccgcttcagcgccctggccagcgcctttaacatctcggtgctgattgccggtctgacgccaaccctggcggcgtggctggtggagaccacccaaaacctgatgatgccggcgtactacctgatggttatcgcggtggtgggtatggcgacgggcctgtcgatgaaagagacggctaaccgtccgctgaaaggggcgaccccggcggcgtcggatatccaggaagcgaaagaaatccttggcgagcactacgataacatcgagcaaaaaatcgaagatatcgatcaggagatcgccgatctgcaggcaaaacggtcgcgtctggtgcagcagcatccgcgtatcaacgactaaccgttttcactgttaatcatgccgccaggggaaaccccggcggcattttttatgccttcggcaaggccaggccgtgacgccgctgctggctgagtttacggtactgctgcggcggcatgcccacgtagcgggtaaaagtgctgtagaagcgactgctggagcgaaaaccggcggtaagggcaatatccaggatggtcttgtcggtatcgctcagcagcgcccgcacatgattgatacgcatggcggtaatgtactgcttcatggtctgctgcatcacccgctgaaagacccccatcgcgtagttcgggttgagcttcacgtgctcggcaacggcattgacggtcagcgcctggtcgtagtgggcagcgataaactccagcatctggctgacataaaactgcgcgtggcgcgagacgctgttcttgtgggtgcgtgaggttttattgaccagaatcggctgccagccggcgaggctcagccgcttcagcatcagggcgatttcatcgatcgccagctggcgtatctgttcattctcgtggctcagttcctgctgccagcggcgcacttcgaaggcgctcaactgctgcgcggcgagggatttaatcaccatcccatgggtgacgtggttgataagctcccggtccagcggccatgagagaaacagatgcatcggcaggttgaatatcgccatctgctggcaatcgccggggcgggtcagctgatgcggcgtacaggcccagaacagagtgatatagcctttctcaatgcgcaccacttcgttattaatcaaatactccacgtcgccatcgaacggcacgttgacctccacctggccgtgccagtggctggtgggcatggcgtgcggcgggcgcagttcgatatccatacgctgatactcggagtagagcgccagcgggctgcggctctgcttttcgtcgctgctgcacataaagggatcggggggcagagaggtgaagcggtgttccatcgttagcgtattcctgaattgtcagagtggctgcatttttcgccagaactgacgacagcttagcggaagaatcggcccattttctctcctttttgctcaatctgttcccgaaatctcagattttgtggcgcttaatggccgatctgagctttcgggaatgctccggcgggaacagggcagcgcagcggggagcggcgtgccactctgcaagtgttcaatgacctgatggagagtgcgtgatgtctgccccaaaaattacttttatcggcgccggttcgacggtgttcgtcaaaaatattctcggtgatgttttccagcgcccggcgctgaaatcggcgcatatcgcgctgatggatatcgatgaaacccgactggaagagtcgcatatcgtggtgcgcaagctgatggattccgtgggcgcgaacggcgaaatcagttgccaccgcgaccggaaaaccgccctgcagggcgccgattttgtcgtcgttgccttccagattggcggctatgagccctgtaccgtcaccgattttgcagtctgcaagcgccacggcctggagcagaccattgccgatacgctggggccgggaggcattatgcgcgcgctgcgcaccatcccgcacctgtgggctatctgcgacgacatgagcgaggtctgcccggacgccaccatgcttaactacgtcaacccgatggcgatgaacacctgggcgatgtacgcccgctacccgcatatcaagcaggtgggtctgtgccactcggtgcaaggcacagcggaagagctggcgcgcgacctcgatctcgatccggcggatttacgctaccgctgcgccgggattaaccatatggcgttctatctgtcgctggagaaaaagctcgcggacggcagctacgtcagtatctaccccgacctgctacaggcctacgccgacgggcgggcgccgaagccgaacctgcacggcaatccgcgctgcgaaaacatcgtccgctatgaaatgttcaaaaagctgggctactttgtcaccgaatcgtcggaacatttcgccgaatacacgccatggtttatcaagccgggccgcgatgaccttctcgctcgctataaagtgccgctggatgaataccctaaacgctgcgtcgagcaactggccaactggcatcaggagctggagagctataagcgcggggagcgcattgaggtgaaaccctcccgcgaatatgccagcaccatcatgaacgccatctggaccggcgagccaagcgtggtgtacggcaacgtgcgcaacgataatctcatcgacaacctgcctcagggctgctgtgtggaagtggcctgcctggtggacgccaacggcatccagccgaccaaagtgggcgcactgccggcgcatctggcggcgctcatgcagaccaatatcaacgtgcagacgctgctcacgcaggcgatcctcaccgaaaatcgcgattacgtctattacgccacgatgatggatccgcacaccgccgcggtgttggggatcgaagagatctacgcgctggtggacgatctgatcgccagccacggcgactggctgccggcctggctgcaccgttaatcctcttatgccgccgggggcaacgaacccggcggtgcctgtcacgctctatcaaacgctgaaggaggcgctggcgacagcgacctggaccctatgagtatttcaatgacaacaaagctcagctacggatttggtgcctttggtaaagatttcgctatcggtatcgtctacatgtacctgatgtattactacaccgatattgttggcttatcggtcggggtggtcggcaccttgttcctggtggcaaggatcctcgatgcgatagccgatccgattatgggatggatcgttaactgtacgcgatcgcgatgggggaagttcaaaccgtggatcctgatcggcacgataaccaactcggtggtgctgtatatgctgttcagcgcccaccacttcagcggcggggcgctgctggcgtgggtgtggctaacctacctgctgtggggcttcacctacaccatcatggatgtgccgttctggtcgttggtgccgaccattaccctcgataaacgcgaacgcgagcagctggtgccttacccgcgctttttcgccagtctggcgggatttgtcacggccggcgtcacgctgccgttcgtcaacgccgtcggcggcgccgatcgcggtttcggttttcagatgttcactctggtgctgatcgccttcttcgtcgtttccaccctcgtcaccctgcgcaacgtgcatgaggtttactcctccgacagtggtgtgagcgaagactccagccacctctcactgcgccagatggtggcgctgatctataaaaacgatcagctggcctgcctgttaggcatggcgctggcctataacacggcggcgaacattatcgctggctttgcgatttactactttacctacgtgattggcagcgcggagatgttcccgtattacatgtcctacgccggggcggcgaatttgctgacgctgatcctgttcccacgactggtaaaagggctgtcgcggcgcattctgtgggcgggtgcttcgatcatgcccgtgctgggctgcggcgtgctgttgctgatggcgctgggcggcgtttacaacatcgcgctgatttcgctggccggggtgctgttgaatatcggcaccgcgctgttctgggtgctgcaggttattatggtggccgataccgtcgactatggcgaatatacgatgaatatccgctgcgaaagcatcgcctattccgttcaaacgctggtagtcaaagccggttcggcgtttgcggcctggtttatcgccatcgtgctgggtatcatcggttacgtgccgaatgttgtgcagtcgtcccacacgctgctggggatgcaggcgattatgattgcgctgccgacgctcttttttgctctgacgctgtttctctatttccgttattacaaactgaatggcgatatgctgcgacggattcagattcacctgctggataaatatcgccgggtaccggaaaatgacgtcgagccggaacggccgattgtggtacccaatcaggtgtaaaaagcgtgcgaaaaccgctgacgaaagaggggagggatgctctctttttgagcaaaaaacagtgtcttaaaaagacagaaagagaaaactgtagttctctattttatctcaattatttctctttttgagcgttctggactgtttgtttctccgattgttctcaaataaaactcagaattgtctctttttcgtgctcttgcgctgctttttaactcttgctactctttttgggtcttacatttttctcttatttgtctcagtgatggagcaatgcaatgcgcatttttatcgatgatggttcaaccaatatcaaaatgctgtgggagcaagatggcgaaactttcacccatatcagccccaacagttttaaacgcggctggtctgccaccttcggttcggggaagccttttaactacacggtggatgatgaaaagtactcattcgacctgatcactcccgatgcgctcccaaccaataacattgactggcaatatagcccgttgaactccatcgctgtccatcatgcgctgctgaccagcggtcttgagccacaggatgttgaaattgtggtcaccctgccgctgaccgaattttatgatgaagatgcgcaatatcgcctcgacaatattgagcgcaagaaaaagagcctgctgcgcgaagttaaactgaataaaggcgtggtgttcaatatcactaaagttaccgtgcgcccggaatcgattccggcgggcattagcctgtgtgatgagctgaaaccgtcgcattcggtgctgattatcgaccttggcggcaccacgctggatatttcaatggtcgccgggcagatgacctcggtttcgcgcatttacggcgacccgaagctgggcgtatcgctggtgaccgacgccgttaagctggcgctggcccgggcgaataccgacacctccagctataacgtcgaccagataatcatcaaccgccacgacgaagaatacctgaccgacaacatcaacgatccggatgcggtttctgaggtgaagaaggtgatcaataacagtatcgaacgtctgaccacgcgtgtcctgacggccatcgatagctttaaaggctattcgcacgcgatcgtcattggcggcggcgcgccgctggttgccgacgccattcgtgaacggatgggtctgcgcgaggatcgtttcgtggtggctgaagagccgcagtttgccctggtgcgtggtctgaaaattattggttaaggagcgtctatgactctggatcgcagaaaagtgctgatttacctgcgcccggatatcagcgccagcgagcgcttcgcggacgcaaaaattgaggcccatcaccgtggcgaccgcggcgatatgtcgcgtaccgcgctgctggcggggctggcgttaggggaagtcgatagccgcttgccgtcgatgctggcggcgctgctggcggaagatactaaaccggaaacgctgcgtaagatgctggcctcgttccttgagatccagccggcctctcccgccccggcagccgcggcagcagccgccccggctaaggcgccggagccgcccgcgccggtgagcgagagcgtctccgcgcgtaatctcgccggttcgttaccggattaagcgctattcccggtttgcgcgacccgggaaactccccggcttgcgctgcgcttagtttgtaggccgggtaaggcgtagccgccacccggcatacaggcggccccctggctggggccatgcccggcggcgctacgcttgcgcgggcctacggatccagtgcaatggtgggcccagtgccatttgtaggccgggtaaggcgtagccgccacccggcgcgaagacggaacgccacgacccgggatggcacccctatccgtgggcgaggaagcgcgccaggcgctgctgcagcaggcgattttcgcgggtcagccgcgcgttctcatccagcagggtcagcgccaccgcaattcccggccagtccagctccagctcgttacgcaggcgtaccgcgcgatgcacgatcgttaccgcgctgtcgtcgaacagccaggtgtccgcctgcggctggtgtggctcaatcatccctaagccgacgatctccgtcagctcctcttccgacaccccggtacgcaggcacaattcggtaatggtaaacgtcactgttactgtagccatcagactttcccccatgtcttacgcggatcgaagctggcttcggcggcggccaattgttgccagagctcacgcgctttttcatctggttttggcggcatcactattttaataacggcgaacaaatcgccggtgtgggttttgctcacgagtcctttccctttgatacgcagtcgctgccctgcctgactgcccggcggcaccgtcagcagaatgctctctttcagggtgggcaccgtcactttcgcgcccagcgcggcctcccatggcgccagcggcaggacgatctccaggttatgaccgacaatatcgaatagcggatgcggggcgatgtggataaccagccacagatcgccgttcgggccgccattctcccccggcgtcccctggcctttcaggcggatacgctgaccatcgactaccccggcggggatcttcacattcagcgttttcggcgtttcgctttcgatcatgccaaacacgttgtacaccggcaggttatagctgatggtgcgcgtctgctcggccagcgtctcttcaaggaacaccgccacttcgatctccagatcgtggccgcgcgccgcgtgttgacgacgacgctgatgcgtctgctggccaaacatggaggagaagatgtcgtcgaaatcttgctgactgtagctctgctcgtgggtctgtcgctggcgaccgaagccgggatcgttgcgatgctgccagagctgatcgtattcggcgcgccgttgctcatctttcaggacttcccaggcttcggcgagatccttaaatttggcttcggcatcgttttctttactgacgtcggggtgatatttgcgcgccaggcggcggtaggcggtcttgatggttttcagatcgtcggttggttgcaccccgagaatggcataataatccttcaattccatgatcttatctcatctatgctcagtgcggtggttacatattccctggaacaggcgtcagtataaagcgtagggcaaatgcgccctgacggggaagaaaagtggcggaaacttgacgccgtcggggtcgacggcgccgtggataagattagtctttcgcctgcggccgtgggcggcggcgccatccggtgaatagcaccagcagcgcgccgacggcgccagccaggcgcgcggtgccctcgccggcgctgggaaacagctggcgaatggtagggtcgctgaccagcgttgacccggcaatccagccgatgagcatcccgcccagcagcaccaccgcgggaaagcgggtgagcaggaccagcaccagcttgctgccggcgacaataaccggaatgctgatcgccacgccgagggcgaccagcgcaatgtgccctttccccgcagcagctaccgccagtacgttatccagcgacataatcacatcggcaacggtgatggtgatcgcggtgcgccacaggctgccagagctgctaacctcgctctcttcttcctcattcctgaccagcttgatgccaatccacagcaggagcagcgcgccgactattttcagccacggcagcgacaggagatacaaagcgatcgccagcagcagaacgcgcgccaggatggcgcccacggtaccgatgatgatcgctttggtgcgtttctgcggcggcagtttgcggcaggccatggcgatcaccacggcattgtcgccacccagcagtaagtcgatggcgacaatctgcagcataatcactgccatgtcccattgttgaagaaatgcatacatatcgagagaaaccacctgaaaaaagagcaagaaaaaccgctgcgcagggtactccgcctgggccgcgttgaccactggcgcagacctgcgctatcgcgcgggaaagagagagcctgaaaaataaagttacgaatcaaggcgccgttgggcaaggcttcggcgaaaaagggtgatattttgtcacccagactcacctgccgttcacttatcgcaaggatccccactatgtctggccacaagaaatacctctctgtcgccctgctgagcgctgtcttactgccggcgatggcctctgccgctgacgcgccggcgactttcaccccggaacaggaggcgaaaatcggcaaaatcgccgccgactatctggtcgcccacccggaagtcctgctgcaggcgagccagaaactgcagcaaattcaggctgagcagcaggccagcgcggccactcaggcggtgctgaagaacgccgccgtgttgacccaggataaaaataccccgacctacggcccggccaatggcaaagtcacggtgatcgaattcttcgactaccagtgcgtctactgcagccgtctggcgccggtgatggagcaggtgattaaagcgcacccgcagacccgcttcgccttcaaagagtggccgattttcggcggccgctgggaaagctcgctggaggcggcaaaaaccggcctgcagatctatcaacagaaaggggcggatgcctatctggcctaccataacgggatttacgctaccggccataacgaaggcaagctgacgacggcggatatccagcagcaggcgaaaaaagccggctttgatgcgaagaaggccgccgacgtcgaaccggtgctgcagagcattaacgatctggcgcaggagattggtctgagcggcacgccgggcgtgatcgtgatgccgaccaccggcgccacggaagccagcatcaccgtcttcccggggctggcagacaaagcctcgctggaagccgccatcaaaaaagccggcggctaatccccggcgtattacctgtccaggccgccgacggcggccttgctctcatgcgtcatcgctctcttcctgcggcggcggtaacgcgtggctttttaaatcaataatctgcccgatttgatcgtggtaaacggtgagcaaattatagcggctcatctccgagataatctgcggcgcgacgttaaagctgctcgccagctcatcgtcgcgcagagcgagcaccgcggtatgacgccgggtacgggcgcggcgccggttgtagtgataccagaggatcaacagccagccgttcagcgcggcaatcagcagatacaccagcgccgtattcagggagtccatcagcgattcccagcgcggagagggcggcgcgatgaactgcatcagcaaattggcgtacagaaagaacagaaaaccgagccaggccagcagcgttaagccggcgtcgaccagccggggtagcacccgatgttcggttaagatgagcgtattttcattcatcacaggcttccttttccccggtccggactcacccagcgcgcgcgggaacgttgacgtttcaccatcactttcggaaaagcgaccagcgtggtcagcaggccgatcatccagtagaccatcgggaaccagatcacccagaacagcgatttggcgacctttttctcatagcgccgctcgatatacaggctggcgacgaactgcagcaggcacatcaggccgagcagcatgccggtgaattccggtggaaacaggctatgcaccgccagattgtcaggcagcggcatcaggcggctgaggataaacagcagaatggtgatcgcgtaggcaaaggcccacagcgtggagcaggcatactccagaaacagcggccacatccggtgatgctgccagtgaaacaggcggcgcagattgaccagaaagacttcggcgccgccctgggcccagcgcagacgctgcttccataaccctttgagggtctccggcatcaggatccagcacagcgctcgcggctcgaaaaagatgtcccagtggcggagctgaagcttccagctgatatcaatatcttcagtgatcatatccgggctccagtagccgacgtccgccagcgcctggcgccggaaggcggcgattacgccggagacggtaaagacccggccatagatccgctgcgtccgtttgataagcccaatgatcgacgagaactccccaacctgaatgcggccgatcagcgtggatcgggtgcggatccgcggattgccggtgaccgccccgacgtgcggataatggatcaacggcgcgaccagccaggccgcggtatcccggtccagcagggcgtcgccatcgatgcagaccagcagatcgccgcgggcggcggcggcgcccgctttgagcgccaccgcttttccctgattggcggccagatggatcacccgcagcctcggctcctcctgcgccagctgctggagcacctgggcggtgttgtccgaagagccgtcgttaatcgcgatcacttcaagattggcgtaacgctgggccagcgctgcgctgatggtttcccgggcgtttttctcctcgttaaagcaggggatcaggatcgagatcagtggattgcccggcagcgtcggcggcggggtatcctccccccacggccagtgacgttccagctgaaaccagaagtagagacccccggtgatccacaacactgacataaacagcggccagaaaaagacaaagtcgaggataagctcgccggtaaataccgctgcgacacctaacggcagcccgaatacgaggcataaaatgcacaatgcgataatgcgatcagtcatggtcagggtaccaccaggaagaaaattgcggcctgatacgagagatatcaggctggttgttaataaaatcgtcagggtagtagccgtagtttttgacgccgttcagccgcagcaaacgcatccagtccgccagctgctggtcgggaatggcgttttgctggcgtcgattccagtctctggcctgcagttcaaagatggttttcttcagcgcgcccgggtggcgggcgacggcctgcaccagccgcgtcagccaggcctggctggcgtcgatcggcacggactccatcagcggcatcgccatggggaccgtccagtcataggcggcaaggaagtcatccagattctgcgcaaaccaggcttcgctttgcggctccaggatcggcagggcgaagagattacgcgccgttttcacctgcgggccgcggatggcctgcactgcctggcgtagatccagagtgaagcgggtcagggtttggcttttgaaacgcatccatgcctggcgctcttgcggacgttggggcaccggggcggcatcgtgcgccatacccgtctgccgccaggcggcgaccgcctccgggctcacgtcttcaaaatcggtcaacacggcgtcgtcgtgaaacagaatcccgctgaagctggcgtgtcgggccagatcttcgtagatgtcggtgatctgctggcgaacccggggatcccagggcgacagacggacgtacggctggcgggcaagtaacgccttcccggtttgcggatcccagcgctgaacgcgcggcagatctgaggcaagatcgaaggccagcaccggcatccaggcataaaccttcacattgccgcgggtctgcaactgccaggagacgaagttaaacaggtcggcgcgcatcggcagccagcggttggggaaatagagcgacttgaccgtgccgtcgccctgcgggtcggagaaggcctgcagaaagacgtggctgattttcatgtcatagacgcgctgcaccagcttatcgatattctttgcctgctggacgggattggggtcatagacatagtccagatccacatgcatcacccgaacaggatcggcttcctgaatctgggtcacggcgctggcaaaggccttgagcgacgggttaccggcgatcagcaggcgtggaatattgtccagatccttcacgttgcccaggccgtcgttcagcgtaaacgccagctgatacccttgctgtttggcgatagtcagggtgctgccgctggcggcgccgtagggccacacccaggcgcgcggcgttttcccggcaacctcatggattttcgccgtcactttctgcacgtcatctgtcattcgccgggtaaactgcgcgtcgctttcatagcggccggtggttttatcccagccgcggttggcggcggcaggctcgcggctgccctgcggattggccggcagaccgtagtgcgaggcccaggtgtgagcgccgatctccaccagcggcgagcggctgagctcgcgcaccatctcccaggtagcgaagcgctcgcgcggcgtcatcaggccgccaaaattaacgggctgaccagcgggagtgtccacccagctgcccaccggcgcccacagcgccgggacgttccaggctttaagcagcggccatacgcgggtgtaaaagctgctgtaaccatcgtcaaaactgaggagaaaagccttgggcggcagcgactttaagccataatgcgcatcgagaatgtcctgaacgctaatcgcatggtagccgttatgcagcagccaggcgatctgctcattgagtgcgctggtgcgcaccgaaagataacgctggtcggcggcatcgtcttcgacgtcatggtaggccagcaccagaaagcgatccgccggccagggttgattggcctccagttgggggcgctgctgcggggcgaggaaggggacttcctcagcacgcacgctgaagataaggcacagccagatgagaagcatcaggccgttgcgcagggtcgtgttcagcatggtcatccttaaaaccgtatatttgcatcaagagtgatggcgaggttgttttcacgtttgccgtcgtaggggcgcttatcccagttcagcatcaccccggtgtcgacgacgttgttccagcgcaggcgctgcccgtaacccagcaccgtgatcgccccggcggcgtgatttttttgccagtagctgccgccgccggcgagtaactgctggctccagacggtgtcatagcgctggtaaagcgtgtgatcgacggccagcgccgcggtggcggcgaggtcccgtgccggactgtagtaggcggtgtcggtgcggctattggcgctggccgacagaccgggctgcaaatccagcgttaaccatggggtttgccagaggcgttctttaccggagagggtgtactcatggcggcggttgcgatcggtaaaccggctggcggccgcgctgacgcggtactcccggcgttcgtttggagaccagcgcagccagccttcgccgcggttggcgctgacgccgttgcgtaacgcgcgcagcggcgtctgctgcgaaatccgctccagttcgccgcccagctgccagcgatcgctaacgtcatgggcggcggaaaggcggacgccgggcttgttctcgccgtgaaaattgacgctggagagctcaagctcgccccagtagtcgcgcggacgccattcaataccggcaaacagctggcgacggctgcctttcccctcttcaaaattgccttcagcgaagcggtgcccgccgaacaaccgccagctgtcggctagcggcgggctgtagatcgccgtctcaaaactgaggtcgtgcgtgccgctcaccgggttgtcggaatgcagccctttgccaacgctcaggcgcagctcggagagatgatggatctcgcgcgctctggccaggcgctgggtgttcagatcccgtggcgagcgggcgacgacgtcgtcagtcagcagatccatttgccgccactcctgcagatcgagggcgacccaggcctgctggcgctccagctgcaggctggtgggttccagagattccgccgcttttagctggcgttcggctgcccgtggcaatcctctctcctgcagaagggcggcatagtctatctgcaggccctggtttccaggggccgtcgccgccaggcgctgcattcgggcttcggcctgcggcaggtcgttggtagccgctaaatagtgcacgttaagcgactgtgcggtgagccagtcgtcgttcggctgcggcgttggcgagccgtagagacgacggatgtagggcgcattcctggtgaggcgggcgacataccgttgcgcctccgggtactgaccggtgtccagcagagcgtagaaaagctcgtgttcctcattctgttggcttgtcagccacgaaggatgctggtggataagcgtcagcgcaggctcaatttgcttaagggcgataaaagaggagatgacccagccgatggcccagtcgggaacggtctgctgctgggcgatcaggctttggtattcgcggatgacctgcgcgtactcggcgctggcgtacagtgcgcccagacgatcaatacgcgcccggatgatgtcgggcgcagcctgtgggtcggggtgccaggcggcgatcatcgcgtcatactgcgtgagcgccgtgcgggccagcgcgtaacgcgccttttcttcgcgggaaggggtatcggcaaggcgcaccagttcggcggcggcgttcagctgcaagttacgcttttccgcaggcgtcagttcgacgctattcgccaggccgagagcaggggaatcaatccggttgcgggtcagggtcgccatcaggctggccagcgcggttttgttttgcggttcacgatcgaggatctgcgtgtccaccaacagctggtcccagcttttgcccagccgcaggtagacataggagagcgtctgcaggtgcgcaacgctcgcctgctccgccaccaggcgacgcgcttcgctgagcgcctcgccgtccttgcgggcatcggcgagcgttttgatatagccgatacgatagtcgtcgctgccaggggcctggctgagcgcctgctgccagagggtgagcgaggtttgccactgcttctggttgcgcagggcctgcgccgcggcggcggtgccccgtgcgggaagcggcatatagacctggtagcgtcgccagactttcaccacttcatcgtcctgaccggcccagagggccacctgcagccagtccgccacctgagaaggggttaaggcatgccgcagctggtactgctgaaggtaactgagaaagggggcgtactgaccttggcgcgcttgcaagatttgctggtcatagagtgaatccgctccctgaaccagcgccgggaagagcaaaagcaagccgattgatagcgagagtttcgtgttgcgattaaacaataacgtatttgaataaggtgatctttccatttctatttgccatatgttcatcaagaatccattgcacaacacgaccgtcctttgacggtgagttaaaggatgaggatggtcccatttagctgactggcactgcaggtgaatgacctattgcaaactaataaacatatctcctgttgataaatgaatgggtaatttatacccgatacggcaaccgataaatatggataaattatggtctgcgttttaagataattctgtaaaatcgacttcattcgaacgggagtgttcaagttgatttctttaacctactgatataaataaaaaagaaagtcaggtggaattttgtttcaaaatggcggtgtgacttatatttagttggggttagagttttttaggcaatatttaagatgatttctgacaaaaattctcaatagcaaaaaaagcatcttttctgtggattttttttatttataatcaatctgtttatttcctgtcagaacgcaaggagggttttcacagccagattcagatgccgcgctaatgataaatcacaggtctcgttattttcaccgccatgcgaagcgttccatagggggagggaaaacgtctggttgacgagaatttgttgattaaatgttaaagggacgatttgtggcaactttaatgatattggttacccaagattactatctttttcaaggtgttaagaatttttttcctgatatcattcagttagattctagcggaaaagcgattttagataatgaggttgatgaagtctctctgctggttgatagccgctcgccgctttgccattacgattatctcgtgctggcagcggcgaaatccagaaagcgaatatgttgtatcgtcctcgatatgcgtcatcgggaagagcatttactgagcctgaaatcgtttttaaacatgtcattatcacccgcggatatggcgacattatttggcctttttctggagatgaatagcaagcgtctgaccaaagagtggtttgacgatctgcgcttaagtttgtctgaacagttaatgttacgtttactcatggcggggatgaccatggaggaggtggccgtcaatctcaatacgtcactaaaaagcctttaccgcaagcgtactgcgctttatgagcggttggggttagataattttaatgaagcttgcttatttatctttcgaaataagctgctggagcagaccgaacgttcgttatgaagcttcgctgtacagagaatggatgttatcgcaaggtatttgttgacgaaaatctaataaattaaatagatattgataggtacaaccgtcgatacccggcggtatcgatgatggcattaggcatataattccggagctctttggaagtatttaccgccaatgcggtttgctatgcacagcgattattataatgaatatattccttgcgccgcacaggaatagttttgtcataaattaacactaccatggtattccgactcacgcgtcggaataccatgagatatcgtgaaagcatcagaggagcgaggtggatgagaataagggacagtattgctgagcggttagaggcatgcgggctctaccgtcgggcggcatccagatggattgaggtgatgcagcgttgtctggacgatgaggaccgagagtggatccgtcaccatcgcaatcagtgtctgaaaaaggcgcaacgtccgccggcgccgaaagaggagtttgccgacctccaccaggcggcgaaagagacgcaatatcgtatgggcattgcgaagccctatggcgaagcattcaggctgcccggcaaagggaaaacggccgccgagtaatgcctttcttcacgacgtttgcctgacggcttcgccttatccggcctgcgggtcctccacaggttcaaacagcgtaggcccgcgcaagcgcagcgccgccgggcgatacacatcagataccgtactcgcggttgtgccggatggcggcataaatgccttatccggcctacgggtcccccacaggttcaaacagcgtaggcccgcgcaagcgcagcgccgccgggcgatacacatcagacaccgtacccgcggttatgccggatggcggcataaatgccttatccggcctacgagtcctctgctgattcaaacagcgccggcccgcgcaagcgcagcgccgccgggcgatacacatcagacaccgtacccgcggttgtggcggatggcggcataaatgccttatccggcctacgggtcctccagaggttcaaacagcgtaggcccgcgcaagcgcagcgccgccgggcgatacacatcagataccgtacccgcggttgtgccggatggcggcataaatgccttatccggcctacgagtcctctgctgatacaaacagcgcaggcccgtgcaagcgcagcgccgccgggcgatacacatcagacaccgtacccgcggttgtgccggatggcggcataaatgccttatccggcctacgagtcctctgctgattcaaacagcgtaggcccgcgcaagcgcagcgccgccaggcagggggtgatagaacggagttcgatgaagagtccggatgtagaaaagcaaaaacccgccttttgggcgggttctttaaatagtggtgcccggactcggactaacgccgcaggcgttgaacagcgcgcttgccgcgctggccccgaaggggtgagccgctgtgcggcgaataatcgaacggagttcgatgaagagtccggatgcagaaaagcaaaaacccgccttttgggcgggttctttaaatagtggtgcccggactcggaatcgaaccaaggacacggggattttcaatcccctgctctaccgactgagctatccgggcaacggggcgcattaaaccgtaatccgcccaccccgtcaaccaaatttcttaaattacttatcgattgcttatctttgcggcaattctgcgttcaaaggcgcgttttggcttaacttcactgcatgccgttatcgccctcgcgggttttccagccgctggtaatggcgataacgtggcgtagtccggagatgagataatcgccaatgacctcctcgtcctcacgcggcgagctcagggtaatttccgcatccacgccgtggcgataggcgccatgatggctgaaaatggtgccgatataacacttcccgttcagccagaccggaatataggccaccgtctcatagatatagttaacggcgacgccgctgtagtagttatccgcctcgtcagcggaggtgcccggcgggatggggcagatcggcgcgtcgttgtcgctggcgggtctgtctttcagcaggctgccctgcattacctccagcgagcgcagcaggtcagctttatcgccgtcgctcaggctgggggtcagcggctggtctttctccggggagcggatgctgttcagcgtatagcgatagcgaaccgtcaccgcgggcgtctggctggtggtgctgaacgggcgtagcaggtagaggttatcttcgccaaactggccgttgtaccacagggcatacacctggccgttgattttgacccagtggttccactggttagccccgcggccattaatggaaaagagggcgccgggcaccccggcatcgaaatcatcaccattatcactgtcgctgccgttgacggcggcaaaatcatcatcacctcgcttgagcaccccggtgtagctgaagagcccggtgccgcccacgtagctgtcgatgatcagttcgcgtttgccgtcgccgtcgaggtcgataagggtaaagctgactttgccgttttctgaatccgcgctaatcgaggagcgcagaaacgcctgccactcatcatcgctgatatccggggacggtttactggtcgtgatcagcgtatcgtcggcgtaagtgagcgtgaagtcggtaatatggccggttaacggaaactgctcggcgaccttattcagagacaattctggatcgcttttttgcgctttcaacactgcgttatacaacgtgcgcagagccaggttatccgcctctttctgctgcctggggatcacctggctgacaaaggtcggcagcatccaggtgccacccggggtgatttcccgacacataccggtgctgtacttcaggctgggggtaaaggttttaccatcccaaacgcgcgtctcgccggtgacgcagtcggccatgccccgttctttgtgcaaaaagacgatagcgccgtcggcgtagctggaggcctcggtagtgagcagccgcggtttgctcaactgggcgttatcgaccagccacagggcataaccgtcgttatagggcgctcgccagcagagcgcctgcgccagagaatgggttttatccagcgcggtcagcgtgatctggcgatctgccgccggaatggcctgattctgccagtcgtcgcagcgctggttcagcagcggcgtcaggatgggcagcagtttctggcgctgaagcatactcaacggcactggctgcgcgttatggagaaccggggcggcgataatttccggggcgggagtggctggcaaaatggcatcgtcgccggcatcgcctttatccagcagcgcatcggcggtgccggtgcgtcgctgaaacgcatccattttacccagcacctcgcggctgccggcgctggaaagcggcaggtgctggccgttaagggtgaattcgattttgcgctgattcgttaacgcctgtagcagggcggtggtctgatcgctgtcgaggcgaaagtggctctcgtcgagagcgtccagcgcgccaaaatcccggtcgtcgatcagcaggctggcggtggagtcggcggggatatcgtgctcgatttgcgcaaaggttaccgtggcggtgaggtgctgttcgctgcccgcgttgcgggtcaacagcacgctgacctcacccatgcggacgccgtaacccgccgcccggcaggcgccggtattatcgcaggcgagctcccagtctttttgtgcaaaggaaaaaccttgcaggggagccgccagcaggggcgtagagcagaggcccagccaggcagcccagaagaacgcgcgcatatcaatccctgtcagcaatcagtgagggggaaattataggcgcgacgtggcggttaggatatcagaatcaggtcaaggcgccgcccatacggcactgggcgaagcgtagaatatcttcagccagccgccgggcggtatccacatccgtctggctacgtttgaccagcagacggctcagacagccctcgacaatcagctccatctgcttggcgaccatttccgggtcatccacctccagctgagtcagcagctcgtgagtgtaggccagcgaagcctgcttctgctgttccgccagctggtgaatggggtgctgaggatccgggtagaaggtgcaggcggcgataaacaggcagcccgggtaccgctggttgcttacgcaggtggtgagtgcggcatagcgtgccagcagcttttgctctgcgcttaaggtctcgtccagcaggagctgacgacgccaggcatccacctgctggctcagatagcgaagcgcgtcgtacagcagcgcttcgcggtcaggccagaagcgtttcaggtcgctcgtcgggcaggacacgcgctcagcgaccatctccagcgacgtgttggcgataccttcaatttcaagaatcttaatggcttctgccaggacgtcttcacgtagcacggtgttctcctccatctttcctcctaaagtgtcgctcacgcttgccaatcgcgcaaatgggcgctgaatgccgcggcatccataaagccggtgactcgccgctcaggctgttcctgaccctcagcgttgaagaacaggatcgtcggcagacccagcacctgcaggtgtttcagcagcgcgacgtcttgcgggctgttcttcgtcacatcaacctgtaataacacggtgcctttcagcgcctgctgcacgtcaggtgaactaaaggtgtatttttcaaactctttgcaggccacgcaccagtcggcgtaaagatcgagcatcaccggttgacctttcgcctgcgccagcgcctggtcaagctcggccaccgagctgacgcgggtgaaagccaggtgcgcctgctgctcaaccgccggggcgccaaacgcccagtcctgcagaggccgcgcgctgaccagcgcggcggcaagcagaatgatctgtaccagccgcatccacggccgggtagcgcccagagaggtgataaacgcccagctgaagaaggcgacaccgagcattgaccacagccgtaacccccactggtcgccgagtatgcgttccagcaggaagacgggcagggcaaggatcacaaacccgaaggcggttttcacatggctcatccacgggccgcttttcggcaacaggcgattgccaaacacggtcacaaggatcaacggcagacccatgcccagcgcgtaaaggtacagcgtgccgccgcccagccacagattaccgctctgggcgatatacaacagaatggcgcttagcggcgcggtggtgcagggggagcagatcagcccggcaatagcccccatcgcaaagaccccgccgggcgagccgccctggcgcttattgctgagcagcgtcagccgggtctgcagcgacgacggcagctgcagcgtgaacaggccgaacatggagagcgccagcagtataaacaccgccgacaggccgaccaggacatacgggtgctgcagggccgcctggaactgcagcccggcggcggctaccaccagccccagcgcggtataggtcagggccatcccctggacgtaaataaaggccagcagcagggcgcgcgcggtggaaagccgctgttttccgcccagcacgatgcccgaaatcagcgggtacatcggcagcacgcagggggtgaaggcgataccaatacctatcagcagcgcccacagcgccgtaaagggcaggcgggcaggcgtgtctgcaggcggcactgcggcaggcgcaggtgatgtggcgagctccggggccggtcgcggctcaaccggcagcggcgggttgaacgccgggcggctgctcgtcgacggcatgggctcgatggcggttgcctggccgtcgtttgaggccgcctgcacggcgctcagcgggatcactttagtctccggcggataacagaatccggcatcggcgcagccctgccaggtgacggtgagagtagcctctttgtccgcctccttcaccgtcaccggcacggtcaggcgttggcgaaagatctcgcttttgccgtaaaactcatcttcatgccactctcccgccggcagcgccggttcgtcgatcgtcgccccggcggcgctgaaggtaaactgttgacgataaagataataaccatccttgatttgccagctcaggttgacgtcatgctgttgctgctgaaagtcaaaggcgaaagcttgatcagcaggcacgaagttcgagcgccccggcgcgtcgaataacccggcggtggctgatgtgctgcacagcagcaggatcagcgtaatgatgcggtaagccatgagaggtaatcgttgtctccatgcgtgacgggtagaaccagcagttctggggtttgatacgggtggtgtgacttcaggcagtccagcagcgcctgctgatgggcaaggtcagttttgagtagcatctgcacttcatactcctgctcgagtttcccttcccagtaatacagagaggtagcccccggcagcagcgtggcgcaggctgccaccttttccgccagcgcttttgccgccagatcctgggcggtcgcttcgtccggcgcggtacagagcacaacaacagcatcaggcgtagtcatcatgaacctcgtatcagcgaaaagaggcactataacacgcaagatgcggggatattagcgtaacgagcggggaaagtgagggcaacggaaggcgggcccgtagtgggcccgccgccagcggtatttacagcataatcccgccaaagataaagccgaggatcacgcacagcgtgatagcgataacgccggggatcaggaaggcgtggttaaagacatatttaccaatgcgggttgagccggtgtcgtccatctctaccgccgccagcagggttgggtaggtcggcagaacgaacagcgccgagaccgcggcaaacgaggcgatagccgtcagcgggctgacgcccagcagcagcgcggcaggcatcaacgccttggtggtggctgcctgcgagtagagcagcgtggcggcgaaaaacagtaccaccgccagcagccatgggtaattatgcagcagatcgccggccacggcctggatgtcgctgatatgcgctttaacgaaggtatctcccagccaggcgacgccgaggacgcagacgcaggcgctcatcccggacttaaaggtgctggcgttgagcacttcgccggtgtcgattttacaggtgatgctaatcagggtggcgatggtcagcataaataccacgatcgcctcgttacgcggcagcaccgggttcttaatcaggccgacggtatcgctgatggccgtggcgtagaacattaccgccacgatgccgatcaaaaacagcagaacggaacgtttggcgtgcggctgcagctcaaatacctggctgccgcgcagtctgacttcccccttggccagccgctcctggtaaaccggatcgtctttcagttcgcagccgaggaagttgcagacgatagcggtgagcatcaccgccagcagcgtgaccggaatacagatggccagcagcgtcaggtagctaacgcccagcggctcaaggatcccggcaaagaacaccaccgccgcggagataggcgaggcggtgatcgctatctgagaggccacgaccgcaatcgacaggggacgagaggggcgaatgccttgctctttggcaacttcggtgatcaccggcagcgtggagaaggcggtatggccggtgccagcgagcacggtcataaaccaggtcaccagcggggcaaggaaggtaatgtacttcgggtggcggcgcagcatccgttcggcgaggctaaccaggtaatccatcccgccggcgacctgcatggcggcgatagcggcaatcaccgccataatgatttcaataacgtcgaaggggatcgcacccggtttaatttgaaaaataagcgtcaggacaaggacgccaaggccaccggcaaagccgataccgatgccgccgagccgggcgccgagataaatcgccagcaggacaataaccagttctgcaccaaacatatatgccttccttgttttttaacaagttgatattgaattgttgtattttagtaaaaccaaaaagcaaaaaaggcatgtcatcgctgacatgcctttgaatgactaacctgaaagattactgttcgctttcatcggtataacgctttgctttataagcgggatgcatcaggttttgcgcagagaaaatatcatccaactccgccgccgtcagcagtccgcgctccagcaccacttcccgtacgctcttgccggtttcggcacagatcttgccgacgatatcgccattgtggtggccgataaacgggttgaggtaggtgacgatgccgatggagttgtagacgtagccttcacataccgctttattggcggtgatgccgttaacgcatttctccagcaggttgtagcaggcgttggtcaggatatgaatcgactcgaacatcgcctggccgattaccggctccatcacgttcaactgcagctgaccggcttcggaggccatggtcacagtggtatcgttgccgataactttgaagcagacctggttgaccacctccggcaccaccgggttaaccttcgccggcatgattgaagagccagcctgcagctcaggcaggttgatttcgttgaggcccgcgcgcggaccggaagagagcaggcgcaggtcgttacagatcttggacagtttcaccgccaggcgtttcagcgagctgtgaaccataacgtacgccccgcagtccgaagtggcttcaatcagatcttccgccgggacgaccggtaagttgcttacttcagccagcttctgcaccgccagctgttgatagccgtccggggtgttgaggcgagtaccaatggcggtggcgccgaggttcacctccagcagcagctccgcagtgcgcagaatgcttttggtctcttcattaagcagcacattgaaggcatggaactcctggccgagggtcatcggcaccgcgtcctgcagctgggtgcggcccattttgaggatgtcctggaactccacggctttcgcctggaagccttcgcccagctgtttaatcgcatcaattaacttaaggatggaggcatacaccgcaatgcggaacccggtggggtaagcatcgttggtggactggcatttgttgacgtgatcgtttgggttcaggtactggtattcgcctttctggtggcccatcagctcaaggccaatgttcgccaggacttcgttggtgttcatgtttacggaggtaccggccccgccctggaagacatcgaccgggaactggtccatgcatttgccgttattcaggacttcgtcacaggcggcgataatcgcatttgccgcgcttttgggaatggtctgcagctccttgttcgccagcgcggcggctttcttaaccatgaccatgccgcgcacgaattctggtatgtcgctgattttgctgttgctaatgtagaagttttcaatcgctcgcagagtatgaacgccgtagtaagcgtccgcgggaacttccctggtgcccaacagatcttcttcgatacgaatgttgtttaacatgtgaaccttcttttcaagctgccaatgaattcaccaaacacacagaatatccagtattcagtatattttctggccgacgattatttccttaaccggcccggtgcccaagatcatatgctgatgatagcgaatatcagtaagcttgatcacttattacattgcgggtatgagaagatttattaatctgtgaaatgggtcaccgctttcttattcctgagaaaaataagcctttccgctgattgaaaagccgctcagcatccccatgttagtgggatgcgatcagcaaattgatgattacgggcgctgaacgcagcgcccgttgatgaaggagacgccggtgcgttggattccgtttattgccttttttctttacgtttacattgagatatcgatctttatccaggttgcgcacgtgctgggcgtctttatgaccctgatcctggtgatctttagctcggtggtagggatgtcgctggtgcgtaaccagggcttcaaaaacttcctgctgatgcagcagaagatggccgcgggcgagagcccggcggcggagatgatcaagagcgtatcgctgattatcgctggtctgctgctgttgctcccggggttctttaccgacttcctcggcctgctgctattgctgccgccggtgcaaaagcatttgacgatgaagctgatgccgcacctgcgcttcagccggatgccgggcggcggctttagcgccggaactggcggcggagagaccttcgaaggggaattccagcgcaaagatgagcagcgcgaccgtctggaccataaggacgatcgccgcgattaacatcccccggcccggtcagcagatgcgaccgggccgctttctttgcaggcctacacgcttcccgtcgccagcttgcgcctgggtaaaaacagccacagccccgccagcatcaccagcgcgtacaggcttttccagccgaccatcgccagcagcagcagacagagaatgctgcccaccactgccaatagccgatagcgaccgcgaagcaaacgacaacccgccagcatgcacagcagatagatcatgatgaaaatgccattggcgtaaacgatcagcgcgtccagattgatatcgagcagatagatgccaagggtgctaactacgcaggatcccagcacggcgttgagggcgttgcgcgggatctgccgtggcgacagccttgcgaggtagctgtgtggcttatgctgcgcttgcgaccagaccaggcgggcgaagctttgaatatagatgttgaggctggcgaaacaggcgagatagccgatgacgcaggctacccacagcgcttcgacgccgaacagacggaccacgatattcggtaatgacgccgccgccgccatctcctcgccaaaggcgtggaagtgcagcaccagcacggtgcaggcccagtagaccgagccggcaagcagcaggcctatcatcagcgccctggggaaatcacgctcgggatgtttaaactccgaggcgagatgcgcgaaggcttccagaccgacaaagcaccagaacatcaccgacagcgccaaaaagagctgcccgcggtcaatctccgccggggccgggaaggggatctgcgccgggcttatcccgccgcgccaccagactacgacgatcagcgccacaatcagtacggcaaccaacgtctgcaggttggcgctggagctggcgccacgcgaaccgacccaccagacgatggccagggtgcccagctccgccagcagcagctgcgcatcatgccagccgaacagcgcctggccaaaaccggtggcgatgtgcagggcggcggggagtccgaccgggataaccgataaaaacagccagccggtgacgctggccagacgtggcccaaaggccatatcgacaaagtgggccacgccgcccgcgctgggaaaatggcggccgagcagggcgaagacgatggcaatcgggaaaacaaggagaatgagcagcggccatgcccacaggctgttatcgccagcgaccagcgccgggacggcgaagacgccggtacccagcaatgaggtggaaagcaacccaactccctgtcccagccctaactcctgttttaaaccactcatgattcaatcctgcgccagtgaaaaaaaagagagtatcacaatcgcttttccttatgaccgattgcctgacatggccgctttttgtgcgccagcgcaaaggtaaaaattttttttaattttgcccttgaagccgtaaatggccatccccatctctctctgcactagccggtaaaccgcgttcggcccggcgtcacccataactgataatgactttctcgaaggagagctatcaatgagtattcgtccgttacatgatcgtgtgatcgtcaaacgtaaagaagttgaaaccaaatctgcgggcggcatcgttctgaccggttctgcagcagctaagtcaactcgtggcgaaatcatcgctgtcggtaaaggccgcatcctggaaaacgggaccgtgcagccgctggacgttaaagttggtgacatcgtgattttcaacgatggctacggcgtgaagactgaaaagatcgacaacgaagaagtactgatcatgtccgaaagcgacatcctggcaattgttgaagcttaattcgcacgaccctgaacgaatttgaggaataaaagaaatggcagcaaaagacgtaaaattcggtaacgacgctcgtgtaaaaatgctgcgcggcgtaaacgtactggcagatgcagttaaagtgaccctgggcccgaaaggccgtaacgtggttctggacaaatccttcggcgcgccgaccatcaccaaagatggtgtttccgttgcacgtgaaatcgaactggaagacaagttcgaaaacatgggcgcgcagatggtgaaagaagttgcctctaaagcgaacgacgcggcaggcgacggtaccaccaccgcaaccgtactggctcaggctatcgtgaacgaaggcctgaaagctgttgctgcaggcatgaacccgatggatctgaaacgcggtatcgacaaagcggtactggctgcagtagaagagctgaaagcgctgtccgttccgtgctctgactccaaagctatcgctcaggtaggtaccatctccgctaactccgacgaaaccgtcggtaaactgatcgcggaagcgatggataaagttggtaaagaaggcgtgatcaccgttgaagacggtaccggtctggaagacgaactggacgtagttgaaggtatgcagttcgaccgcggctacctgtctccgtacttcatcaacaagccggacaccggtgccgttgagctggaaagcccgttcatcctgctggctgacaaaaaaatctccaatatccgcgaaatgctgccggttctggaagccgtagcgaaagctggcaaaccgctggtcatcatcgctgaagacgttgaaggcgaagcgctggcgaccctggtggttaacaccatgcgcggcatcgttaaagtggctgcggtgaaagcaccgggcttcggcgaccgtcgtaaagctatgctgcaggacatcgctactctgactggcggtaccgttatctctgaagagatcggtatggagctggaaaaagcgactctggaagacctgggccaggcgaaacgcgtggttatcaacaaagacaccaccaccatcatcgatggcgttggcgaagaatccgcaatccagggccgcgtagctcagatccgtaagcagatcgaagaagcgacctccgactacgatcgtgaaaaactgcaggaacgtgtcgctaaactggctggcggcgtagcagtaatcaaagtcggtgcggctaccgaagttgaaatgaaagagaaaaaagcacgcgtcgacgacgccctgcacgcaacccgtgctgcggttgaagaaggcgtggtggctggcggcggcgtagcgctggttcgcgttgcggcgaaactcgctggcctgaccggtcagaacgaagatcagaacgtcggtatcaaagttgcgctgcgcgcaatggaagcgccgctgcgtcagatcgtttccaacgccggtgaagagccgtctgttgtggcaaacaacgtgaaagcaggcgacggtaactacggctacaacgcagcaactgaagaatacggcaacatgatcgacttcggtatcctggacccaaccaaagtcacccgttctgcactgcagtacgcggcttccgtggctggcctgatgattaccaccgagtgcatggtgaccgacctgccgaaaggcgacgcgcctgacttaggtgctgctggcggcatgggcggcatgggcggtatgggcggcatgatgtaatcgtgcgctctacggcataaaaaagcagaaacccctggccagcaatggctgggggtttttcttttggcgcgctttttagtataaggcttatacataaaaatcatttaagctgcatcagagcggcaagcacctccgtttcggtagcgacctggtaagcgcagccggggagggaatgaacgcggctcatgccgacgcagtttgaaggatgacagatttacatccgggccagtgcgtccagctcatcgatcatggggaataacatgcaggtaaaatatttagcagggattgtcggcgcagccttactgttggcaggttgcagttccagcaatgaattaacctctgccggccagaatgtgcgtttcgtgcaggagaagccgggcgcagaatgtcagctgttagggaccgcgacgggtaaacagagcaactggctctccggccagaatggcgatgagggcggttccatgcgcggtgcggcgaacgccttgcgtaaccaggcagcagcaatgggtggcaacgtgatttacggcgtcagcagcccgacacaaaacctgttgtcgagctttgtacctaccgacagcgaaatgaacggccaggtttataagtgcccgaactgatgcgtgacgcctctctctgcgagcgcagagagaggcgtggtcgttagatgaggatcaggcgttaagctccgctttcttctccagatagaaggcgtgcagaggacgcaggcactcttccagactgagcattcttcccggctgggaagggatgacagtactgaagatctggcatggcgccagctccgcgtgcatcgccttgagcttggggcttttctcgataatccgcgtcacaacgttattttccagttctgataaatgcggcgcgctggttttgaccaccgctccggagacaattttcttgccttcgtctgtctcgcagcagtacagcacgcccagataatgggaaaacaggtttagcttccagtcttcctggggatactgctggtaatcgatattgggctgagtggttaagtcgacggtatagcacattaaaaaatccatatttgaacttaaatactgaaccagttcctggtcgccgactgtttttaatgcttgttgaataccgataattaatgcttcgatttgcagatcgtcaatacataaagtactaatttgttcatcctgaaatacaagaattaacgttgactgtgtttcgccaggtttgagcgtaatggacatgattcgccgctcaggggatggttgctgtatttcagccatctcaacctgagggatattggcaacaactgcctcattataggtgataagctcatctttataggcctctccttggttttcaagccgctgaaaaatcacagccattctgctctgcagtatcaggagcagatcggctagcaccggtgcctgaagatagtaaatttcgcaaaagccattttccttcttaacttttagcagcaacgctaaaaatcgctcttcaaaggtaattccggcggtattaaaacctataaacgttccttgcatattcatatcctttattaagcagtagtcaccggcttcgattgtgcgagatcgataacacgatcggcggatgcaatggtcgatggtcgatgcgcgacgataatccgggtaatacttagcgctgaaatagactgattgataaccgactcatttctgaggtcaagatggctggtagcctcatccataaataaaatactcggtttgcgatacagtgcacgggcgatcaggatacgctgcttttgcccacctgaaatacccagcccaagttcgccgacaatggtttcgtatcccatagccatcttcataatttcatcatgaatgttgcaccgtctggcacactccatcacaaaatcaagatcggcgctatcatcgaagccacttatattatcaataagggagccggaaaagagacggtcttcctggagtacgcaggcgataccaagacgatagttattcaaaccaatctttttaatctccagattatccgccagtatttcgccggaatccggcgagagcagtccgcacataacttttaatagtgtggttttccctacgccagatgggccaattaacgcaactgattctccaggagcaacggttatgttcaaatttgtaaagatgggttgtgaaaaaggatcgtattgataactaagatttctcacttcaagttttacgccagtgttttccgtaaaaacacgccgcgatggaagttctttttctggttcactaaatgctatttctgatagacgttcgttgtgcagtgagagcatacgaagctgcatcaccaaatcaatgagattcgatgcacgttgagaaaactgaccccgataggcgttaaatgccataaacataccgagcgtcatctcattatcaattaccataatggcacccaaccacagtaccactacctgatcgattgaggtgataaaggtattaatgccaccaaacatcatatcgaatcgagtttgctttatacctgcattgctggcgtcaacgttaagattcagccaatgctgtgagcgacgttcttttaaattcagtgctttgatcgtagaaatgccataaagtgactccataaagtgggagttagcacgtgcgcctttgacgacctgttcttccgttacgcgacgataaaagctataggtagcaaagcgcataatcgcatagcaaatggtaaagccgatgacgacccagactaaccaaccaccatataaggtcagcatcaccaataaaccgattgtcattatcgagtcgatgatgccggtaacgatactattggtaaatattgagcgaatcgtatccaaagacgagaagcgagactgaatatcacctaaatgccttttctcaaaaaaggataatggcaaacttgtcagatgatcgaataacgtcgttttccattgaatatttgtcagggtatttaacgttaacgacgtccatgcacgtagcatgctaataaacgtgcggaatagggtaaaaaatatcaacccgatacagataacagacagtaagctttggtcgtgagccataatcacatggtcagtgactagctgtgtaccaatcggtaacaggagtccgatagcttctaccactacagagtaagcaaagatcttaatcagtgctgattttaaaccaacaattttatgcattaaatccagcaatcgtaatcgggattttgcttcttcttgctggaagttatgatcgggccaaagttcaagcgctacaccggtaaaattgtttgacatctcattgatgccaatgattcttttacccaacgccggatcgtgaataacaaatgcgtttttccttacctttgtaagaacaacgtagtggttcatcccccagtggatgatgcaggggagtttaagctgctttatttcatcaaggtcaagagctaacgctcggctttttaagccggcatgctctgcagttttgcttagagacattagtgaggagccctgggaggggctaccaaaccgctgacggaaattaaacagatcgatattcaacccataaaaaccacagaccattgccagacaggcaattccacattctgatgattctgactgaagaataacgggcgttttgttaacaagagaaaaatttaactttgcaacaacagttttgaaaagttcgttagtcatggatcggcccagtaatgctttgagttatcttatacacaggggtaaacatccacatatagagcggacgctcttccaggaatacaacagcttgagccttgaggccatttgaaagcgaaagcgttttaccattatattcaaaggttttgttttcaattttcacaatggtcttatagagcgccagttcctgctggtttgtgccgttcgtaacattggtatactcagacatttcttgtcgagatgtgggaacagaagatattgaaagtatttttcccgggaattgaccaaatttatctgatgggaatgcagcataacgaatgttaatttcatccccaggttttacataaggtatactattgttaggtaaccataaaataagataatactctatatcaccggtaggttttatctgtgctagactgctgcctttatcaaccatttggcctttagtgacggtcaatgattcaatacggccttcagtcgttgctttaataataatgttaccgtttgcgtttgattcaaccagttgatttttataatcattaatctggttttcttgtgacgagatttgattgtcaaaatcagctatttttgtaattttatcactattgagctgagtgacctgcgattccagttgcattttctgactcaccagagactggtaagtgctttgttgttgaaaatacaaagagtgttgatagttatattggtctttggtaatcagtccgtcacttaaatacttatcatagctggatagattatcatgcattttctttaatccagcctgggcgttagccaacatgcgattagtttcttttaacgaatcattgattgtttttaactgcttctctaaagaaatggttgtttcttttttattatgattcagttttgaaatgatatcttcagcatttgcgatcttttcattaatgacctctatttgtaccgcactaacattacccgttgtggtgttccgggaaatgtcgatctcatataacggctggcctttggtcacaatatcgccgacttttacatattgggagataacaaagccttgctgcggggcataaacgttgacagagtgaggtagagtaatgacctctccctgaacgtcgattctctgggtaaaggagcaaaatactgtggtggctatcaggatcgcaagaaaagcaaaagagagtaatgcaacaagccatgctggaagccctgcgagcagcagtgcctttcctttccagtgatgctttttatactcaatcgcttccttgcgatagattttttttaacatagttatcgcttaaattataaaatgaaaaggcccgatacgtcaggccttaattactaatgaatgcttgtcaacaaactgttgagctaatcattggcgcgtaaacttagttgctccagaagttcagggtgccgtcataaatagcatccattacgcccagagcataatccagagtcatatcccagccaacgatacccgctgcaataccaaagcaaacgccaccgagaataaccccggcgatcatccctacaccctggccgattgagccgataccgaagataccgccacttacgccaccccaacgtccggcgtacgctgtaccaaaaatagcgcccagagaggcgcccagtgcgatagcgccaacttcttttgcggcccaggtgacgatatcggtaagagtatcggtcagcgcaccgccagaaatttcttccatttcaaatacagttaattggtgcatgattagtcctttaactaaaattaaaattatatattcattccagaccagaatttggtccgcagaaaagatagtcgttgctgtagtatgaatcaactcaactaaatatgaattgttgatgaaattagaggttaatagtgaatcaaatctaaactatttataggttcataaaacagtaactaattcagcaggtggtggcacgcagctattatcgatgtgctgcagatatattgatttattcttgcattcatatatgacatttttttggttgttgacataaaaataaaaaaaaggtggatatcattatccaccttttgtaggggtatggaggttatacttttactcttcctgtatgacaacttcaagcatagcttttacatgaccggaagagacttcagcgctattgtcactcatgcgataatagtcggcggtgaaggtaaagttttgtgatgcctgtgccttggcgaagctataagtttcggcgtcgtaaaatattataggcttgttgtcaattttgaagataacgccaacgttatttgcggcttcggttccagttatcatgttatcgatgatcccatccccggcagaactggtgccattaacagggttaaaccagtagtaaagcttgttgccaactgaaccttgtgggcaagtcacatccattttgatagttttttgtgatggagttgtacctcctcgagaaatggacattaatgtgtttttttcaattttattcagggtgatttggctaggccctgatactgaaatatcgcaagaggtatctttatatgaaatagtcttgaacttcagggttgctgttaacaaaaggcggtcagctgcccttgggttggtgcttaagttacctgctgagaatttaaataccgggtttgtactggtgccggatgtatcgatgacctgctttgttttaattaaccataccgtcataaatttataatcttcattcgattctaaaataggtacgattgtagattgagcaacagcaggattaatagaaccatttttgctgctcagaagatctgaaaactgaaagccaattccatctatgccggtttcatagactggtttgccccttatacccgtgacgccggtaacttccggtgctgttgattcaacaatatactggtctcccattattttgctgcactcaaatgttttataatgtccggtaccgacttttttagtatagaggactgtacccaccggaattgttgggtctgttgcgattttaggacttatgttaaacattgcttgtccagcggaaccataataatcgcatttggcaattacctcgctacaacagcatagtagggataaaaaaagaagtatttttctcattctttattgttccttggtcaatattagcgacaaaccgtttcgatttgactgatgccagacgctttgccttccctggctggtaaagtaaatgaagcgttacattgctgcgctgcgcttttgccccactggacgttaaggatcccggtctcttgcaggccggacatatagaccatcccggcgtcgctgacgatacttggctgcgatttactatctccggcgagcagaaccattgcgccataaggcacgtcctggccgctggcggttttcagatgcacaaaggcccgctggccgatattgccgtcataattagcacgcacgatagcgccacgcgtcggaacaacgctcttcgtggtttctggcagctccatatcttcaccaagcgtggtgctgtccagcgtgatatcggtacgacgataaggtgtaacgtacgggacgatagcgtaaccgcgatagtcggtggagatggtgttatcgttggtcaacttgacgttatccaggcccggcgctttaaccagcacggcggcgtcagtgatgtcctggccaagtgtaatgccatcggcatgagcgacgatgctgccgttggcgccgtagtcaatacgttggctgttattgtcatagctatagccggcattaaggctgccgcgggcaccgttataggtcccacgcatatcaccgctgtaatattcccggttgctgtacccttgctgcaggctccattccaggctgtcgttatctagcccgacgccaccaatggagaccgactgatcggtagaccctgggttgctgttggttaactgatagctggtataggtacccggcagccagttgctcagtggcagcgttacggtcagagtgatgcgctgatcgtcctgggcgtctttaccggagctatctccgctccaggtgtaacggttatagctgtagcccagatagtagttcacattgcggaagccgccgttgtaccccacgctgatcgacttgttggtgcgcttatcgtcccaataatcttcgattaacccgctaacggacagactacccaaacctttacctaagctttggttaaccgtcaggttggtacggttgcgcagcgaacgcggactatagttgccgtcattagagtagctatccagcacctcggagagggtattaaacccgcgggtagagtagcggtagcccgcgatggtgacgttggtgccggtttcgacgatgtttttcccgtaacgtacgcgccaggactgcccggaggtcttttcatcgtctttcttttttgaccacgcctgggtgacgtctgccgaggcggcgcctagctcgccgaggttatagccgagacccgtcgatagcgcctggtagcgcgaggccgcctgcatgccgccatatactgtcaggctgctggagacgccgtaggtcgcggtagcctgagtaaatggcgtttcatcgactccaccatcgtaaggacgatatttaccggaagtaatctcatactccagttgattttcacgcaccatgaccggcagggtggcgaacggcacaacaaattcttgtttggatccgtcggactcttccacgctgacgtaaaggtcgccgctaccgccgcttgggtacatatcggtgatttcaaatgccccgggcgccacataggtctggtagacctgataaccgttctgtttaatcgttacgcgggcgttggttttagcgataccacgaataatcggcgcatagccgcgcatactttccggcagcatcgacgtatcggtcgccagttgtatcccggtaaacggcacgctgtcgaagatggtcgagagcgatgaactctcgcccattaccaggttactgttgatcgggcgaatgctgcgctgcatatagagataggcggaatcccagtctccggcaccgctattgtttttattccaggtgctgaggttacggatacgccatgggccaacgttgaggccggactgcaggttcaaactgtagtattcatcattggcctgcatgtcgttcgagccgctgaactgataattcaccagtaaagcgttaatgccgtcatcaaactgatccggtggaatatacccttgcgcggtggtggataaggccgcctgcggaatagaaatatttaaacgttgggcggtgaagtcaaaatccgctttggtatccgggatgacagtaaggttagtgcaaccatttttatcctcgaccagttcaggaaacgctttaacgcgtacaccatactccgctaacgtttttagactcaggcaaggagtgagcgcgggctcgcggttatcgacggtagcacgactattggcgacaaacttcatcgtccgggtatccaggtagcgaccgttaaacatgatatcgacccgataatctcctggcgcctgtgcattctgggtttgaaaaatggataagtcaggagtggttgatggatcgctaccattcaatgaactaatgaatgagggatcgaaaaagtcacgtgcttgcgctttattattcaaaccagaaagcaatgcaggaagcattgcgataaagacggtggatagtttgaataatccattattcttatttggcatagacacatccctataatgataaaataaatttcttattacagcgatgaggagtagagcgacccagctccgccataatcattgaccactttccaggtaatgctggaagcattaatattttcttttaacaccacttctttggtcgtcattggggcgaccgagttgacttccggcttcacttctttgccgccaatctggatgctattgaaataatagaaaaagggcgttggatttttgatcgttagctttgtgccagatttgcgccattcaagctttttcgcttcggtattaggggagaggtcgaaaagtgctttagggcgatagaccagacgcatgcggtggcggaccgccagttgaatggtgttgttattcgctttggcgtcatctgccggagggatcgccatcacgttaaaatagtacatggattcccggtcggtcggcgcattaacgtttccgttagaaaaaagacgaaccgtattctgttgtttcccttcaaggcggaacagcggcggagtggccataaaagagggcgctttccctgccggagcttcaacccaggatttaatgagatagggaatatcatctttattttcgatttgggcggtaatttcacgcgcaccttctttatacagatagcgggtagattcaattacaataccggcatgggcaatactgctgaggagtaatgcgcaggatgcggtgagatttattaaggtcctgaacatggcttttctctgaatgcaaaaagggcccgccgtaaagcgggaccctttggggaaaaattaaacggtgtaatcgatagtaaaggttgcaacccctttaaccggaccttcggttactgtggtcgcagcgttggttcttacataaccagtggtgtacttcagctgagtaccgttggctgcagagtagctttcggtcatggtgtcagaaccgtcgaaggctacgcgatgggaatcgctgacgcgctggataccaataccgatacccgctgcaccgttagcagcggtgttgtccagaatggtattgtcgctggaggtggtgccggaaacgagaactttcaggcctgtaaccgggctagagctgccctgtgcacagtctttcacgtcaaaaccgaagtcctgagttttgaacagtttaccagcggcttcagcatttgcttcagtggtggttacagtgatcagctgaacgataccgttgttcagggtaccagtcggggtcacgacgcaagagttagctgcatcagagacttcacccagtacagttacctgagcggtgttggttgccattgcctgagcactcagcactgcagatgcagcgaccattacagctacgattgtctttttcatttaattaatccatatatagatacttagtcctgtgtagaatcgataacagttatcaagggaatggagtatgcattcgcattgatattgaaaataagcgtcagctttcctttatatagtgctgagaccaatcatcctgttgaacgacgctaccatatcgcttgccatagcgaaccatggagaagcgggagtaatttaaaagtctggtgcaaaaaatgcttgtgaattattgatgaagcacccgtgaatttaatgctgccccccatctctgatgagatgtggattccagttgagattaatttaatctgaaaatgtgaccattaagcaagttagctatcgcttgtttttttatctgcggtatcctgtgggctgaacttcaatgtgaaatgtacctgtttccatctgaaacaagaatgttcacataatcgtttggttgaaatcatttgattttattatggataatagggttacgtggggcaaggatatggatgacgcagtattatttaatgggtgtataattaatcaggagattatatttaatgccaatatgaatgagctgcggccgcttgccggggacggggagtgcatcagcctcaatgcgccaaccgccagatgcttgctgctgcttttgcagaattgcggcaaagtcatttcgcgggatgagttcctggcggctgtatgggaaacacggggggtggtcgtttcgcaaaatacgttctatcaaaatatctctttgctgcgaaaatcgctggtaaaagctgggctatctgaggatatcattatcaccgtccggcaaaaaggctttagcgtcgctccgaatacattggtcattcctctctctgatgaagagtgcgataatatgaatcgggtgacattaacgcattatcagaataataaagttgtcgactttatttctgaagaaaaggaaaagcctgacactcatttaaatcttccactaatagaaaactcatcaaagcatggcagtgatttgatggcaaataaaccggaagaaggtgaaaaagcatctgagcggttgcatgttacttttaaaatacccgtatggttaatcgcgctaattgtcgtgatgattgtaattaatattattgtgttggtcgtgctaaaccggtagctcgtcacagccaggggttatagcgcggtgcgatagtcatttgctggtcaccttaacacccgtctgtcgaaatcttcctatccgaaggtctgccagaacgtcctggcagaccttcagtttattaacgctgcttcagccctaaatccagcggcgtcttgctgggttccccgccaatctcgcgcgccagcttcggcaccatatagccagagatgagggtcaatagttcgcgcatgatttcacgggcttcatcatcgctgaccatgaagtgcgccgctccctgcacccgatccagcacgtgcaggtagtagggcattaccccggcgtcgaacagcgcattactgaggtcggccagggtttgcgcgttgtcgttcaccccgcgcagcagcacgctctggttgagcaacgtgacgcccgcctgacgcagcatggccatcgccgcgcgaaactcaccgtcaatttcattcgcgtggttgacgtggttaaccaggattacctgcagcgacgaacgctggaggcgactggccagcgtctcggtgatgcgcgccgggatcacaatcggcaggcggctgtgaatacgcaggcgcttaacgtgcggaatagcttccagctgggtcattagccagtcaagctcatgatccttcgccatcagggggtcgccgccggagaagatgatttcatcaagctgcggatgcgccgcgatgtagtccatcgccgtctgccagttgcgcctggtgccctgattttcggcataagggaagtggcggcggaaacaataacggcaattgactgcacaaccgcctttcaccagcagcagggcccggttgcgatatttgtgcaacagaccgggcaccacgctgtgctgttcttccagcggatcggtggagtagccgggggcgacgataaattcttcctcagcggtaagtacctgacgaagcagtggatcgttagggttgcctttctccatgcgggcgataaacgcgcgcgggacgcgcagcgggaacaggcgtctggcctcgcgtccggccagcagtttttcatcagcgtctacatttaaaagacgcagcagttcatcaggactggtcacaacattggcaagttgcgttatccaatcttctctggatggggtatttagggttacaatatgcgccattttgtggcttagctaccagttaaacaatttcagagggccttatggcgacttactatagcaacgattttcgtgctggtcttaaaatcatgttagatggcgaaccttatgcggtagaagccagcgaattcgttaaaccaggtaaaggccaggcgtttgcgcgcgttaagctgcgccgtctgctgaccggtacccgcgttgagaaaaccttcaaatctaccgattccgcagaaggcgcggacgttgtcgatatgaacctgacttacctgtacaacgacggtgagttctggcacttcatgaacaacgaaaccttcgagcagctgtctgctgacgcgaaagcgatcggtgacaacgctaaatggctgctggatcaggctgagtgcatcgtgaccctgtggaacggccagccgatcgcggtcaccccgccgaacttcgttgagctggaaatcattgaaaccgatccaggcctgaaaggcgacaccgcgggtaccggcggtaaaccggcgaccctgtctactggcgcggtggttaaagttccgctgttcgttcagatcggcgaagtgatcaaagtggatactcgctctggcgaatatgtatcccgcgtgaagtaatttcgcgtcatgatgaccggcgtagcctccgtgctgcgccgctcttttcgtacaggcacaacgagcacgatacatgaagcgcagcgttaaactcctggtgttactctttctgagcagcgcgctgttggctggctgcaataccgcccgcggtgtgggtgaagatattcagggcctgggccacgctatctctcacgctgtgagctgaatttccctgccgtttcgttaatggcgcttgcctcccggtatgtcagcctcctccacgcatactccttttctcttaaaaatcgcaaagatcccttcatctttggacggtttgtctatgcttatagggcatgaaaacaaaactgacactaaggatgacattatggtgaaaaaaacgattgcagcgttctttacggttttggtcctctcttcagcactgaccgcttgtaacaccacgcgcggtgtcggtgaggatatttcagacggcggcaacgcaatctctggcgcggcaaccaaagctcagcaataaacgccgtcaacggtacggtttagcgccgtaccgttcttcacttctctcattccgttggatatactcaccacgacttttcatccaccttacgggacgacccgtaagcgtttctcatccggggacggccccagcaaaggagccttatgtcctggatagtcttgtttatcgctggcctgctggaagtggtgtgggccgtcggcctgaaatatacccatggctttagccgcctggttcccagcgttatcaccatcgtggcgatggtggccagcatggcgctgctctcatgggcgatgaaaaccctaccggtaggtaccgcctacgccgtctggaccgggatcggcgccgtgggcgccgccgtgaccggtattgtgctgttaggggaatccgccagcgccatgcgtatcgccagccttgtctgtatcgtgattggcatcattggcctgaagatcagcgcgcactaatcatagcgctgattgacccagaccagtttgccgacatcaaagccctgtcgggtggcaatgtccagcatctgctgcctgacctccggggcgatggtcggcgcccgggccagcagccagagatagtcgcgatcggggccgcagaccagcgcgtaacgatactccttatccagagcaatgacgttatagctgccgtagaaagggccgaagaaggaaatcttcagcgcggcgcggctgggctccccggtaaagtacgctaccccgtccgttttctgccacataccacggtcggggttatagcctttattgaccacgtccaggccaccgtcatcgcgtgggtgccaggcgatcgtgaccttttccagcccgctttcaaaagggtggtcaaagcgggcgatttcataccaggtacccagatagcgctgaacgtcgaagggactgaccacggtgacgcccggcggcggggcgggcgtgctgcaggcgacagacaggaacgagacggcaatcgcggtgattatcggcaggatacgcatggcatgctccttgctggcttttaagctaagtgtagagtccagcagggaaaaggcggcaagatttttctatgaagcgagcccggtagcagaaatgcgaccgggctcttgcaggatcagataaacagtacgccaacgagggtgatgacgctgaggattgccgccaggccgtagaagacccatttaccgttgggcacatggattttcagatcgtgcatggcgtggtgaatacgatgcaacccacaccacagcggcaggacaatcatcagaaagatgaatgcgcggccgataaagctttgggcaaaggccagcacacgctcatagctaaaggcgtcggccggggcgagccccagcggcagcaggatgccgaccagcagcaccatcaccggcgcgacgatcgcgccccacatgccgcctgcgccaaacagcccccagaatacgggttcatcggaacgtttcggattgggattaatcatctcagcctccttaccagaacagggcgacaaacaggatcaccacggtgaccaccgccgtcaccatccagagccctttaatgaccggctctggccccattttttcgcctttgatgatgacgttggcggctttcggcgccagctcaaaccaggttttggtgtgcagcagcgccgccgccagagtaatcaggttgaggatcaccaccaccgggttttgcaggaatccgatatatcccgcccagctctcggcgccgtgcttgagggcaaacagcccataaatcagcacaatgctaaaccataccgtcggtaccgccgtgccttcccgtaccatgtagaagcgataaaacggcagctttttccaccaggtggaggtcattggtcgcacgtagggtttgcgtttcgtcgtcataatgcactccttagcgtggtttcagggtggcgataagaaagtctttcgagctttccaccttgccctgctggatcgcggccgccgggtcgacgtgcttcggacacacttccgagcagtagccaacgaaagtacaggtccagacgccattctggccgttaagctgcgccatgcgttcctttttaccgtggtcgcggctgtcttcgttatagcggtgggcgagggtgatcgccgccgggccgataaattccgggttcaggccgaactgtggacaggcggcatagcacagcccgcagttgatgcagccggaaaactgatggtatttcgccatctgggccggggtctgcttgtttggcccctggtcaggcgtgcggttattgccgatgatatacggcttaatggcttccaggctttcgataaagtgggtcatgtccaccaccagatcgcgctcgatcgggaagttggccaatgcctccaccttgatgcctttggtgtaatcgcgcaggaaggttttgcaggccagcttcggcaccttgttgaccatcatgccgcaggaaccgcagattgccattcggcaggaccagcggtagctcaggtctggcgccaggttgtctttgatgtagcccagcgcgtccagcagcgaggtctgttcatcgtaaggcacgtcatagaacgcgctgtgcggtgcggtgtcgacctccggattgtagcgcaccacttcgactttcaggtttttcatctcagccatgggtggtctccttcttctcagccgcgtccgcttctgcgccatagacacgttttgccggcggcagcgtggtgatcttcacatcgccatattccagacgggtagtgccatcggcctcgcggaaggcgagagtgtgcttgaggaagttgacgtcgtcgcgttcggtacagccttcatccagacgctggtgcgccccgcgcgattctttacgggcgatggccgagtgcgccatacattcggcaacgtttaaaccgtgccccagctcaatggtgtaaagcagatcggtattgaacacgctggaattatcggtaatgcgcacgcgcttaaagcgctcctgcagttcagccagcttgtcgatcgttttctgcatcagctccggcgtgcggtagatgccgcagccttcctccatcgacagccccatttcatcgcgaattttcgcccagttttcgttaccttcctggttgacgagatctttcaggcgctgctccacatcggcagccagcgcatcgagggcggcgccgtttgcctcgcccgcctgagcggcgcgctgcatggcctgctccccggccaggcggccgaagaccaccagctcggccagcgagttggagcccagacggttggcgccatgtaagccaacggacgagcattcgcccacggcaaacagccctttgatccgggtttcgcactgctgatcggtttcaataccgcccatggtgtagtgcgcggtcgggcgcaccgggatcggctctttcaccggatcgacgccgacgtaggctttcgccagttcacagataaacggcagacgctccagcagttttttctcgccgaggtggcggagatcgaggtagaccacgtcgccgcgcggcgtcgggatggtgttccctttccgccactcgtgccagaaggcctgggacactttgtcgcgtgggcctagctccatatatttattcttcggttcgccgagcggggtttccgggcccatgccgtaatcctgcagatagcggtagccgtttttgttgaccagaatcccgccttcgccgcggcagccttcggtcatcaggatcccggagcccggcaggccggtcgggtgatactgaacgaattccatgtcgcgcagcggcacgccatggcccagggccatccccatcccgtcaccggtgacgatgccgccgttggtgttgtagcggtagacgcgcccggcgccgccggtagccagcaccacggcgttagcgcggatctgcaccagggtgccttccatcatattcatcgccaccaggccgcgggcctgcccgtcatcgaccagcaggtcaaggacgaaatgttcgtcaaagcgctgaatttggggaaactgaagggaggtctggaagagggtatgcagcatgtggaagccggttttgtcggcggcaaaccaggtgcgttcgattttcatgccaccgaagcgccggacgttgacgctgccgtcggggcggcggctccatgggcatccccactgctccagctgggtcatttccgtcgggcagtgatgaacaaaatagtcgacgacatcctgctcgcacagccagtcgcctcccgcgacggtgtcgtgaaaatggtactcaaagctatcgtgatcctgggcaacggctgcggatcccccttctgcagcgaccgtatggctgcgcatcggatagactttagaaatcagggcgattttagcgttggggttggcctgagcggcggcgatagcggcacgaaggcctgccccgccggcgccaattacggcgagatcggcttgaaaagtttgcacgacattcctccagttttagtgtatttcgccgccgggctggcgaaaaagtatcactgctcctttataggtacaggagtatagccttagggtcagtatggaaaattgacgtgttcgatttttttatcgatatgtgcggttatttatcagtggtatttatgcgtcagggttaacgatagattaatggcatgtagtctgccggagattgcacaaaatttgtttcactcgccggttgcgagtagacttcgtgcccttaatttgcaatcggagaaagtaccatgagcgagacggcaacctggcagccgagcgcacccattcccaatctgttgaagcgcgcggcggtgatggcggaaatccgccgtttctttaccgatcgcggcgtgctggaggtggagacgccttgcatgagtcaggcgacggtaacggatattcatttgttcccgttcgaaacccgtttcgtcggcccgggccattctcaggggcttaacctgtacctgatgaccagtccggaataccacatgaagcgcctgctggcggcgggttgcggcccggtcttccagctgtgccgcagcttccgcaatgaagagatggggcgtcatcacaatccggaattcaccatgctggagtggtatcgtccatgctatgacatgtatcgcctgatcaatgaggtggacgatctgctgcagcaggtgctggagtgccaaccggcggaaagtctctcctatcagcaggcgtttcagcgccatctggaaattgacccgctctctgccgataaagcacagctgcgtgaagtcgcagcgaagctggatctgagcaatatcgccgatactgaagaagatcgcgataccctgctgcagctgctgttcaccatgggcgtggagccgcacatcggcaaagatcgaccaacgttcatttatcatttcccggcgactcaggcctctttagcgcagatcagcccggaagatcatcgggtcgctgagcgctttgaggtctattacaaaggtattgagctggcgaacggtttccacgagctgaccgacgcccatgaacagcgcctgcggtttgagcaggataaccgcaaacgcgccgcgcgcggccttccgcagcagcccatcgataacaacctgctggcggcgctggaggcgggtctgccggactgctccggcgtggcgctgggcgttgaccgcgtggtcatgctggcgctgggcgctgaaagcatcggcgaagtgattgcctttacggtagaccgcgcctgatcgctttttcacctccctccgccggcgggtgggggaggtgaaagacgactttggacctgacaccctcgccccggctttagcccgaatacccacaatttccatccgtgattttgctactatccgcgctctttttatgaggccaggcgtcgctcgtcgggcgatgcccacgtttggatagatttatgcatcaacaactcaagaagatgagcctgatcgggctgattctgatgatcttcacctcggtgtttggctttgccaacagcccatcggcgttttatctgatgggctatagcgcgatgccgttttaccttttttccgccctctttttctttatcccgttcgcgctgatgatggcggagatgggctcagcttatcgtcgcgaagagggcgggatctattcctggatgaaccacagcgtcgggccgcgctttgccttcattggtacctttatgtggtttgcctcgtacgtagtgtggatggtgagtaccgccgctaagatctgggtcccgctatctacttttttgtttggcgcggacgaaacccagacctgggcgctgggtagcctgacgccgacgcagacggtcggtattctggcggcctgctggatggtcgtggtgacctttattgccgtcaaagggatcaataaaatcgctaaaattaccgccgtcggcggtatcgcggtgatggggcttaacctggtgctgctgctggtgagcggggcgatccttctgcttaacggcggtcatttcgcccagccgttaaacttcaccctttcgcctaatcccgggtatcagtcgggcatggcgatgctgtcgtttgtggtatttgccatctttgcctatggcggaattgaggcggttggcggcttagtggataagaccgataagccggaaaagaactttgccaaaggtattatcatcgcggcgattgttatctcgatcggttactcgctggcgattgtgctgtggggcgtgagcgccaactggcagcaggtgcttggcgcgcgttcgaccaacctcggcaacatcacctatgtgctgatgaccagcctcggggcgacgctgggccaggccctgcacctgacccctgcggcgtcagccctgaccggggtctggttcgcccgtattaccggcctgtcgatgtttctcgcttacaccggcgcgttcttcaccctcagctattctcccctgaaagcgattatccagggcacgccaaaagcgctctggccgtcggtgatgacccgtctcaacgtcaacggaatgcccgccgcggcgatgtggctgcagtgtctgctggtcggggtgtttatcgtactggtatcgttcggtggggatagcgcttccgcgttttataacaagctgacgctgatggccaatgtctctatgaccttgccttatctgttcctgaccatcgccttcccgttcttcaaggcgaaaacccatcttgaccggccgttcgtgatcttcaaaaaccgtccgtcgacgctgctggcgaccggcgtggtgctgctggtggtgaccttcgccaatatcttcaccattatccaacccgtcatcgacagcggggactggaacagcaccctgtggatggtcggtgggccgatcttcttctcactgctggcgctggggatctacgaaagctaccgtcggcgcatggcgtccggcgcgctggtgatggagagttaaagagcctgcccggcggtgccgccgggcaggggatggtttacaggctaccagccgtacggcggctggtttttccagccgaggtcatggttttactgctttgcctgccgtcaatactttccagacgcatctggaacggagggaacggcatttcaatgccatgctcgcggaagcccgccaggatcaactgatgcatctcatggcgcagcggcatgcggtgccccatctccgcggcaaaaatacgtagctcgaaaatctggatcccctgctgcaggtcgacgagaaacgcctccggcgccggggtatcgatgaccagcgagcagcgatgcgccgcggcgatgagaattttcgtcacctcttcggtatcggcgtccacaggcgccggcaccgtcagcaccacgcgggtaaccgagtccgacagcgaccagttgataaactgttcggtaatgaacgccttgttcggcacgataatctctttccggtcccagtcgctgatggtggtcgcacgggtattaatgcgggtgacgctgcccgtcaggtcgcgaatggtgaccgtatcgccgatgcggatcggcttctcaaacaggataatcaggccggagataaagttggcgaagatctcctgcaggccaaacccgagacccacacccagcgcggcgaccagccactgcagcttcgaccactcaataccgatcatcgagaagcccaccagcccgccgaccagcatcagcagatacttagtgatggtggtgatggcgtagccggtgccgggcgttaaatcgagatgctggaggatcgccagttccagcagcgcgggcaggttgcgtaccagctgagtggtgatgatcagcaccagaatggcaatcaacaccgcgccaagcgtaataggctcaaggctttccaccccttgtaccgtcgaggtcacgtcccacagcgagatattctcaaggaagccaaacgccgagtgaatctccgaccacagcacgatgaccgatagcagcgcgatcagcatcagcagggagcgcacaagccgcagcgactgggtactgatggcatcgaggtcgacctcgctgacctccgtctccaccgacccttccgggctgctgacgtgaacgggctcatcttcgccgcgggcgcgctgagcgagaatttccgcgcgacgatggcgggcccggtcgaaggccagccggcggcgctggatcagcatccagcggcggatgatgtgatagaccaccagcagcaggaaccagatggcgaccgaggtttccagacgcgcaagcagcgcctgggcggtggcgaggtagccgacggcggccgccagcatggccaccagcggggcgccaagcatcaggttccacagcaggcggttcaccatattgtcgccattcccctctttatccagatagagcggaataccggcgtgcttaaggctcagggtgaccaccgccagcgcgccgcagatcagcaggaagcacaggcggcccagcgaagcggagaattcgcggtcgttaagattatcgaacatgatcagcgccataatcagcggcacaatcagcccgatgctcatcaggtagtagcgcatcgccttcgccacgcggctacgcggccagccgaagtgggcgataaacagcccgtttggccgggcgaaggtggcgcagatcatcaccacccacagcaaaggcaccgtcgcggtgactccatcgccaatcgccaccgccagcgggaacggccaggcggactgcagaccatagccgagcgtcatccacagcaccggcagcggcgaggccaccagtatcgaccagaagaccgtgcgcagcgtcagccagaagtgatcctgggtgactttccccacccgggcgctggagcgctcgagaaagcgggtgaaatggcgccgcgagctgatgctaaagccaaccagcagcagggcggcaaacagcggtagcagggtctctttgctggtaagcatcatcgcgctggctttgcccagttcgctgatggtatccagggagatcaggcgccgcagatcctggacgatctccagcggccatgagaagccgatggggctgacgtccgaagtccagaacagatagcggtgggtggcttcgttgatctctttcagcgcgtcttccagctggccgttggcgaccttcagcttggtgagctccagcatcagggtgtcgccgccgcgcagcagcgagttcagcagctcgttctgcgtgcgcagctgcgcctgcaggatcttgttctgctcgctggtcagcggttcgccgtcggcctggcggatctgccgcagctgcggctgcttactcagcaaatcttcaaagcgcagacgctgcacgcgcagctgcgccatttccgtatccagctgctgcgggcgagggcgctccggcagccgcgccacctgggcgcgcagggcttcgcccagcagattggaggagcccagccactgcgactgctcgcgcagggtgtttaacgcctggcgcacctgcagcgtttgattcgtcgcctgtcgctgctgggatgccaccagatccatgcgctgcgcctgctggttcagcgcctgggagagctcacggttgaccttaaactgggcggtgatgtccggcggcaggttttcactgttctccgccagcagttcggtactctccagcgccttttccgcctcccgctggcgctggctgttttgcagattgcgcagcgcctgcagataggcatccagctgctcgctctgtttttgcgccagctcggaacgggcgcgcgacagctcctggcggttgttggcggagagctgggcgaggtcgagttcatccaccagcgccttcagacgcgccgattccgcctgcagggcaagattttgcgcctgggcgagagcattgttgccggtttgcgtgccgatgcggcgctcaacctcattgagctgacgacgggcatcggtttgctgctgcggcagctggttcagggagtcggcgatttcacgcgcgcgatcctgctcctgctgcgcctggcggctcgattccagcagctgactgctgacctgcaggatctcctggttcagcgcatcggcggtcaggccggttggcacctggcgcggctcttcgctcagattattgagctgggcacgcaggctttgaaacagtttggggaaattgtcgataacgtcctgatactgacgggcgcgctcgagggatgattttcgctcctcaagcgcgttcagcgcggactgcagaacttcaacggtttcaggctgggcgggctttgccgccttcgcctgttccagttcctgggttatctgtttagcatccggggctgtcgcagcgtacgccccgaaactgaggctcaaggccaacaggaaagtgtatatcaggcgcacggcataacccttttgctgaagaattaaccttggtcttgtttatcgtcaaccagcgggctggcgcggtgttcggcgcggatctcttcttccggtaacggcgcgggttcagcggcggcggtcgcttccactgttgtcgccagcggttggccgatcttggtcacggacaggctttgcagcgtgtcgaccagcttcacctggcccggggcaaacaggttgatcacggtggaacccagtttgaagcggcccatctcctggcctttcagcaaggcgatggagccttcgttgtcgccagcgggccaggtccagcgtttaataatgccttcgcgcggcggggtcacggtgccggaccacacggtctcgatgctgccgacgatagttgcgcccaccagaatttgcgccatcgggccaaactcagtatcaaacaggcagatgacgcgctcgttacgggcgaacaggttcgggacgttctgcgccgtcaagtggttaacagagaacaggtcgccaggaacgtagatcatttcgcgcaggatgccgttgcacggcatgtgtacgcggtgatagtcgcgcggcgacaggtaggtggtggcgaagctgccgttacggaacaggtcggccatctgatagttgccggccagcagggcttccagactgtagtcatgacctttagcctgcaggattttatcgttctcaatggcgccaagctggctgatcacgccatcggccggcatcaccagcacgtttggatcggtattcaacgggcgaacgtcgtcgcgcagcgggcgcacgaagaaatcgttgaaggtgcgataagccgcggtatccggcttctgcgcctctttcatatcgaccttgtagtatttcacgaacagatcgatgaccagcttcgtcagccaacctgcgcgtttgctcgcaccccagcctgcgaggcgggtgagccacagtttaggcagaatgtattgcagtgaaagtttaagatcgtttaacaaagtagcctccaggccatgatatgtcgttcctgaccccgcctgcgggcggggacctgaaaaaaggggacgattctatacgtaaaactcgccaaatggcatccgcgtaagctgcgtcatcatcgctgcccggcagcgcctgacgtgatgctcagcttaatgatcagtcatcggacgaggaaaagtttttacgcgtttttacctgtacctgcgccatgctttccaggatgcggtggtagttctcaaaacggctttcggcgatcttgccgttctctaccgcttcgcgaagcgcacagccaggatcggaatcgtgtttacagtcgcgatatttgcaacggcctaaataatcatggaattcgacaaagccgttggtgatttgttccgcttccagatgccacaggccgaactcacgtacccccggtgaatcaatcacatcgccgccgtgcgggaagtggtagaggcgtgccgcggtggtggtgtgttgacctaagccggaaacgtccgagacatcattggtgaggatctgatcctcgttcaacccgagcagggcgttcagcaggctcgatttaccgaccccggactgcccggcgaagatactgatgcggtcggtcagggccgcttccagcggcttaaggccgtcctgagtccgactggaaaccagcagcacgcggtaaccgatgttgcggtagatatccatttgctcattgacgaagcgcagaccatcatcatccagcagatcgattttattcagcacaatgagcggctcgatatcctgcgcttcgcaggccaccagatagcgatcgataatattcagcgacagctcaggcaggatcgcggaaaccaccacgatctggtcgatattggcggcgataggcttcacgccgtcgtaaaaatccggacgcgtcaggacggaggcgcgatcgtgcaccgcctcgacgatccctttgacgcttacgccgtcggcggcgtctttgcccggccgccagaccacgcggtcgccggtgaccagcgagcggatcgtccggcggatattgcagcgatgcacgctgccgtcagcggattcgacgtcggcatgcataccaaagcgactgatgacaatgccttccgacgtttcgccaaacaggttgtcatcgtagtcggccttctccgcagtggttttcagacggcgctggtggttggctttgacgcggcgctgctggcctttggagagtttatttttactcaatcgaactggctcctggtcgccctgatggggcaaaacctctatgatacacgctattttagatgaatatagtcacgcgagaagggtggaaaatagcatgagtgcaaatgaaaacaacctcatttggatcgatcttgagatgacagggctggatccggagcgcgatcgcattatcgaaatcgccaccctggtgaccgatgccaacctgaacattctggctgagggcccgaccatcgcggtgcatcagtcggacgctcagttggcattaatggacgagtggaatgtgcggacgcataccggcagcggtctggtggatcgcgtaaaggccagcaccgtcagcgagcacgatgccgaactggcgaccattgagtttcttaagcagtgggtgccggcgggcaagtcgccgatctgcggcaacagtatcggccaggatcgtcgcttcctgtttaagtacatgccgcaactggaagcctatttccactatcgctatctggacgttagcacgctgaaagagctggcgcgccgctggaagccggaaattctcgacggctttaaaaagcagggcactcatcaggcgatggacgatatccgcgagtcggtcgccgagctggcttactaccgcgaacacttcattaagctgtaaaccgcgaccgggccctgtgcgcggcccggtacacttttctgcgttatttaaaccacttctgctgcatctgctggaagtcaggtgtcgccatgaccgcggccagggcatcgttgatggcgttcagcagctccggatcgtctttgcgcaccgcaatcgcatactgcttaccgtaataagccgggtcggtggcccgttcatccatgatggcgtagtcagggttctcctgctgccaggcgtcgagggtggcgaagtcgcccatgacgccggttatttgcccggctttcagcgcggccagggcgctggcgacatcgtcgtaagggacagcctgtacggctttctgtttatcacgcaggtagcgctgatgcagcgtgcctttcaccacgccgacttttttagccttcagatcggcaaaggtatgggcgacatctttgttgacgatcactaccccggagagcgcctggcgatagggtcggctgaaggcgacctgcttctcacgcatcgggatcacttccatgccggcaatcaccgcgtcaaatttcttaaagcgtaaagccgggatcagggtatcgaaacgctgcgccgtgaactggcactgcgcctgcatctgctggcacagggcgtgcgcgagatcgatatcgaagccaacgggctgatttttgccgttggcggtgacaaacggtggattggccgtggtggtgccaaaatggagcgtctcggctgacgcggttccgatggccagcgtgctcagcagcaggacggtgaggacttttctcatgctaattccctgtttggcgtcggggtggcctcgttatacgtcgcgccaccgctgtatgatgcgagcgattttgcgtcattcagccgggcggaaaaagcgattttgcccgttatgacgcttatttatacaattcagcggcgtagatggcgagaaaatgtccatttaaacaaaaaacgcaaaaaagtgatcgtcagggggttgcaggggcatcgaattctcgtataatgcgcctcccgtaacgacgcagaaatgcaaattacgacgccatcgaaatatggcaaaaaatgcagtaacgcgggaatagctcagttggtagagcacgaccttgccaaggtcggggtcgcgagttcgagtctcgtttcccgctccaaaatttgaaagcaccatcctgatcaaaggatttcatctcgcagatgcggggcgaaagccgaagattaagcgggaatagctcagttggtagagcacgaccttgccaaggtcggggtcgcgagttcgagtctcgtttcccgctccaaaatttgaaagacacaccacaccagtcgcagttttcaggttgctagacggtagcttgaatgacgatgattaagcgggaatagctcagttggtagagcacgaccttgccaaggtcggggtcgcgagttcgagtctcgtttcccgctccaaattttcttccatctcttatttatccacagtgcaatccagcgccggggatgattttcgtttggtccgcagaaatactgtgaacagagttatccacaggttgtcgttccgtcactggcggcgcaaatgcttcgctttgtaaatagtatctttgtatgttattgaaatttaacaaataaatttcatttcaaaatgttaatccgatcacttgaccttggtctgcgccttgaaacgcaatgtgttttagattttattcacagcctgtgaatgaatcaggcgtcgcgcggcaagcctttctctaccactctgaccagacgtaattttttcggcaactgtacttcaacggcgtcggcgttccgctttttcagttgctgggcaatcgcccactcaatgtgttcgtcgagaagcgggtgctcgccccggcggctctccagggcgcgaagatgggcttcatcccagggcgcattgcccaacgcgacggcgatattgcgcagccagcgcaggtggccaatgcgacgaatcgccgacccttcggtcaccttcagaaaccacgcttcgctccaggcgaacagctccaccagcggcggggcatgcagcgctttgcgtgggctgaaatcctcttcatcggtgagctgtgagaaacggttccacgggcagatcagctgacaatcatcacaaccgtaaatacggttgccgattagtggacggaactcctcggggattgcaccttccagttcaatggtgagataggagatgcagcgccgggcgtcgacggtatagggctcaacgatggccccggtgggacagatggtcatgcaggcgacgcagcgcccacactcctccgcgatcgggctgtcgaccggcaggggcagatcaatcagcagttcgccgaggaaaaagaacgatccggcgtcgcggcttaagataagtgagtgcttacctgtccagcctaggcccgctttttctgcgattggccgttccaggataggcgcggaatcgacaaaaggtctaaaattgagcgaagcacactgttcctgaatcttctcccccagctttttcaggcgattacgtagcagcttatgataatcacgcccgagggcataacggctgacgtaacccagcgtgggatctttcagggtgcgggcaaaggcggcgttagcgggcagatagttcatccgcacgctgatgacgcgtaacgtaccgggcagcagttcgtggggacgggcgcgcatcataccgtgacgggccatccattccatttcgccgtggtattgtttatccagccatgcctgcagtttgggttcactggcgctgaggtcggtatcggcgatccccacctgctggaacccaagctctgtgccccattgtttgatttgttgcgctaactgaacgagatcgaggggctgtgacatgatggaccatacaatgacgaaaaaccctgacagtataccatacaacatttggcctgcggaggcgctgcgcctggccgaacgagaggcggcggacagcctggggctgacgctgttcgaactcatgcagcgcgcgggcgaggcggcgttccagctggccagctgtgcttatcctgccagcgcgcactggctgatcctctgcggacatggcaacaacggcggcgacggatatgtcgttgcgcgtctggcacaggccgcggggcggcgggtgacgctgctggcggtggagagtgacagcccgctgccggaagaggcgcaggcggcgcgggaggcatggcttaacgccggcggcgtgatccatgcggcgactatcccatggcccgacgatatctcactgattattgatggcctgctcggcaccggtctgcgcagtgcgccgcgcgatcccgttgcggcgctcatccaccaggcgaaccaccacccggcgccggtggtggcgctggatatcccttccggcctgaatgcgcagacgggcgcgacgccaggtgcagtggtacaggccgaccatacgctgacctttatcgccctcaagccggggctgctgaccggcaaggcgcgggatgtcgtcgggcaactccaccatcatgcgctggggctcgaacgctggctcgccggacaaagcactcctctgacgcggttttgcgccgcccacctcgccgactggctgccgccgcggcgggccacctcccataaaggcgatcacggcaagctggtgattgtcggcggcgatcgcggcacggcaggcgctatccgtatgtgcggtgaagcggccctacgcagcggcgcgggactggtgcgagtgcttactcacccggagaacgtggcgcccattgtcaccgtgcggccggaattaatggtagatgagctgacgccgcagactctgaaagccgcgctggagtgggctgatgtggtggcgattggccctggcctggggcagcgcgaatggggacgcagcgccctgcgcacggtggaaagttttaacaaaccgatggtctgggacgccgacgcgctgaacctgctggcattcaatcccgataaacgtcacaatcgcgtgctaacgccgcaccccggcgaagcggcccgtctgctgaacgtcagcgtggcagaaattgaaagcgatcgcttactttctgcgcagcgtctggtaaaacggtatggcggcgtggttgtgctgaaaggcgcgggcacggtggtggccagtgaaagcggggcgatgggcattatcgatgccggcaatgccgggatggccagcggcgggatgggcgatgtgctcaccggcatcatcgccgcgttgttaggacagcacctgacgccgtatgatgctgcctgtgccgggtgcgtcgctcatggcgatgccgccgaccgactggccgcccgcgagggcacccgcggcatgctggcgaccgatctcttttccacgctcaggcgtgttgttaacccggatgtgattgacgtagaccatgattaaccgagtgattcctttacccgatgagcaggccacgctggcccttggcgaccgcatcgcgcaggcctgtaccggcgccaccgtgatttatctgtatggtgatttaggcgcggggaaaacgaccttcagccgcggctttttgcaggcgctcggtcaccgcggcaatgtcaaaagcccaacttataccctggtggagccctataccctcgagaacctgatggtgtatcacttcgatctctaccgtctggcggatcctgaggaactcgaatttatggggatccgtgattattttgccgacgatgccatctgcctggtggaatggccgcagcaaggcgcaggtgtcctgcctgacccggatgttgaaattcaccttgattaccaggcacaagggcgtgaggcacgtattaccgcgatctcctcacggggtgaatctttactggcgcgtttagccttttagcctgaaggatgacgggatgaagtatcgcataaccacctggcttgccgctgcgctgatgctgtcgagtcttcacgccactgcggcgagtttatccgatatccaggtctctaacggagaccagcaggcccgtattaccctaagctttgtcggtgagccggagtactcctttaccccacagggtaaacgtctggtggcgctggatatcaagcagaccggcgtattgcagggactaccgctgcagtttagcggcagcaacctggtgaagagtattcgcgccggcacgccgcaggatacgcagacgctgcgtctgctggtggatctgacggaagatggcaaaactcgggcggtgaagcaacagaacggggcgaattacacggtggtctttaccatcaacgccgacgcgccgccgccgccgcctccgccgcccgtggtggtgaaacgggccgacccgccgccggtgatgccttcccggacgacgacgtcagggcgtaacccgttcagctcgtcgggtcatgaacggcagacggtgatgacctcctctcagccggcgatgaccaacaatcagaccgtgactcgcccggcggcccgcacggtgtcggcggatgataaagtcattatcgccattgatgccgggcacggcggccaggatcctggcgcgattggcccgaacggcaccaaagagaaaaacgtgactatcgctatcgcgcgcaagctgcgggcgttactgaacgccgatccgcagtttaagccggtgctgacccgcgacggggattactttatttcggtgatgggccgctctgacgtggcgcgtaagcaaaacgccaatttcctcgtctctatccatgctgacgccgcgccaaaccgcgatgccactggcgcctcggtgtgggtgctctcgaaccgtcgcgccaacagcgaaatggccggttggctcgagcagcatgagaagcagtctgaactgctcggcggtgcgggcgatgtgctggcaaacagccaggccgacccctacctgagccaggcggtgctggatctgcagtttggtcattcccagcgcgtcggctacgatgtggcgaccaacgtgctgagccagctgcagcgtattggcaacctgcacaaacgccgcccggagcatgccagccttggcgtgctgcgctcgccggacatcccgtcgatcctcgtggaaacgggctttatcagtaacaacggcgaagagcggctgctggggagcgatgattaccaggagcagattgcggaggcgatttataacggcttacgcaactactttatgcagcatccgctgcaggcggcgcctcgcggcgaggcggcgcagaccgccagcgccgcggcgccgggcgggatgttgattaactaaggagcaggggatgccgattcaggttctgccgccgcagctcgccaaccagattgccgccggcgaggtggtggagcggcccgcgtcggtggtgaaagagctggttgagaacagtcttgatgcgggcgccacgcggattgacattgatatcgaacgcggcggcgcgaagctcattcgcatccgcgataacggcagcggcatcaaaaaagacgagctggcgctggccctggctcgtcatgcgaccagcaagatcgcctcgcttgacgatctggaggccattattagcctcggctttcgcggcgaagcgctggccagtatcagttcggtagcgcgcttaacgctgacttcgcgcacggcggagcagcaggaagcctggcaggcgtatgctgaaggccgcgatcaggcggtgacggtgaagccggcggcgcacccggtcggtaccactctggaagtcctcgatctgttctataacaccccggcgcggcgcaaattcatgcgcaccgaaaagaccgagttcggccacattgacgaggtggtgcgccgcattgcgctggcgcgcttcgacgtcactatcaacctcagccataacggcaaggtgatgcgccagtatcgggccgtcgctcaggatggccagcgcgagcgccggctggggacaatttgcggcgccgcttttctcgaacatgcgctggcgatcgagtggcagcatggcgatctgaccctgcgcggctgggtcgccgatccgctgcataccaccccggcgctggcggaaattcagtattgctacgttaacgggcggatgatgcgcgatcggctgatcaaccatgctatccgccaggcctgtgaagacaagctaggggccgatcagcaaccggcgtttgtgctgtatctggagatcgatccccatcaggtggatgtaaacgtccacccggccaagcatgaggtgcgtttccatcagtcgcgcctggtgcacgactttatctaccagggcgtactgagcgtactgcagcagcagcttgacgcgccgctggcggaaaaaaacgacccgccggcgccgcgcccgatgccggagaaccgcatcgccgcgggaggcaaccagtttgcgcggccagcggaagcgcgggagcctgcgacccgcttcagcatcacgccatcgcgtgagcctgcggcctccagcggcaaaccgggcggcgcgagctggccgcatgcgcagccgggttaccagaagcagcagggagcgctttatcgtcaactgctcgacacgccaacggcgccaaagccagcgttgcagcctccggcggcggcagagttggccggtcacagtcagagctttggcagagtgttgacgattgttggcggcgactgcgcgctgctggagcgcgagggcggtctggcgctgctgtcgttgaccgttgccgagcgctggctgcgccaggcgcagttgaccccgggagcggaggcggtatgtgctcagccgctgctgatcccgctgcggttaaaagttacggaaggggaaaagcaggcgctggccgccgctcagccggcgctggcgcagctagggatcgatgtgcataccgatgccctgcacgtgacggtgcgcgcggtccctttacccttaagacaacaaaatttacaaatcttgattcctgaactgataggctacctggcgcagcaaaacgcattcgacgtcggcaatatcgcccaatggatggcgcgtaatctgacgagcgaacagacgtcatggaatatggcgcaggcgattgcgctgctggcggacgttgagcgtctttgcccgcagctggtgagaacgccgccgggtggcctgttacaacctgtagatctccattcggcgatgaatgccctgaaagatgaatgatgtaaccgaggcgagcctgcccaaggcaatttttttaatgggcccgacggcctccggcaaaaccgcgctggcgatagccttacgtaaagttttgccagtagagttgattagcgttgattccgccctcatttatcggggaatggatattggcaccgccaaaccggatgctgcggagcttagcgctgcgccgcatcggctgctggatattttggatcctgcggaggcctattccgcggcggattttcgccgcgatgcgctggcggcgatggcggatatagtcgccgccgggcgaattccgctgttagtcggcggaacgatgttgtatttcaaagcgttgctggaaggattgtcgcccttaccgtcggctgacccagaggtcagagcgcggattgagcagcaggccgcagagcaggggtggaatgcgttacatcagcaattacaggagatcgatcccgtggctgctgcgcgtattcatccaaatgatccgcaaaggctttcccgggcactggaagtttttttcatttcgggtaaaactttaacggaactgacgcaaacgtcaggagacgctctgccatatcaggtgcatcagttcgccatcgccccggcgagccgtgaactgctccatcaacgcatagaacagcgttttcatcagatgttagcttcaggttttgaagcagaagtacgggcgctttttgcccgcggagatttgcatacggacatgccttccatccgttgtgtcggataccgccagatgtggtcatatctcaatggcgagatcccgtatgatgagatggtttatcgaggtgtttgcgccacgagacagttagccaaacgtcaggtcacctggctgcgcggttgggaaggtgtgcactggttagacagtgaacaacctgaacaagcgctcaacaaagtattacaggttgttggtgcgagccagaactgaacgtgtacaattaaacggtatcgtgcgtaattttttttgagaatcgtaaggttctgagtacaaaacaagcatacatataaggaaaagagagaatggctaaggggcaatctttacaagatccgttcctgaacgctttgcgtcgggaacgcgttccggtttctatttatttggtgaatggtatcaagctgcaagggcaaattgagtctttcgatcagttcgtgatcctgttgaagaacacggtcagccagatggtctataagcacgcaatttctactgttgtcccgtctcgcccggtgtctcaccacagcaacaatgctggcggcggttccagtaactatcaccacggtggtagcgcgcagggttcttctgcgccgcaacaagacagcgacgacgccgaataaggccagtgctgtttttccacgccggggagccaggttttctgcgttccccgctggtattttataaggggtttacgcttgtttgaccgttatgacgccggtgagcaggcggtactggtacacatctatttttcgcaagacaaagatatggaagatctccaggagtttgaaactctggcctcttccgccggtgtcgaagcaatgcaggtgattaccggtagccgtaaagcaccgcacccgaagtattttgttggtgaaggtaaggcagtcgaaattgcggaagccgttaaagcgaccggcgcttcggtcgtgctcttcgatcatgccctgagtccggcgcaagaacgtaacctggaacgcctgtgcgaatgccgggttatcgatcgcaccggtcttattttagatattttcgcccagcgcgcgcgcacccatgaagggaaattgcaggtcgagctggcgcagctgcgccatatggcgactcgccttgtccgcggttggacccaccttgaaagacagaagggcgggattggtttgcgtggcccgggtgaaacccagctcgaaaccgaccgccgtttattgcgtaaccgtatcatgcagatcctgtcgcggctggaaaaagtcgagaaacagcgcgagcaggggcggcggtcgcgtgcgaaagccgatattcctaccgtgtcgctggtgggctataccaacgccggaaaatcaacgctctttaaccagatcactgccgccgaggtctatgccgcgaaccagctgttcgccaccctggacccgacgctgcgccgcattgacgtccctgacgtcggcgaaacggtgctggccgataccgtcggctttattcgccacctgccgcacgatctggtagccgcgtttaaagcgacgttgcaggagacgcgtcaggcgacgctgctgctgcatgtgattgacgcggcggatgtccgcgtgcaggaaaacattgatgcggtaaatacggttctcgctgaaattgaggccgatgagatcccggcgctgctggtgatgaacaaaatcgacatgcttgacgattttgaaccgcgcatcgatcgcgacgatgaaaataaaccgattcgggtctggctttcagcccagaccggggttggcgtaccactgctttttcaggcattaacggagcgtctttccggtgaagtggcccagcatacgctgcgcttaccgccgaaagaagggcgactgagaagccgtttctatcagcttcaggcgatagaaaaagagtggatggaggatgacggcagcgtgagtctgcaggtgcgcatgccgatcgttgactggcggcgcctctgtaagcaagagccaacgcttgttgactatgtggtttaaccttgcagcttgcctgaagatattgacccctgtggggatatcaaaaacaaatatggagcatatacatggcgtggaatcagcccggtaataacggacaggaccgcgacccgtgggggagcagcaaacctggcggcaactctgagggaaatggcaataaaggcggtcgcgagcaggggccgccggatctggatgatatcttccgcaagttaagtaaaaaacttggcgggctcggcggcggcaagggcggactgggcggcggcaatagcgcgcaggggcctcgcggaccgatgggcgggcgtattgtcggcatcgttgccgcggcggcagtgattatctgggcggccagcggtttctataccattaaagaggccgagcgcggcgtggttacccgttttggtaagttcagccatctggttgagcctggcctgaactggaaaccgacctttatcgataacgttcaggcggtgaacgtggagtcggtgcgcgaacttgcggcttccggcgtcatgctgacctctgacgaaaacgtggtgcgcgttgagatgaacgtgcagtaccgcgtcaccgatccggagcgctatctgtttagcgtgaccagcgcggacgacagtctgcgtcaggccaccgacagcgcgctgcgcggcgtgatcggcaaatacaccatggatcgcattctgaccgaaggtcgtaccgtgatccgtagcgatacccagcgtgagctggaagagacgattcgcccgtacaacatgggtatcactctgctggacgtcaacttccagacggcgcgtccgccggaagaggtgaaggccgcgtttgacgatgccattgccgcgcgtgagaacgagcagcagtacattcgtgaagcggaagcgtataccaatgaagtccagccgcgggcgaatggtcaggcgcagcgtatcctcgaagaggcacgcgcctataagacccagaccgttctggaagcccagggtgaagtggctcgctttgcgaagatcctgccggaatacaaagccgcgccggaaattacccgcgagcgtctgtatatcgaaaccatggaaaaagtgctgagccacacccgtaaagtgctggtcaatgacagcaaaaacggcaatctgatggttctgccgctggatcagatgctgaaaggcgccgctgcgccggcagcaaagagcgatagtagtgacgccagcgatctgctgcgcctgccgccagcatccagctcaagcagcgccagcacctcatcaacctcgagctcaaccgggggtagcattatggaccaacgccgcgctaacgcgcagcgtaacgactaccagcgtcagggggaataacgatgcgtaaatctgttatcgcgatcattgtcatcgtgctggtagtgctctacatgtctgtctttgtcgtaaaggaaggcgagcgcggtatcacgctgcgtttcggtaaagttctgcgcgacgacgaaaacaagccgctggtgtatgcgccaggcctgcacttcaagatcccgtttatcgaatcggtgaagatgctggatgcgcgtattcagaccatggacaaccaggctgaccgtttcgttactaaagagaagaaagacctgatcgtcgactcctatatcaagtggcgcatcagcgacttcagccgttactacctggcaaccggcggcggcgacgtctcccaggccgaggtactgctgaagcgtaaattctctgaccgtctgcgttctgaaattggtcgtctggatgtgaaagatatcgtcaccgactcccgtggtcgcctgaccctggaagtgcgtgatgcgctgaactcgggttcggccggtacggaagatgaggttagcaccccggcggctgacgacgcgattgctaaagcggcagagcgtgtagaagccgaaaccaacggtaaagtgcaggtgatcaacccgaacagtatggcggcgctgggtatcgaagttgtcgacgtacgtatcaaacagatcaacctgccggcagaagtgtcggaagcgatttataaccgtatgcgcgcggagcgtgaagcggttgctcgtcgccatcgttcacagggtcaggaagaggcggaaaaactgcgcgcgactgcggactatgaagtcaccaagacgctggcggaagccgagcgccagggccgtatcctgcgtggtgaaggtgatgcggaatcagcgaaactgtttgccgacgcgttcagccaggatccaggcttctactcctttatccgtagcctgcgtgcctatgagaagagcttccagagcaatcaggatgtgatggtcctgagtccggacagcgatttcttccgctatatgcgttcaccggattcggcgcgtaaataagccggagaaggtgtaaacctgaagtaataatgcgaaaaggcgcctgaaacaggcgccttttttcatgctgcgagggcgggaattagttgccgagtagcttgttcagcaggccgccgatcaccggcaggcctgccagcgcactttcgatggtgccgccgatagaagagccgatgctttcgcctaaggttttgcccaggtccggcgccaggtcggccagattgagggtgccaagcagtggcaggttaatgctcagggcatcagtgcccatcgtccatgcggctgcgccgaccttgctgcctaaggccgccagaccatcctgtaaccagcctgcgccgctcacattttcgatttcaaatgcggttaattctctcatcataatcttcctgattaagtagacgtaccgggttgtagtacgcgatggcatagttacaatttaaaaaatatccagcaatacaattagttgtgaattttgtttcacctttccggttcataatgaagctgaaatacgggacaatgtgaaatgagggaatgaattcaccatgctggccgatgacgcccgcgagggcggcaatgatacttttcaattagggttgacgatgaactccaccatttggctggcgctggcgctggttttagtacttgaagggcttggcccgctgctttatccgcgcgcctggcgcaaaatggtcgccagcctgagccagctaccggataatttattgcgtcgttttggcggcggacttgtggttgccgggattgtgatctactacatgttgaggaaatcgattggctgatcaaaaagtggtcggatttgccttattttggatgcaaaaagtgctgtaactctgaaaaagcgatggtagaatccatttttaagcaaacggtgattttgaaaaatgggtaacaacgtcgtcgtactgggcacccaatggggtgacgaaggtaaagggaagatcgtcgatctcctgactgaacgggctaaatatgttgtgcgctaccagggtggtcacaacgccggccatactctcgtaatcaacggtgaaaaaaccgttctccatcttattccatcaggcattctgcgtgaaaacgtcaccagcatcatcggtaacggcgtcgtgctgtctccggccgcgctgatgaaagagatgaagggcctggaagaccgtggtatcccggttcgcgagcgtctgctgctctctgaagcctgcccgcttatccttgactatcacgtggcgctggacgtggcgcgtgaaaaagcgcgtggcgcgaaagcgatcggcactaccggtcgcggcattggcccggcttacgaagataaagtcgctcgtcgcggtctgcgcgttggcgatctgttcgataaagcaaccttcgccgataaactgaaagaagtgatggaatatcacaacttccagctggtgaacttctacaaagcagaagcggttgactaccagaaagtgctggacgatgtgatggcgattgccgacatcctgaccagcatggtggtggacgtatccgacctgctggatcaggcgcgtcagcgcggcgacttcgtgatgttcgaaggcgcgcagggtacgctgctggatatcgaccacggtacctacccgtacgttacgtcctctaacaccaccgcaggtggcgtggcgaccggctccggcctgggcccgcgttatgtggattacgtactgggcatcattaaagcttactcgactcgcgtcggtgcaggtccgttcccgaccgagctgtttgatgaaactggcgagttcctctgcaagcagggtaacgaattcggcgccaccaccggccgtcgtcgtcgtaccggctggctggacgcggtcgcagtccgtcgcgcggtgcagattaactccctgtccggcttctgcctgactaaactggacgtcctcgacggcctgaaagaagtgaaaatctgcgttggctaccgtatgccggatggccgtgaagtgaccaccactccgctggctgccgataactgggaaggtatcgagcctatctacgaaaccatgccgggctggtccgaaaccaccttcggcgtgaaagagcgcagcggcctgccgcaggcagccctgaactacatccagcgtattgaagagctgaccggcgtgccggtggatatcatctctaccggtccagaccgtaccgagactatgattctgcgcgatccgttcgacgcgtaatcactctcaaggggcgccgttcgggcgcccttgtttttgctgttcgcccgccccatttcaaataaattagcggcctgagcgctggctggtttatcatcaataataatgatgtcgctcgacataccctgttttcttttccctgaggtttatgtgcagttaacgagtttcaccgattacggactacgcgcgctgatttatatggcgtcgctgccggaaggacgaatgaccagtatctcggaagtgaccgaggtctatggcgtctcccgtaatcatatggttaaaataatcaatcagttaagtcgcatgggctacgtgactgccgtgcgggggaagaacgggggcattcgcctcggcaaaccagcaggacagatccgcgtcggtgacgtggtgcgtgaccttgaacccttatcgctggtcaactgcagcagcgagttttgccacattacaccagcctgtcgtctgaaacaggcactagctgaagccgcgcagagttttctcaaggaactggataactatacgctggctgatttggttgagaagaatcaaccgctttacaaattattgctggtggagtgacgccactctgccggagatgacaacggaggaaccgatatgtcacaagatccattccaggaacgcgaagctgagaagtacgcgaaccctatcccgagccgggaatttatcctcgaacatttaactaaacgggaaaagcctgccagccgcgatgagctggccatcgagttaaatatcgagggcgaagagcaaaccgaagcgctgcgccgccgcctgcgcgcgatggagcgcgacggtcagctggtcttcacccgccgccagtgctatgccctgccggaacgcctcgatctcctcaaaggaaccgttattggccaccgcgatggctatggtttcctgcgcgttgaagggcgcaaagacgatctgtacctgtcgtcagagcagatgaaaacctgtattcacggcgaccaggtgctggctcagccgctgggcgcggaccgtaagggccgccgcgaagcgcgcatcgtccgcgtcctcgtgccgaaaaccagccagatagttggccgttacttcaccgacgctggcgtcggctttgtcgtcccggacgacagccgcctgagcttcgatatcctgatcccgccggaagagataatgggcgcgcggatgggctacgtggtcgtggtcgagctgacccagcgaccaacccgccgcaccaaagcggtgggtaaaatcgtcgaagtgctgggcgacaacatgggcaccggcatggccgtcgatatggcgctgcgtacccatgaaattccttatgtctggccgccggcggtggaaaaacaggtttccggtctcaaagaacaggtgccggaagagtcgaaggtcggacgcgtcgatttacgctcgctgccgctggttaccattgacggcgaagatgcccgcgacttcgatgacgcggtgtactgcgagaagaaacgcggcggcggctggcgcctgtgggtcgccattgccgacgtcagctactacgtgcgcccggggacgccgctggatgcggaagcgcgcagtcgtggcacctcggtctacttcccgtcgcaggtagtgccgatgctgccggaagtgctgtctaacggtctatgctcgctgaacccgcaggtcgatcgcctgtgtatggtgtgcgagatgacgatttcgtcaaaaggccgtctgaccggttataaattctatgaagcggtgatgagttcacatgctcgcctgacctacaccaaagtgtggcatatgctgcagggtgaccaggaactgcgcgaacactacgcgccgctggtgaagcacattgaagagctgcataacctctacaaagtgctggagagcgcccgcgaagagcgcggtggtatctcatttgaaagtgaagaagctaaattcatcttcaatgccgaacgccgtattgagcgtatcgaacagactcagcgtaacgatgcgcataagctgattgaagagtgcatgatcctggcgaacatctccgccgcgcgcttcgttgagaaggcgcaggagccggcgctgttccgtatccatgataagccaaccaccgaagcgattacctccttccgtaccgtgctggctgagctgggactggagctgcctggcggcaacaagccggagccgcgtgattacgcagagctgctaacctccatcgccgatcgcccggatgcggaaatgctgcagacgatgctcctgcgctccatgaagcaggcggtctacgatccggaaaaccgcggtcactttggcctggcgctgcagtcatacgcccacttcacctcgccgattcgtcgttacccggacctgtcgctgcaccgcgctatcaagtatctgctggccaaagagcagggacataaaggcaacagcaccgagaccggcggctggcactacagcatggaagagatgctccagctgggtcagcactgttcgatgaccgagcgccgcgccgacgaagcgacgcgcgaagtgtctgactggctgaagtgcgacttcatgcaggatcaggtgggcaacatcttctccggcgtgatcgccagcgtgaccggctttggcttcttcgtccgcctgaacgatctgtttatcgacggtctggtacatgtttccagcctggataacgactattatcgtttcgatcaggtggggcagcgtctcattggtgagtccggcggccagacctatcgcctgggcgaccgcgtggaagtccgtgtggaagcggtcaacatggacgagcggaaaatcgactttaccctgatctccagcgagcgtgcgccgcgtaatgtcggcaagaccgcccgtgagaaagcgaaaaagagtacctctggcaagccgggcggccgtcgccgccaggtgggtaagcaggtaaacttcgagccggacagcgctttccgtaaagagaaagagaccgcccgaccgaagaaagagaaaaaagcgaaaaaaccgtcggcgaaaacacagaaaatcgccgccgcgacgaaagccaagcgcgcggcaaagaagaagatcgccgagtgattgacctcccttcaccctgaagtctgctgacgcaggatggggtgaagggggcagataacagaacctaaaacgagtacatcaatgagtgaaatgatttacggcatccatgcggtgcaggcactgctggagcgcgcacctgagcgttttcaggaagtttatattctgaaaggccgtgaggataagcgcttgctgccgctgatccatgccctggaagcgcagggcgtggtgattcagctggccaaccgtcagtttcttgatgagaagagcgaaggcgctgtgcaccaggggatcattgcccgcgtgaagccggggcgtcagtatcaggagaacgatctgccggatctgctggcgcagctcgatcaaccgttcctgctgatcctcgacggcgtaaccgatccgcacaacctcggcgcctgcctgcgtagcgccgacgccgccggcgtgcatgcggtgatcgtgccaaaagatcgttccgctcagttgaatgcgacggcgaagaaagtggcctgcggcgcggcggagaacgtcccgctgatccgcgtcaccaacctggcgcgcaccatgcgtctgctgcaggaagagaacgtctggatcgtcggaactgcaggggaagccgaccatacgctgttccagagcaaaatgaccggcccgatggcgctggtgatgggcgcggaaggcgaaggcatgcgtcgtctgacccgcgaacactgtgatgaattgatcagcatcccgatggcgggcagcgtctcctcgctgaacgtctcggtggctaccggcatctgtctgtttgaagcagtacgtcagcgcagctaaggtattttttcagaaaaagccatcttaaataagatggctttttttttacgtctattgctaaaatatacaacgaagttgatatagattgtatttattatttaatacttaatatatggaataatatatgggatggattcctcaagcgctcgcgagtgcgctccagcaggcggctgagttaaatgtaaaaattgattataacgatcattcatttatcattataatgaatgattacggcgatctacgacttaatgtgttattcacctcccgacaaataattatcgaaactattatctgtccgctgagcgctattcaacggcaggacttgtttaacgccttcattttacgccatcaaaaattactccctctctcctcggtcgcgatatcccgccttaagaatgatgaatattatgtcgcgtttggtgccctgtcgctcaattcctcgctggaagatgtggtgctggagatcgcgacgctggccgctaatgcattagatcttgctgagttgatagaacaatatacgaacaaataacaaggaatgctattgatgggaatattaaagagcctgtttacgctgggtaaatccatggtctcgcaggccggagagacaattgaggaagcgcagggcgtcaggatcctcgaacaacatattcgcgatgcaaaaagcgcactggataaagcaggccaatcgcgtgtcgacctgctcgcacgggtaaaactaagcaacgataaactgcaagatctgcgtgcgcgtaaagacacgctggaagcacgtgccctggaggcgctgaataaaaatgtcgctgcggatttgattaacgaagtcgctacagagattgcccgcctggaaaacgagattgctgtagaagagcgagtgctcgctaaccttgaattttcgcgcgatggcgttgagcaggccgttcatgcgacagctcaacgtatcgcccagtttgaacagcaactggaagtcgttaaggcgacggaagccatgcagcgggcgcagcaggcggtcacaacatccaccctcggggcgtcttctcgggtctccaccgcggcggaatcactccggcgtttgcaaactcgccaggcggaacgccaggccaggctggatgctgctgcgcaactagaaaaggtggcggatggaagcgaccttgttgagaagctcgcgcaagccggcattggtacaaccgacaaaagctcggctgaggatgtactggcacgtcttcgtcaacaacagagcaaatgattgcggccccacggtcagttctgtcctgatgggcgagtctttgaggagtggtcatggcccatttttttcagcgtctttttgctaaaaagagtacgccgactcccgtacgcggtccgctggggttacatcttaaagcgggttttacgctggataccctggcgtttcgtctgctggaggataaccttctgattgagctgccgggcgaggcatataccattgccgcgaccggtcaaattgatttggggggcggcagccggatttatcgttactacaccagcggcgatgagtttctgcaaattaatactactggtggggcggatgtcgatgatatcgatgatattaagctctttgtctatgtccaaagcgatggtatcagccaggaaaaatactggcgttcggcaatcagcccagcgagtattggtaccccgacatttagctggcgccagcagcgttggcagcgtttttttaacggcggcgagccagggaacattgcgccagtttatatgctggagaaagtcgaaaatcagcagcatgccgtatgggaggttcataattttacgatgggctatcagcggcaggtagcagaagaaatgtgggagtacctgctgctaaacggagaagagtcgtttaatgaccggggagaatctgaatggctcttctcgtacgcgttgggagtggatattccactcacctcactggatattattgggtaatttcacggaagaaaaatatgcacgttctgaactcattactggctttttgtacctatttttttatcggtgcagcgatggtgatcttgtttctttttatctattcaaaaatcaccccgcataatgaatggcagctgataaaaaataacaatacgtcggcctcgctggcgtttagcggaacgctgttgggatatgctattccattatccagcgcggcgataaacgccgtcagtattgctgattatttagcctggggtgtcattgccctggtagtacagctgattatctatggtggtgtacggctatatatgccggcgctaagcgaaaaaattattaatcacaatattgccgcaggcttatttatgggctctgctgcgctggccggcgggatttttaacgccgcctgcatgacatggtaatggacgatcatggctaaaaaacgtaaatccagatcccgtaatacggcgcaaaataaagcccaggccactcacgcttccctcgcgcgggttaatcgcccggcgagcgcggtgcaggcaaaacgaaaccgctacagcggcaaatacctgaccctggctattatgggcggcgcggcgttctttgcgcttaaggcctgtagcgatgatacgaatgcggataatggcggtgacggcgtgttttactcctccgtcaatgattgtatcgatgggggtaacagcgccagcgtctgcactcacggctggaacaatgcgaagtcggaattttttgcccatgtgcctaagcaaatgagccaggaaagctgcgaggcacagtatgtcgactgctattttgacagcatcgatcggagctggacgccgatgatgagcggttttttactcagccgggcggtgcgtaaaggtcgcgatgaagaatatacctattacaatggcggctcgtcctattcttccagggctgtctggcgaacatcgtcgggcgcgtatgcctggcgcagtggtaaaaacgatattgccaccagccatacgctgactgcgaaaaaaacggcgactgtttctcgcggcggctacggacgatcgtccagcgcgcgcggccattggggaggttgaacgatgctgcgacacactattcctgtacgcagggatctggatcggattgcggacgaacacggtttcgattttcatgtaattgacaacgagatttactgggacgagagtcgagcctaccgctttacattacgccagatagaagagcagattgaaaaaccgaccgccgaattgcatcaaatgtgcctggaggtcgttgatcgagcggtgaaggacgaacagctgttgcagcagctggcgatcccaccgctatactgggatgcgattgctgaaagctggcgccagggggatccttctctctatggccgtatggattttgtatggtgcggtgccgacgctccgcttaagttgctggaatataatgcggatacgccaacgtcactttacgaagctgcctggtttcaatggttttggctggaagacgccagacgcagcggggtgatcccgcgtgacgccgaccagtacaatgcgattcaggaacggctgattgcccgctttagtgaactttacagcccggaaccgctctacttttgctgctgtgaagggagtgatgaagatcgcacgacggtgctttatctccaggactgtgcgcaacaggccggtcaggaaactcgttttctctatgttgaagagctgggactcggcgtcggcggtatgctgaccgatttggatgacaacgttatccgtcgggcgtttaagctttatcccctggagtggatgatgcgagatgataatggcccgctgctgtgtaagcggcgagagcggtggatcgaaccgttatggaagagtgtactcagcaacaaagggttgatgccgctgctatggcggttctttccccgtcatcctaatctgctacccgcctggtttgccaatgaatcgccacagatcgcgccgggcgagagctatgtgcgtaaaccgatcttttcacgtgaaggcggcaacgtcaccatctttaatggtcagcagcagattatcgaacatgctgatggagactacgcagaagagcccatgatctttcaggccttccagcccttgccgcgctttggtgacagctacacgctgattggcagctggatcgtggatgatgaggcttgcgggttggggatccgggaagataataccttgatcactaaagatacttctcgttttattcctcactatataaccggctaaggctgcttttgtgatctctctccatcgccagtggccgggtcctggccatacttatggctatcgccattgatggagggagacacgatgcactggcaaacgcacaccgtttttaatcaacccaccccgctgaataacagcaatctgtttctgtccgataccgctctgcgtgaagcagtggtccgcgaaggcgccggctgggatggcgatctgctcgccagcattggccagcagctggggacagccgaatcgctggagctgggacgcctggccaacagcaatccgccggagctgctgcgctatgacgccaccggcgcccggctggacgacgtgcgcttccatcccgcctggcacctgctgatgcaggggctgtgcgcgaaccgggtacataatctcgcctggcaggaggatgcccgcgaaggcgcgtttgtcgcccgcgccgcccgctttctgctccatgcccaggtggaggccgggacgttgtgcccgattaccatgaccttcgccgcgacgcccctgctgcagcacgccctgcccgcgccctttcgcgactggctgtcgccgctgctgagcgaccgttacgatccgcaccttgcgcctggcggccagaagcgcggcctgctgatcggcatggggatgaccgagaagcaaggggggtctgatgtgctgagcaataccactcgcgcggagaaaacggcggaagggttttaccgactggtgggacacaagtggttcttctcagtgccgcagagcgatgctcacctggtgctggctcaggctccggcggggctctcatgcttctttgtgccgcgtctgctgcccgacgggcagcgtaacggcgtgcgtcttgaacgcttaaaagagaagctcggcaaccgctccaacgccagtagcgaagtggagttttatgaggcctgcggctggctggtgggcgacgaaggcgacggcgtgcggcagatcctcaggatgggcggcctgacccgctttgactgcgcgctgggcagccatgccctgatgcgtcgcgccttctcggtggcgctgtatcacgcgctacagcgtcaggcgtttggcaaaaacctggtcgaacagccgatgatgcgccagctgctggggcaaatggcgctccgtctggaggggcagaccgcgtttctgtttcgcctggcgcgggcctgggaccatcgggatgatgcccgggaaagcgcctgggcgcgcctgtttacgcctgcggccaagtttgccatctgtaaggccggtatcccgtttgtcgccgaggcgatggaagtgctgggcggcatcggctattgcgaggagagcgaactcccgcgcctctaccgtgagatgccggtcaacagcatctgggaaggctccggcaatattatgtgcctcgatgtgatgcgggtgctgagcaagcagccggcggcgatggagctgctggccgcggagtgtgcggaggtgaaaggacagaaccgccatctcgaccgcgcatggcgtcagctgcagcaactgctgaaacgacccgccgaagagcaggggagagagattgcccggctggtctatcgtcttggcgcgggggcgcagatgctgcgccatgcttcgccgccgctggccgaagcctggtgccggatgatgctcgacacccgcggcggcatacgtcttgacgcgccgaccctcgacgacctgctgctgcgggctatggggcgcgggcgccaggcgcctcaggcgtagagaatggcctgcacgcgccagctgtccggctgttgttcctcgtacatctgaataatgcgataccaggaggcgccttgctcgtctgctttgcgggcaatggcgtgctctacatcctgttggctaccggaaagattagtgacggagatcagaccgatttcattcaggccagtgacgcaatccgcgctggcgaattcggctgactgcgcggacgtattggccgtcgcagcggttaacagcaggctggatagggtaaaagatcgtttcatcgtcagctccatttcacgtagtcccaagggcagtccgttgctaacgtcctgccaggtggttggccgaacgttattatgcacaggagaacgtgaatggacgcaaagctgtgtaaagcagatttaaagacgccgcctcgttatcgacgatagaggatcgcctgcgaataccactggccgggtaccatggtgtcatcgatcatgatgatgacgtagtaatcggctttggccgcttctgctttggccttcagcgccgcttcgacatccatcggcgaaccgtacatcagtacgctcaccgtggccattttatgcaggccagccgtctggtagcgctggatctcctgcggatggtcggtggcgggcggcggggcttccggcgttccctgcagggcgctacacccgctgaggacgatagccagtaaccacggtgaaaacctgcgcataaccatatctcgtttcctgatagtgatagtgtagtggtagccttaacaggattgccggggaatgttcccgaactgttatctctgacgcgattttcgaatgaaaatgttgtgaaagcgtaaccgggttctcaacattatgaatcgtagcaaactgggttgcctggtgaatgaattttcccatgacgcctaaccacgatagagaaggaagacgataaatgattgcactagaaatgcgcaacctcggcggtggtgaaattttacatgcctgtccgcaggagagtctggataagcccttgccctgtatcgtcttttatcatggctttacctcgtcgaagctggtctacagctactttgcggtggcgctggccgaggccggattccgggtgatcatgccggacgcgccggagcatggggcgcgctatcagggcgatgaggccgggcggatgcagcgcttctggccgattctgcagcagaatttcagggagtttcctgcgctgcgcgaggcgataatcgctgaaggatggctggaaggggagcggctggcggtggcgggcgcttcgatggggggaatgacggcgttgggcatcatgacgcatcaccccgagctgaacagcgtcgcctgtctgatggggtcgggctattttcgttccctgtcgcaaaccctgttcccctcgcctgattttgatgtcgatagcctcaacgaatgggatgtcagccatcagctggcgtcccttgcccggcggccgctattgctctggcatggcgatgccgatgacgtggtgccgccggaagaaacctttcgactagaacaggcgctccggcaggcggatcttgccgccaggctgacctgtgtctggcagaaaggcgtccgccatcgcattacgccagaggcgctggctaccacggtcgccttttttcagcagcacctttaaacgcggattacgctgacgccctgatcctcaagctgtttgaggatcgcggcatcggcctgtttgccggtgatcaccacgtctatttgtccggcctggctgaatagcatcccggctcgctcgccgatcttgctgctgtcgaccagcaccgccagtttgccgaccacgttaagcattttttgctcggccatggcggtcaacatatccgttttgtagaggccttcggcggtgagccctttgccgctggtaaacatccagtgtccggcatagaggctgttctcgctaccgtgggggctgagggtgatggcgtggctgcggttgtactggccgcccatgataatcacgctgtcatgctcctggtcgatcaggtagttagccagcggcagatagttggtgatgatctgcaccggtttgccgcacagttcccgacccaacagaaaggcggtggagccgcagttaatgacgatgctctcacccggcgcgatcagttgcgaagcggcgcgtgcaatacgcactttttcatccagattttgcgcctggtggatgttcatcggcgtccagcgggggcgctgttcgctaatggcttccgcgccattacgaacctttttcagtttgccgctttcatccagcttgttgatatcacgtcgggcggtagcgggtgagatcccgagccgcgacatcacctgctccacggtaacaaaccccgtttgggcgagcagatccagcagaatttggtgcctttgcgcttccgtcatgagcgaatccgattaaaagtgaacggcaaagatgatatttgaaatcatgtgaaaatactaaccctgcggcggggtatttccggcaggcagggcctgccggcggcgacttacaggaaggatttgaaaggcagatccggctcaatggtgaagcaatcgttgaaaccgcgcgggtagtgatattcgaaattgtctttatccagcggccaggtaaatttgccgccgacctgccagataaacggcttgaagccgtacttcagacgatcctttttcatctcccacagaacgcggatctcctgcggatcggcctgaaagtttgaccagatatcatggtggaacgggatcacaactttggcgttgagcgactctgccatgcgcaggatatcggcgctggtcattttgtcggtgatcccgcgcgggttctcgccatacgagccgagggcgacgtcaatccgatgctcgttgccatgcttcgcgtagtagttggagtagtgggaatcgccgctgtggtacaggttgccgcccggtgttttaaacaggtagttgaccgcgcgctggtccatgccgtccggcagtacgccagcggctttttggtccgccgggagggtgatcagcgcggtgcgatcgaacgcatcgagcgcatggatctcaatgtctttgatcttcacgacatcgccaggtttcatgacgatacagcgcgctttcggcacgccccaaccgatccacaggtcgacgcaggttttcgggccgataaacggcacatcggccgggcagttctgcatgacggcggcggcgacgttgacgtcaatatgatcgttgtgatcgtgggtcgcgaggaccgcgtcaatctggcgaatggcgaacggatccagcacgaacggcgtggtgcgcaggttaggctgtaattttttcacgcctgccatccgctgcatctggtggccagttttcatcagcggattgccgtggctctgtttgccagtgccgcaccagaaatcgacgcagacgttagccccgccttcggattttaaccagataccggtacagccgagccaccacatggcgaaggtgccgggcgcaacctgctcctgctcaatctcttcattcagccagctgccccattccggaaaggtgttcaggatccatgattcacgggtgatggtctgtactttactcatcgtgctcttcctcgtattttcaatagtaatcaaattttgattggttttgatttatgttgtcactggattttcaagattgcaatcttgttttccatcaattttacgaagatatgcgcatcacctctcaagggttccagcatccataaaggttgtgcttttctttatctatatgatttgaaaatgtttaattatatttctgcgctactgatcggcaatagtcacaatgaaatagaggattattgcggcgcgcgtcacatttaatcaaattcaatcttgttgtgattatttttgattattagagtgggcagcgagaaatgctgagcgtaaggcgcgttcagcgccttcaccatcgggagtgtgttatggcaatcctctacaacatctttaccgttttctttaatcaggtgatgaccaatgccccgctgctgctgggtatcgtcacctgtctgggctatatcctgctgcgcaaaagcgtcagcgtgattattaaaggcacgatcaaaaccattatcggcttcatgctgttacaggccggctccggcatcctcaccagcacttttaaaccggtggtggcgaaaatgtcagaggtgtacggcatcaacggcgcgatctctgacacctatgcctcgatgatggcgaccatcgaccggatgggcgaggcctatagctgggtgggctatgcggtgctgctggcgctggcgctcaacatctgttacgtcctgctgcgccggataaccggcatccgcaccatcatgctgactggccatatcatgtttcagcaggcggggctgatcgccgtctcgttctttatctttggttacggaatgtggacgaccatcatctgtaccgccgtgctggtctccctgtactggggtatcacctccaacatgatgttcaagccgactcagctggtcaccgacggctgcggcttctccatcggtcaccagcagcagtttgcctcgtggattgcctacaaagtggcgccgtatctggggaaaaaagaggagagtgtggaagacctcaggctgccaggctggctcaatatcttccacgacaacatcgtttccactgcgattgtcatgaccattttctttggcgcgatcctgctttcctttggtattgacgtcgtgcaggcgatggcggggaaaacccactggacggtctatatcctgcagaccggtttctccttcgcggtggccattttcatcattacccagggcgtgcggatgttcgtcgccgaactgtccgaagccttcaacggtatctcgcaacgcctgatccccggcgcggtgctggcgattgactgcgccgcgatctatagctttgcgccgaatgcggtggtgtggggctttatgtggggcaccatcggccagctgattgccgtcggcattctggtaggcattggctcttcaattctgattattccgggctttatcccgatgttcttctccaacgcgacgattggcgtctttgccaaccacttcggcggctggcgcgcggcgctcaaaatctgcctggtgatgggcatggttgaaattttcggttgcgtgtgggcggtgaagctcaccggtatgagcgcctggatgggaatggcggactggtcgattctggcgccgccgatgatgcagggcttcgcctccatcgggttggcgtttatggctgtcatcatcctgattgctctcgcttatatgttcttcgctggccgcgcgctgcgcgccgaagaagacgcggaaaaacaactggcagaggcctctgcccaataaggagttctgattatgaccgtacgtattctggctgtgtgtggtaacgggcaaggcagttctatgatcatgaaaatgaaagtggatcagttcctgacgcaatccaatatcgaccacacggtgaacagctgcgcggtgggtgaatacaaaagcgaactaaacggcgcggatatcatcatcgcttcaacccatatcgcgggggagattaccgtctccggcaataaacacgtggtgggggtgcgtaatatgctttcccccgcggatttcgggccaaagctgctggaggtgattaaagctcatttcccgcaggacgtgaaataaggagcggctatgaaactccatgaatcactggcgcagaatcactccattcgcctgcaggcggaagcggaaacctggcaggaggcggtgaaaatcggcgtcgatctgctggtggccgccgacgtggtggaaccgcgctactaccaggcaatcctcgacggcgtcgcgcagcacggcccctattttgtgatcgctccgggattagccatgccgcacgggcggccggaagagggcgtcaaaaaaaccggctttgcgctggtcacgctaaagaaaccgctgattttcaaccacgaagataacgacccggtcgacatcctgatcaccatggcggcggttgacgccaccacccaccaggaagtgggcatcatgcagatcgttaacctgtttgatgacgaagccaatttcgaccgtttacgcgcctgccgcagcgagcaggaagtgctggatttaatcaaaaacgccaccgcggcggctgtttaaaaggaacactatcatgtcattacctatgttacaggtcgccctggacaaccaaacgctggccagcgcttatgaaacaacccgtctgatcgccgaagaggtagatatcattgaagtcggcactatcctctgcgtcggtgaaggtgtacgcgcggtgcgcgatctgaaagcgctgtatccgcataaaatcgtgctggcggacgccaaaattgccgatgccggcaagatcctgtcgcggatgtgcttcgaagccaacgccgactgggtcacagtgatctgctgcgccgatatcaacaccgccaaaggggcgctggatgtcgccaaagagttcaacggcgatgtgcaaattgagctgaccggcttctggacctgggagcaggcgcaggcgtggcgcgaggcgggtattcagcaggtggtctatcaccgcagccgcgacgcgcaggcggcaggcgtggcgtggagtgaggcggatatcagcgcgattaagcgtctgtctgatatgggcttcaaagtgaccgtcaccggcgggctggcgctggaagacctgccgctgtttgccgggatccctgttcacgtctttattgccggacgcagcatccgcgatgctgcctcgccggtggaagcggcgcgccagtttaaacgctctatcgcccagctgtggggttaaggagcgactatgttggcgaaatccattccgctcggcatctatgaaaaagcgctccccgccggggagtgctggctggagcggctaaagcttgcaaaagcgctgggctttgatttcgttgagatgtctctcgatgaaacggacgcccgccttgcgcggctggactggagcccggagcagcgtctggcgctggtcaaggcggtggctgaaaccggcgtccgggtgccgtcgatgtgccttagcgcccatcgccgttttccgctgggtagtgaagacgacgcggtgcggcatcaggggctggagatcatgcgtaaagctattcagctggcgcaggatgtggggattcgggtgatccagctggcaggctacgacgtctattaccagcaggcgaacgatgagacgcgccgccgctttcgtgacggcctgaaacagagcgtcgagatggccagccgagcccaggtaaccctggcgatggagatcatggactacccgctgatgaactcgatcagtaaagcgctgggctatgcccattacctgaataatccgtggttccagctttacccggatatcggcaatctgtcggcgtgggataacgacgtccagatggagctgaaggcggggagcgggcatatcgtggcggtacacgtcaaagacacaaagcccggcgtctttaaaaacgtgccgttcggcgaaggggtggtcgattttgaacgctgcttcgaaacgctcaagcagaccggctactgcggaccgtacctgattgagatgtggagcgaaaccagcgctgacccgctggcggaggtggcgaaggcgcgtgactgggtgaaggcgcggatggcccgcgcgggcctgatggaggcggcataatgcaacagctgaaacagcaggtgttcgaggccaatatggatctgccgcgctacggcctggtgacctttacctggggtaacgttagcgccattgatcggcagcgtgggctggtggtgattaagcccagcggcatcgcctacgagtcaatgaccgtcgatgacatgtcggtggttgatctgcaggggcacgtggtggaagggcgctggcgtccctcctctgataccgccacccatctggcgctctatcgccgttatcccgaccttggcggggtggtgcatacccattcgacgcacgccaccgcctgggcgcaggcggggctggcgatcccggcgctcggcaccacccatgcggactacttcttcggcgatattccctgcacccgggcgcttagcgcacaggaggtggacgaggcctacgagctgaacaccgggcaggtgattatcgaaacgctgggtgaggccaatccgctgcataccccggggatcgtcgtctatcagcacgggccatttgcctggggcaaagacgcccacgaggcggtacacaacgcggtggtgatggaagaggtggcgcgcatggcgtggattgcccgcggcattaatccgcagttgcagcccatcgatagctggctgatgaataagcattttcagcgtaagcatgggccaaacgcctactatgggcaaaagtagatagcgcgctccggggctttcacccctcacggtgaagcaactggtctggccccggagccgtttttaatcctgacgataggccgacggcatcacgcgcatgccgatgagcgtgaccacgcaaattatcgccccggcgtaaaacgtcgaggcggcgccgaaggtttcccacagtacccccgcgccggtgctggccagcagcagagccaggccactcatcagattaaacataccgaacgccgtgccgcgtagctccggtggcgccgtatgggcgaccatcgccgccagcaggccctgggtcattcccatatgaatcccccacagcgcgacgccgatcagcagcgtgctccagtggccgctgagcgccagcacgatatcggcgaggatcagcaccagcagcccccactgcagcagtttgctgtggctcatgctgtctgagagtttaccgaacgggtaagccgtgaggctgtagaccaggttcatcgccaccatcaccagcgggatggtaaagagcgggatctccatctgctgggcgcgcagcaccagaaaggcttcgctgaagcgggcgagggtgaaaatgctgccgatcgcgaccacccaccagtaggcggcggagagctttttcaggttttcgcgcttcagcggattgctgcgtttgtgcgcgatggcggattttggctcctgtaggccgaatccgagcaggagaatggagagcacggcgggaatgaccgccacccagaaaatagcgtgaaaatcgttggcccagataaacatcagcagcaccgccagcagcgggccgagaaaggcgccgacggtatccagcgcctggcgtagtccgtaggcggcgccgcggatctccggcggggtgacgtcggcgaccagcgcatcgcgcggcgcgccgcgaatacctttgcctacgcggtcaatcatgcgggcgctaaacaccaccccggcggtaggggcgatggcaaacagcggtttactgagcgcgcccaggccgtagcccagcagcgccagtcctttacgcttgccgacatagtcgctgattgcgccggagaagaccttcaggatcagggcggtggcttccgccagtccctcgataagaccgataattatcacgctggcgccgagggtagtggccataaacagcggtaagaggctatggatcatctcggaggagacatccatcagcaggctgacgccgccgagtacccaaacgcctttggggatacggcctaaggtggcgaaacgcggaaccatcaatcactcctgattatcaaatggcgagtggctgattaaatcaggttgcgatgacgctggtaagtcggtttgtaaaataattctcaattgcgtttgggcgcagacctcgcttcgcccctcgcgaggagaggcgaagaatcgggcaggcgttagcggtatatcaccgcgctggcgcgaagcgggccgttggtttcgggttcgtgcatcaggataggctgaaagtatttcgccccctgcgcatcgctcatctggctaagggcctgttcggcctcgtgctcagtggccatattgtgattgatatagataacgccgaggctctgcacgtcgtccatgttgcgggcctgacgttcggtgatttggatagctgccagcgcgttggcgctgaagaaaagcgcagccatcatggcgatgattttcagtttcatatactacgctcctgactgacagtcctgacgctgactcggggctctcctgtgatcgttgggctttgatagaagtgtaatcgctgcgcgttcatcgcatggcgaccttttctgatgcagttgttcaaaaaaatgccgcttcctttattggttaattttaaatcacccacttagcccagcttggcgcttagtgcgaattatttgtgcaaatgcgcttgtgttcctgaggggccgccattagaatgacgcgtcaatttttcagccgccctttaacacgttccttgcctccatgggccgcggctgacccagacaggaggctgaataatccgtaaggagcaattcgatgcgtcattacgaaatcgtttttatggtccatcctgaccagagcgaacaggttccgggcatgatcgaacgttacactggtgcaattactgcagcagcaggtacgatccaccgtctggaagactggggccgccgtcagctggcttatccgatcaacaaactgcacaaagctcactacgttctgatgaacgttgaagcgccgcaggaagcgatcgatgagctggaaactaacttccgcttcaacgacgccgttatccgcagcatggtaatgcgtactaagcacgctgttaccgaagcatctccgatggttaaagcgaaagacgagcgccgtgagcgtcgcgaagatttcgccaacgaaaccgcagatgattctgaagctggggattctgaagagtaatcctgatgaccaaccgtctggagctgtccggcattatttgcaggactccacttcgtaaggtcagcccgtcaggaattcctcactgccagttcgtgcttgagcatcgttcagtgcaggaggaagccggttttcaccggcaggcatggtgtcagatgcccgttattattagcggtcacgaaaaccaggccattactcacagtataacggtcggtagcgcagtaaccgttcgagggttcatctcttgccataaggcaaagaacggcttgagcaaaatggttctgcatgccgagcagattgaattgatagattctggagactagccatatggcacgttatttccgtcgtcgcaagttctgccgtttcaccgcggaaggcgttcaagagatcgactataaagatatcgctacgctgaaaaactacatcaccgaaagcggtaagattgtcccgagccgtatcaccggtacccgtgcaaaataccagcgtcagctggctcgcgctatcaaacgcgctcgctacctgtccctgctgccgtacactgatcgtcatcagtaatcggtcacggtccattaatacgactttgagaggataaggtaatgcaagttattctgcttgataaagtagcaaacctgggtagcctgggtgatcaggttaacgttaaagcgggctacgctcgtaacttcctggtcccgcagggtaaagctgttcctgctaccaagaaaaacgttgaattcttcgaagcacgtcgtgctgaactggaagccaaactggctgacgttctggcagcagctgaagctcgtgctgagcagatcaacgctctggaatccgtaaccatcgcgtctaaagctggcgacgaaggtaaactgttcggttccatcggtactcgcgacatcgctgacgctgttactgcagcaggcgttaaagttgctaagagcgaagttcgcctgccgaacggcgttctgcgtaacgttggcgagcacgaagtgaacttccaggttcacagcgaagtattcgctaaagttatcatcaacgtggttgctgagtaatcggcctctgacgttctggtaacaacaaaccgccggccttgtgccggcgttttgctttttagcgcctttcattttgcggcggcgtaacgcttgctgtcgtcttctctgctatcgcgcacgcacaaagctgccgttcgactggcgggtaaacagcacctgctggccgttgccggtatcgatagtgagcccggtgaccacgccgttggcgttctgccgaatctgcaccgtctgtccgctctgcaaagtacttagcggcttgccagcgccttcaacctgcgccatggcgtagacgtcagtggccggcagcccatgatcgcggaacagctgcgccagggttttgcctgactcgatgcgataggtccgccattgctgctcaatacccggcgcggactgctgtgatgaggattgataaggctgggtggcggcgggctgctgcgtctgcgcctgatccggctgctcatcctgaatcggctccggagcgaccggcgccatctgatcggcgtcgctcacggtaggcgtattagtgatcggcggcagcggaacggcctgattgccgccagcttgcggctgggactgcgactgtagattcaggttcgcttcacggctggtggacgccgggctttggctatcatcggagggaagcagaataccgataataaccaacaggaagccagcgataattccccggcggtgcatcggaggcagcgggtccaggaggcgaaaatgatccggggcgtgccagattttcgccagggtagatgtcagttcaaagcgcccgggcatggctttcctcctgctccgcatatttatatcctgctcatgagtatagatggctaacgtcctgatgaccggaacaaagtgaagttaacctgctgccgcctattgtttctttttcgctgagatttgtcatcatccgccgacaaagttttacccatttcgctatggctgttatgctttcgcacgcttttatcttgatggttatcacccaaaaaggaacgacgatggcaaccccaacttttgacactatcgaagcgcaggcaagttacggtatcggcttgcaggttggacaacagctgagcgaatccggcctgcaggggctgctgccggaagcgctggtggcgggtatcgccgatgcgctggaaggtaaccagccgcaggtgccggtggaagccgttcaccgcgcgctgcgtgaaatccacgagcgtgctgacgctgtgcgtcgcgagcgttttcaggccatggccgctgacggccaaaaataccttgatgaaaaccgcgagaaagagggtgtgaacagcaccgagtctggtctgcagttccgcgtactgacccagggcgaaggcccgatcccggcgcgtactgaccgcgttcgcgtgcactacactggcaaactgatcgacggcaccgtcttcgacagctccgttgctcgcggtgaaccggctgaattcccggtgaccggcgtgatcggcggctggattgaagcgctgactctgatgccggtaggttccaaatgggaactgacgatcccgcacaacctcgcctacggtgagcgcggcgctggcgcatcgattcctccgttcagcaccctgatcttcgaagttgaactgctggacattatctaaacagcagcggcttcctcttccccgcggcaggggaagccataaaaatagcgtaaaatccttaagttaaaaattaattggaattatgttttgcattcatcacgtatgggtgtatttttgtgagctatttcgcgttagatgagtgatataacactcactttaaacataaaattaacattatatctaaatcatagtattcatccctccgattcttacctaatatcgactagcccttgctggggttaatgacagacgacgggccatcagagcctgaacaacacagacaggtacaacaggaagaaatcacatggtagatcaggttaaagtcgctgctgtcgagcaggagccgactgaacaatcgctacggcgaaatctcacaaaccgacatattcagctgatcgcgattggcggagcgatcggcaccgggttatttatgggttctggcaaaaccatcagccttgccggaccatccattatctttgtttatatgattatcggttttatgctgtttttcgtgatgcgtgccatgggcgaattactgctgtcgaacctcgaatataaatcctttagcgacttcgcggccgatctgctggggccgtgggcgggctactttaccggctggacctactggttctgctgggtagtgaccgggatggcggacgttgtcgccatcaccgcctacgcgcagttctggtttcccggactctccgactgggtcgcctcgctggcggtgatcctgctgctgctgggcctgaacctggccaccgtcaagatgtttggcgaaatggagttctggttcgcgatgatcaaaattgtcgccatcgtggcgctgatcgtggtcggcctggtaatggtgatgatgcatttcaaatcgccgaccggggtcgaagcctctttcgcccacctgtggaatgacggcggctggttcccgaaagggctgagcggcttcttcgccggcttccagattgcggtgtttgccttcgtggggattgagctggtgggtaccaccgccgccgaaaccaaagacccggaaaagtccctgccgcgggcgattaactccatcccgctgcgtatcattatgttctacgtcttcgcgctgattgtgattatgtcggtgacgccgtggagctccgtggtgccgagcaagagcccgttcgttgagctgttcgtgctggttggtctgccggcggcggcgagcctgatcaacttcgtggtgctgacctccgcggcctcctcggccaacagcggcgtgttctctaccagccgtatgctgttcggtctggcgcaggatggtcaggcgccgaagatgttcgccaagctgtcgaagcgtgcggtgccggcgaagggcttaaccttctcctgcatgtgtctgctgggcggggtggtgatgctgatggtcaacccgagcgtgattgccgccttcaccatgatcaccacggtgtcggcgattctgtttatgttcgtctggaccatcatcctttgctcttacctggcgtatcgcaaaaaccgccctcagctgcatgagaagtcgagctacaagatgccgctaggtaaagtcatgtgctgggtgtgcatggccttcttcgtctttgtgctggtgctgttgaccctggaagacgatacccgtgaagcgctgatggtcaccccgctgtggtttgtgctgctgggcgcgggctggctgtttgccggcaaaaaacggctggcgaaataaacgaaaattttaacgttgcttgcaacggcccgtcataaaaaaggccacccagagtggccaaataagacggacaatgtcgagggcgcccgcgggcgcctttttctttactttccgccgagggcgcgcgggaacagcacattattttccaggctgatgtgttccatcagatcgtcgatcatctcgttgataccgttatacatcgccttccaggtggtacaggcttccggcggcggcgtcacgttgtgagtgatgtgcttaatgacttccagcagttcacccgcttcatcatgctcgctttccatcacgctgatcggccccccggcctgggcgcccattccctgtttaatcatcgggaacaggatctgttcctctttcatcatgtggctggaaagctcctgatgcagcatggtcaggtacttagtcagtcctttcggcacgttcggtttatcggcatggacgcgttcaaccttggtggcctgcaggatcagctccggcagctgttcacggtgccggtcgtgatagcgaacgatgatatggtcgataatctccgcgaggggcgccgcgcgccagtcgcgggagagaggctgttcggccagtttcgccagctcggcttcaatcaccgcgacatccagcgctttgcgcgacgcggcgcgcgccagggtctgtttgccgccgcagcagtaatccatatcgtattgacggaacagggcggaggcgcgcgggatggtcagcgccagctcgcctaaaggttggtcacggaaagccatagcagttacctcgtcatcaggaatataagatgtattttaaatgcatctttttggcgagggaataccccttaaggaggcgaggctactttttttcgtccgccagcggctgcagcatcggtttttccggtctggcgcgtacggcagagaccacgccgagcaccagcagcaggatcccgctcagggtcagcagcggcggtaagctttgccgcagcaggaaggtatacagcagtccggccagggtttcgaagacgataagcgggccgaggatcaccgtcggcagccgctggctggcaatattccagcatagcgcgccgacccatgagcagagcaccgcgatggccagcatcagcgtaataaacaccgccggacgcgggccgaagggcaggggaaacccggcctgctgaccgtgcagccaggcgcaggcggcgagatagccggccagcgaaaccggaagcgtcaccagcgcctgagcggtagcccacatcattggcggttgatgcgggttctcccgcagccagcgggcgttgcgcagagcataccaggcccagcagaccaccgatcccagcgccagcgcaatgccggagccgtagcgccacgggctaaaattcggcagcccctgacgcagctccgcgacgttaacgcagatcaggcccacggcgatgcagatcagcgccggaaacaggcgccgccacggcagcttcccgtcgcgctggctgtagagcagattggcgaacaccggcagtaccaccggcagcgtgccgataatcatggtggaaaccggcgccccggtgcgctgaatggcgctggccaggcagacgtaatagataaggttccccatcattgtcaggcccagcgcggtccaccagtcgtgccggctcaactggcgcagtcgcgcgcgcccgagccacgccagcggcagggcgatcaggcccagcgccagatagcgtcccatcgactgcagcatcgccggatactctggcaccagcaaaggcccgacgaaaattaaaccccacatcagccccgccagcagggcgtataacacaccactaatcatcattgcatccgttgtcattaccgttgtctgcagtgtagaagggggtcgggcaggaatattgtatgagattgcgcattagcgcctggcgacctgcttctgatagcgcaccggcgtaatgccgtaacgctgggtgaaggcgcgggtcaggtgggactggtcggtgaggccgacggctatcgccacttcggcggcgggcatgccgtgggtgaggaacgctttggcgcgccacagacggatggccatcagcatctgatggggcgttacgtgatagtgggctttaaactggcgctgaaagtggtacgggctcagcgccgccacctgcgccagctcgtcgagggtgatgggacgcatatagttatcgtgcaggtagtcgcgcacgcggtcaaagcgatgcccggcctcaccctgcgcagaggcatggtgggccagagggcggaaggcgtcgatgaggtcgagcagcagtccctgctgggccagcggatcgtcgctatgccacaggccataaatcagctggccaatctgtcgggaacgcaggggatcctcgcggaccacctcgctgaaccaccagtcgcgcaccccggtgatggcttccagacggtccggctccagataaatcatccggtagcgccagccgtcggcggtttccgcttcgccggtgtgcagctcgtcgggattcatggtgacaatggagtttgcggcggcaatatgctgactgccgcggtagcgaaagcgctccgcgccttgctcaatcacgccgatgccgaaggcttcgtgggtatggggttcaaaggcgtagcgggatatatgggcgtggtaaagctccaccccgggcagctgttcgagatggcgaaagcgcgcgcggtctttttcatcactaaattggagtggtacgccctgcatgcctgcctcccgacggttatcccttcaatatgagagaggaaccgccgggacgcaaccgcaaaagctgagaggggcggttacagaatgcctttcacgctttcagcaagggaggtggtcgggcggccgatcagcgtactcagggtgcggctgtcgtcaaacagtccgcctttcgacgcgccgacatcggaatccgccagcatatcggcaagcccggccggcaggccgacgcttttcagcgcggcggcgaaatcggcttcgctgaggttctggtagaccacgtttttcccgctttgcttgctcagctcggcagccaggtcgctcagcgtccaggcgttatcacccgccagttcgtaaattttgccttcatgaccctcactggcgataacgcgggcggcagcggcggcataatccgcgcgggtggcggaggcgattttaccctcgccggcggcgccgataaacacgccatgctccagcgccggcggcgcgctggccagatagttttcggtataccagccgttacgcagcagggcgtaagcgataccagagtcggccagcatctgctcggtttcgatatgctctgcggccagacccagcggcgaagtgtcggcatgcagcaggctggtataggcgatgaatttcaccccggcggctttggcggcgttaatgacgttgcggtgctgtacagcacgctggccgacttcgctggaggagattaacagcagtttatccacgccctgcagcgcggcggtcagcgccgcttcgtcgctgtagtcggcctggcggacaaccacgccctgctggctgagcgcctgggctttggccgggttgcggacaatcaccacaatctggctggcagggacggtgttaagcaggtcttgcagaacgtagtggccaagctggccggtggcaccggtaagagcgatcatgggtcttctccttcgtgtttattggcagttgtggtaagctaccaccttaactaacttttagtaagtacgtacaaaaaggtaagtgtgaaatggccgaaccgacgctgagcgagaaactgcgcaccggcaatttgtttgcggaacagtgcccgtcgcgcgatgtgcttaaacatgtcaccagccgctggggcgtgttgattctggtggcgctgcgcgagggaacccaccgtttcagcgatctgcgccgtaagatgggcggggtcagcgaaaagatgctggcgcagtcgctgcaggcgctggagcaggatggttttatcgaccgcgtctcttatccggtggtgcccccgcacgttgaatatagcctgacgccgctcggcctgcaggtgagcgagaaggtggccgccctggcggactggatcgaggttaatctgccctcggtgctggctaaccacggggagtgaaaatgtatcactccctgtagccccggtaagcgcagcgccaccggggaacaggcattacttgctcaaatccagctgataaatggcgaagccgatatcatcggtggccacctggcgcattggatactgcgctttctctttgataaacgccgcggctttgtcgccaggcgaggtctcaaaacgaatatccaacggcgtgttgctgtggatcggcgccagacgccagttgttatccgccgccggatggatcgcgccttccttcttcgattgcgcgccaatccacgccgccagcaccgaacggttttcatccggtgaggcgaaggcgatatggctctcaccggtgccggcgaatttgccgccgtaagcgcgatagttattggtcgcgaccaggaaagtagcctgcggatcaaccggttttccattgaaggtcaggtgcttaatacgctctgcctgcggatggatcatctgacattcgccgtcgtagcgggccggctgagtgacgtcgatctggtagttcaccccgtcaatgacgtcgaagttgtaggtgcggaagccgtcccagttgatcagcgactgcggcttgctgctggcgggatcgatctggttaaactgtccggcagagcattccagccactccttaacctctttcccgctgaccttcatcaccaccagggtgttggggtagagatagaggtcggcggcattgcggaaggtgagctggcctttctccacttcgacaaagctcgccggatcgtttttacgcccgccgactttaaacggcgcggcggcggagagcaccggcagcttcgccagatccgggtcgccctgaatatagtgttcgacgtaggctttctgcgccatgttgaccacctgcaccgtcgggtcgtcctgcaccagcgccagatagctgtacatgttgtcggcggacttgccgatcggcttgctgacgaattcgcgagtggcgtcatgatcggctttcagcaccgccaccagcttgccatcttcggccgccagtgatttcttcgccaccgcgtcatagattggccgcgcttccgctttactctgagttacctgccatttaccgctgtcgttatttagcaccagatcgaccaccccgagatgatcgccccacattcccggcatcaccgccggtacgccgttcagcgtccctttggcgatatccgcgcctttgatgttggcgaagtctttacccgggaacaccgcgtgggcatggccgaacataatggcgtccacgccgggcacctggcttaagtagtaaaccgaattctcggccatcgcctgatacgggtcggcggagaggccggagtgagcgaccactaccaccacatcagcccctttcgcccgcatctccgggatatatttgcgcgcggtttcggtaatgtcattgaccgtcaccttgccgttaagattggctttatcccaggtcatgatctgcggcggcacaaagccgatatagccgatgcgcagggtgtgggattgaccgtcgctgtccacgacccgggtatcctggagcaggtacggcgtaaacatcggttttccggttttggcatcgatgatattggcgttcacgtaggggaacttcgccccggccagcgccttgtgcaggaagtcgagaccgtaattgaactcatggttgcccaggttgccgacggcgtaattcagggtgttcatcgccttatacaccggatgtacatcgccctctttgagcccttttgccgccatatagtcgcctaacgggctcccctggatcacatccccgttatccaccagcacgctgtttttaacttctgcccgcgcctgttcgatcagggtggcggtacgcaccaggccgaatttctccgtggcggcatctttgtaatagtcgaagtccatcatattgctgtgcagatcggtggtttccatgatccgcaggtcgaccgtcgcggcgttgacgctggcggcgatcagcgtggccaggagcgttgcgctaaacttaatcatcagaggcgtccttttttatgagcgatagcacagaagaaaatgtatttatattctgttgcttacagaaatgtgaatcttgccagaaaagcgggcagagaaaccgccatcgttatcacagatagcggaactcgcggtgatgcgatataaataaaacaacgagttaacgccactgtaaccagacgaggtggagaatgttagaacaagtatgtcagcttgcacggaatgcgggcgatgccatcatggaagtctacgatggaaaccagccgatcaacgtcgccagcaagaaagatgattctccggtcacggcggcggatatcgcagcgcataaagtcattgtcagcggcctgcaggcgctggatccggataccccgatcctctccgaggaggacccgccggcgtgggaagtgcgccagcactggcagcgctactggctggtcgacccgctggacggcaccaaagagtttattaagcgtaacggcgaattcaccgtcaatatcgcgctgattgaaaacggcaagccgacgctgggggtggtctatgcgccggtgatgaaggtgatgtacagcgcgcaaaatggcaaagcctggaaagaagagtgcggcgtacgcaagcagatccaggtccgcgatgcccgtccgccgctggtggtgattagccgctcccatagcaacgatccggagctgcaggagtaccttgagcaacttggcgaacaccagaccacctcaatcggttcgtcgctgaaattctgcctggtggcggaaggtcaggcccagctctatccgcgcttcgggccgaccagcacctgggacaccgccgccggccatgcggtcgcggtggccgccggggcgcatgttcacgactggcaggggaaaaccctcgactacacgccgcgtgaatccttcctcaaccccggcttccgggtctctatttattaagcaatttatgcagcaggtcgatcacctgctgcacctcttgttgggtgagggcgccgtctttagcccactgcacacgcccgttcttatccagcaccacgatcgccgagctcttctcgtccagctgccaggccttccgcaccaggccgttgctgtcgacgataaattgcgaccatgggaagagctttttattactttcaatgctgttgcgtacaaacatcccggtgcccgggatggcgtcgtcagtgtttacaatggtggtggtctgatagcgatcgtgcgggaagcccgccgctttaatcgcctcgatcaggttggcattcttctcttttgctgacgagcgtccggcgatgtgctggaccacgcgcacttttcccgccagctgggcgctattccagtttttatagctaaacttttccttatccagaataagctctccccgatccgcgacgccaacgggcgccacgcgctggccgtcgacgaagttatgcgctgtggccagcagcgggagaagcagtaacgaggcggccagtatgctacgtagggtcatgcgcaatccttaatcatttttatgcaggtgatccgaccacttggtctcgtttaatcataagtgcgattggcggtgattacccgcaatgaggatgccagtttgcgtgttgacgcacaaattagtcgtaaaacggcgacttatacttacttcatcgtatgtctgaaacgaaaattctgaattattgtcatcaaagggtaaataaacttatacatactgggtccctctgagattctggactatagttttagggcattaaaatttgcgctcccaagacgtgggctaactgtggcaccacaagagcgtaaccctggcaggagagaagaatgaaaattttccaacgctacaatccgctgcaagtggcgaagtacgtgaagatcctgtttcgtggacggttgtacatcaaggacgttggcgcatttgaatttgataagggcaaaatccttatcccgaaggtcaaggacaagctgcatctgtcagtgatgtccgaagtcaatcgtcaggtgttgcgtctgcaaactgagatggcatagcctggcacgtagcagtacgtagtaggtaaaagacggctcccgatgggagccgttgatgtttttagcccttcatttccgcatagcgtttgcgatattcgcccggtgggatgccgttatgtttacgaaacaagcgggtgaaatagaccggatcgctgtagcccaccgataaagcaattttgttaagtgggagtgtgggataaccatttgggccataaaaaagggcggatggtcatccgcccttaggagagagaaaagattacgctcaggcgttctggctttccgccgtttccgcctgcttcggcaccagcaccgttggcttgttatcgatgcgggtcaccagcagctggtcgatacggtagttatcgatatccacgacctcaaacttatagccggagaacttcaccgcgtcggtgcgtttggggattttacgcagcataaacatcataaagccgccgatggtctcgtaattcccggactgcgggaactcgtcgatatccagcacgcgcatcacgtcatcaatcggcgtaccgccatcgatcagccacgagttttcatcgcgggcgacaatctgctcttccagcccctggccgacgaggtcgcccatcagggtggtcatcacgtcgttgagagtgatgatcccgaccaccagcgcgtattcattcatgatcaccgcgaagtcttccccggcggttttgaagctttccagcgcttccgacagggtcagggtgtccggcacgatcaacgtgttgcggatctgtacgccgccggtcagcaccaggctctggttcgccagcacgcggttcagcagatcttttgaatcgacgtaaccgataatgtggtcgatatcttcattacagacgaggaacttcgagtgcggatgttcggccactttattcttcaggctctgctcgtcttcgtgcaaatcaaaccaaatgacgctttcacgcggggtcatggaggaaggaacggtgcgggactccagctcgaacacgttctcaattagctcatgctcctgcttgcgcagcaccccggccagcgcgccggcctcgaccacggcatagatatcatcggaagtgatatcgtctttccgcaccatcggcagtttgaagatgcggaagatcatgttggccatgccgttaaacaaccacaccagcgggcggaagactaacaggcagaagcgcatcgggttgatgatgcgcagggccactgtttcgggcgcaatcataccgatgcgtttcggagtcaggtcagcaaacaggatgaacaagctggtgaccagggtaaaagagatgatgaagctcagctgctcggagagctccggcgacaaatacccgctgagcaggctatgaaacgccggtgagaaagccgcgtcgcccacaataccgccaagaatggcgacggcgttgaggccaatctgcacgacggtaaagaaggtgcccgggttctcctgcatcttcagcacccgctgtgcgttgacgttgccttcatcggccagcagtttcagtttgattttacgtgaggcagccagtgaaatttccgatatcgaaaaaaacgcactgacggctatcagacagagtattactaaaatactgtttaacatatcttttctgaccgttgaggccagatcctcggaagggaagttgataactcaaatgtggaatacataaaaaaccggtccgaaggcgctggaccggctgtcacactggctagtatagcgtaagggaatgtaaagccgccagagcgttcattgaccgcctcgctgttgaggcggaaatcagaattacgcctgaggcggcaggcagacgccaatgccgccgatgccgcaatagccgtgcgggtttttatacagatactgctggtgatcgtcctcggcatagtagaacggtttggcggtggcgatctcggtggtgatgtgacgggtatcgtgcgcgtcgttcatcgccgcctggaagcgcgcgaggctggcctttgccgcctccgtctgttccggggtcagcgggtaaatcgccgagcggtactgggtgccgtggtcgttaccctgccgcataccctgcgccgggtcgtgattttcccagaacacctgcaataactgctcatagctaatcacctgcggatcataaaccacgcgtaccgcttccgcgtgaccggtctggccgctgcatacttcgcgataggtcggattgggcgtatagccgccagtgtaacctgcggcggtgctgtaaacccccggcaattgccagaacaggcgctcaactccccagaagcagcccatggcgaacagcgccacttccatccccgccgggacgttggtcatcgagtggccgttaactgcgtggagcgtcgccactggcatgggggtattgcgtccaggcagcgcatccgcctgggcgacaagatgcgttttatcaaatagactcacggttggcctctcaatacagaaatcgtcgttaaggttgtaacgaagcgtgtcttttaacacaataaatacgcgtaatacgtctagattaatacataagaattatttgggttattgccactttttcaaccctatgttgttagggttttgttaagccgtggagcggcgccagtgtttcctgtagaggaaacagggatattcaggagaaaatgtgctaaaaatccgccagttatgtgtcaccagccttttgctggtcagcggggtcgccagcgcagcgaatgtgcgtttgcaggttgagggattatccggggagctggagaaaaacgttcgcgcccagctttccaccatccagagcgatgaagtcacgccggatcgtcgctttcgcgcgcgcgtcgatgacgccattcgcgaaggtctgaaagcgctgggttattacgagccgacgattgaatttgatttgcgtccgccgccgaaaaggggacgtcaggtgctgatcgccaaagtgaccccgggagaaccggtgcgcattggcggaaccgaggtgattctgcgcggcggcgcccgcaccgatagcgactacctggcgctgctgaaaacgcgcccggccatcgggacggtgctcaaccacggcgattacgacggcttcaagagctcgctgacccgcgtcgccctgcgcaaaggctactttgacagcgagtttcttaagagccagctcggggtctccctcgaccgtcatcaggcgttctgggatatcgattacgacagcggcgaacgctatcgctttggccacgtcactttctctggctcgcaaatccgcgatgaatatctgcaaaacctcgtgccgtttaaagagggcgactactacacctcgcaggacctggccgagctaaaccgccgcctggcggcgaccggctggttcagttcggtggtggtggcgcctgattttgctaagtcgcggaaaaccaaggtgctgcctctgcagggcgttgtctcgcctcgcaaagagaacaccgtggaaaccggggtcggctattccacagacgtcggtccgcgggtgaaagccacgtggaaaaaaccatgggtcaactcgtatggtcacagcctgacctccagcgtcagcctctccgccccggagcagcagttcgactttacctataaagtcccactgctgaagagcccactcgaacagtattatctgatgcagggcggttttaagcgtaccgacctcaatgatacccaggccgactctaccaccctgggtgtctcgcgtttctgggagatgtcgagcggctggcagcgagcgattaacctgcgctggagcctggatcactttacccaggcgaacgtcaccaacaccaccatgctgatttatcctggggtctcggtgaaccgcactcgctcccgcggcggcctgatgcctacctggggcgattcccagcgctactcggtggactattccaacaccatgtggggctcggacatcaacttcatcgtgatgcaggcccaggacgtctggatccgtaccctctatgaccgccaccgctttgtggtgcgcggcaaccttggctggatcgaagcggacaactttgacaaggtgccgccggatctgcgctttttcgccgggggcgaccgcagtattcgcggctataaatacaaatctatctcgccgaaggacgatgacggcaagctgatcggggcctcgaagctggccaccggctcgctggagtatcagtacaacgtcagtggcaaatggtggggcgccgtctttatcgatagcggcgaagcggtcagcgatattcgcgagagcgatttcaaaaccggcgccggggtgggcgtgcgctggcagtcgccggtggggccgatcaagctggatatcgcccggccgatcggcgacaaagaagagcatggtttacagttttacatcggtctggggcctgaattatgagtttatggaagaagataagcctcggcgtcttaatcgtgttggtgctcctgctgggaaccgtcgggttcctggtggggaccaccaccggcttgcatctggtgttcaaggcggcggatcgctgggtaccggggctggaaatcggcaaagtgaccggtggctggcgtgatttaaccctcgataatgttcgctacgaacagcccggcgtggcggtgaccgccggtcagtttcacctcagcgtcaggttgcgctgcctgtgggacagcagcctgtgcgtaaacgacatcgcgctgcgcgatatttatgtcgccgtcgataccaagaagatgccgccctcagcgccggtcgaggaagaggacagcgggccgctgaatctctccactccttatccgatcaccctcagccgcgtcgcgctgcataacgtcaacgtcaaaatcgatgataccgcggtctccgtacgcgacttttccaccggcctgaactggcaggagaaaaatctgaccctgacgccgacctcgctgcaggggctgctgatcgccctgcctaaggtggcgaaagtggcgcaggagcaggtggttgagccgaaaattgacaacccgcagccgcaggaaaaaccgctcggcgagacgatgaccgacctcttctcgcagccggtgctgccggcaatgaccgatgtccatctgccgctgaacctcaatattcaggcgttccgcggcgagcagctgcgcctgaccggcgataccgatatcaccgtgtataacctgctgctgaaagtcagcagtatcgacggccagatgaagctcgacgcccttgatatcgactccgatcagggcaaggtcagcgcctcgggcagcgcgcagctgcaggataactggccggtggacattaccctcgccggaaccctgaacgtcgacccgatgaaaggggagaaggtgcagctgaaggtgggcggcgaagtgcgcaaaacgctcaaagttggagtggacttaagcgggccggtcgcggccacgctgcgcgcggatgcgcagctggcggaggccgggctgccgctcaatatggagctgaagagtaagcagctcgcctggccgttcagcggcgagaagcagttccaggccgacgatgtccagctgaagttcagcggcaaaatgaccgactatgcgctggccttctccaccgcggtgaaaggtcaatcgctgccgccggcgaaaatcgccctcaacgccaaaggcaatgaacggcagatcaatctcgacaagctgacggtcaacgccctggaagggaaaaccgagctgaaggcgctgctcgactggcagcaggcgatcagctggcgcggcgagctgaccctcgacggcatcaacaccgccaaagaggtgccggactggccgtcgaagcttaacggccggatcaagacccagggcagcctgtacggcggcagctggcagatgtcggtgccggagctgaaaattaccggcaacgtgaagcagaacaaagtggatgtggcgggctcgctgcagggtaacagctatctgcagtggaaaatcccgggactgcatctggcgttaggcccgaacagcgctgatatcaaaggcgagctgggggtgaaggatcttaatctcgacgccaccatcgatgcgccgcacctggataatgcgctgccggggctcggcgggacggcgaagggcttggtaaaagtgcgcggcactgtcgatgcgccgcagctgctggccgacatcaccgcccgggcgctgcgctggcaggagctgaccatcgcccaggtcaacgtcaaaggggatgtgaaatccaccgatcagattggcggtaacctggacgtgcgggtggatcgcatcagccagccgggggtcaatatcagcctggtgcagctcaatgccaaaggtacagagaaacagcatgagctgcggctacgcgtgcagggcgatccggtttccggtcagctggcgctggcaggcagcttcgatcgtcaggccgaacgctggaagggctcgctgagcgatacccgcttccagacgccggtggggccggtagcgctgacgcgcagcattgcgctggactatcgcaatctggagcagaaaatcagcatcgggccacactgctggaccaacccgaacgccgagctctgcgtgcctgaaaccattgacgcgggcgccagcggacgggcgcgggtgaatctcaaccgcttcgatctggcgatgctcaagccgtttatgccggaggcgacccaggccagcggcgtgtttaccggtaatgccgatgtgagctgggacaccaccaaagagggactgccgcagggcaaagtgaccctcagcgggcgcaacgtcaaggtgacccaggtcgtcaacgacgcgccgttgccggtggcgttcgatacgctgaacctcagcgccgacctgcacaacaatcgcgccgagctgggctggcttatccgcctgaccaacaatggtcaactggatgggcaagtgcaggttaccgacccgcaggggcggcgtaatctcggcggcaacgtcaatatcagcaacttctcgctggcgatgatcaacccgattttcgctcgtggtgaaaaggcagagggaaggctcaacgcccgtctgcgtctgggcggcaatgtgaaaagtccgcagctgttcggccagatgcagctgagcggggtggatatcgacggcaactttatgccgtttgatatgcagccgagccagctggcgatgaacttcaacggcacgcgctcgaccctgcaggggacggtgaacacccgccaggggcaaatcgccctcagcggtaacgccgactggacgcagatcgataactggcgggcgcaaattgcggcgaaaggcagccgggtgcggatcacggtgccgccgatggtgcgtctcgatgtatcgccggatgtggtgtttaccgccacgccaagcctgttcaatctcgacggcaaagtggatgtgccctgggcgcggatcgtggtcaacgaggtgccggagagcgcggtcggcgtctcctctgatgaagtgatgctggataaaaacctcaagccgattaagcagcagagcgccagcatcccgatcaacagcaacctgaccattcacgtcggcaacaacgttcgtctggaagccttcggcctgaaagcgcgtctgaccggtgctttgaaagtggcgcaggacaagcaggggctgggcctcaacgggcagattaatattcctgacggccgtttccacgcctatggtcaggacttgattgtccgcaaaggggagctgctgttctccggtccgccggatcagccgttgctgaatatcgaagcgattcgtaacccggatgccaccgaagacgatgtgatcgccggcgttcgcgtcaccggctccgccgatcagccgaaagcggagatcttctctgatccggttatgtcccagcaggaagcgctgtcttatctgctgcgcggtcagggtttgagtagtggtcagagcgatagcgccgcgatgacctcaatgcttattggtatgggggttgcacaaagtggtcaggttgtgggtaaaatcggcgagacgtttggcgtaagcaacttggcgttggacaccgaaggggtaggcgattcttcccaggtggtggtcagcggctatgtactgccgggtctacaggtaaaatacggggtcggtatcttcgattccctggcgacgctgactttacgttatcgcctgatgcctaagctatatgtggaagcggtgtctggcatcgaccaggcgctcgatttgctctatcagtttgagttttagcaatgcgaatatttgtttacggcagtttacgacgcaaacaaggcaacagccactggatgaccaacgcccagtggctgggcgctcatagtgtcgacgattatcagctgtacagcctgggccactatccaggcgcggtgcccggcgaaggcacagtacatggtgaagtttatcgtattgatgcatcgacgctggccgaactggatgcgctgcgcaccaaggggggcgagtatgcgcgccacctgattcagacgccttacggcagcgcatggatgtatgtctatcaacgttccgttgagggttgtacgttgatagcgaacggcaactggttggatcgcgaccagtattaaccacgacagcgccaccttcgggtggcgttgttttttattacttcagttcccatggcgtcattctggcgccctgacgtctggcataacgtaatatggcctgatgtaccttcactctaccggccacccgacgtgacaggggatgggcaatcatacggacaaactccatcactattaacagcaggttaatcgggagcagggtgcctgtcagcctggtaagcatttcacgataaaatggccaactgcccagattaatcatggtgtcgtgcagtttgatggtgagcgtaaaaaacatcactatgagtacgaggccgtacgcgattttataaattgatgccatctgctgattgccgggatgaaaggggctattttttaaataaacactgccatcactgacattgtataacgcctgaagatcatcgtatccatgccggcgtgcggcgataacccagtccccatcggcaagaaatggcgggcgacaacgattattcagggcattgctcagccaggtcaagcgcgctgaaaaaaacgagtgacgagtcgccagctgaaaacaggcgccttctttgataaaataaggccttaccctcgtagcgatccatatttgataataactattcagaatcacgccttcttcaagcgcaaattcttttggcagcgctatctcgttgttggccgatggtggatgcctttcagaagtagcgggtagaatttccagacgctgacagaatgaaatatcgccttgcttcgttcgctgcattttcgcattgagaacacgtaacctgagtgagaaattgcaagagaaaaaagagaagatgccgaagggattcaccaacattgtgataaaacataataataaaaaaatatccaaccatggagcacaagcgagaatgatcaagcaaacaaaaaagaccaagccgacaggtcgaagaagctttttaatactcagcggctgccgggaaggttcgagcaaaatgtggccatcgcttaaccagtggatccagtaactgccatcctttaggcggcaagtgccgatatgtagcggctggccgagcctcagacggtcaaaaagcgaggggtctttaaaatggcgtttatcggtataaaaggcatgctcgcctgcaatgaggcgtaaatagctttgctcttcagaggcggcagtggtgaagccggtaaaattcacggtgaaataatgggtctgtttcacaaggttccttccttgatgaaatgatggtgttttacgtatcacgcgttgccgacccactccttaccagagcgggagatgatccttcgccagccacatcgcggaagccagcgtcgtcagcgcgaggaataataatcgtcgtgttggggtgctgaacattacatgatctcctcgagcgcggtatggcgggccgctccctgcaggtagtgccgcatcgccgagcgcatcttcatccagtcagccacccggtgtgacaataaccaggccgtcgggccaatcagctccagtaccgccaggatcccgccgaaactgagtaataatagggacagcatgtccagtgaatcctgaattaaccacccaaatcccctggctggtttgtatgggttatttagcgacatgccgagtatgaggaggtacatcaccagcaccatgccataaaacaggttatagactagcgacatttgccggtcaccgggataacagggatgatttttcagaaaagcgcacccgtcgctgacgttgtataacgccttgacgtcgttatctttccgttggtagacgacgactatccgatcgccgatagcgagaaagggcggttgacggcggtaaaaaaagggatgcaggccgaagttggcgaagccgttctgccagaagaaggccagcggcgccgtgtcgcattgtatcccaacgccatggtattcccgcgttgggttccccgcgaaccatttcttaaaaatgatattgctaatttttcccgtccggacggcatagcgttccggcagggcttgcgtaaaaggcttcgccgactggcggagggtttgcgccgtagtcggtagcggctggcaaaaggaaaagtcgcggcggcgggcctgcgccatcttcgccaacagatcgcgcatggcggggtgcatttttagcgcccggtggaacagtagctcgcagaggccggttaacaacgcgatgaaggccagtatcgcgataatgccgaagccgaaccttccccattctgaggtgatcatcatgagcgggataagagcgacgatgagcgtcagcaggctgatactcagcagcggccgggcccagcgctttacccgttgactgggctcaaggagcgtttcgccatcgctgagccagtggatccagtaactgccgttgtccaggcggcggacgccaaggtgcagaggctgattgatcgtcaggtggtcaaaaagcgaggggtcgttaaaatagcgtttatcggtataaaagacatggtcgccggcgataagacgcagatacccctgtttttcacaggcggcggtcgtgaagccagaaaagttaagggtgaaatagcgaacgcttttcacgggacaccctccatggtgttatcgcggctatccgtgccgcaatcaggcaggggatgaccctgcctgagacagaattacttctgcttagcgcgctcgaaagaggcaacgatttcggctttcgccgcttccgcgttgtcccaaccgtcgactttaacccacttgcctttttccagatctttgtagtgctcaaagaaatgagtgatctgggctttcagcagttccggcaggtcgttcacatcgttgatgtgatcgtattctttgctcagcttggtgtgcggtacggcaaccagtttcgcatcttcaccagattcgtcggtcatcttcagaacgccaaccggacggcagcggatcacggagcccggctgcagcgggtacggagtcgggaccagcacgtcaaccgggtcgccgtccagggacagggtgtggttgatgtagccgtagttgcacggatagaacattgccgtggacatgaaacggtcaacgaacagtgcaccgctctctttgtcgacttcgtatttgataggatctgcgttcgccgggatttcgatcacgacgtagatgtcttccggcagatctttgcccgcaggtacgttgagtaagctcatgtctgtttcctttaaaatgtatggcaaacaagtgctcggtattatagccaactcacatcgaaagtcttcgcttctttttcccgatatcgccgcagagtgctccgaatttttcgcgtaataatgacatgaaaatccataaacatagccacatcatgaataaatttatgtaaccgttttcattgcatttgattgatttatcatactgcttaaaaaaacgtcataaaccgcaacagccgcgctccctgcgaagccttatcggctctccgctgggcagtagggccatcattaacatctcatttacttttttgaagtgtgatgtaacgcattcagttacatcaccgattgtctatagtttgtccgcaggtgagactttaaccaacaataaccctacgaggatacccttatgtggaagcgcttacttcttgtcacagcagtttccgcagctatgtcgtctatggcgatagctgccccgctaaccgtaggtttttcgcaggtcggttctgaatccggctggcgtgcggcggaaaccagcgtcgcgaaagaggaggccgccaagcgcggtatcaccctgaagatcgctgatggtcagcaaaaacaggaaaaccagatcaaagcagtacgttcctttattgctcaaggggtcgacgcgatcttcattgcgccggtggtggctaccggctgggaaccggtgctgaaagaggcgaaagaggccaagatcccggttttcctcctcgaccgttccattgatgttaaagataaagatctctacatgaccaccgtgaccgccaacaacgtgctggaaggccagctgattggcgactggctggtgaaaaccgtcgacggtaagccgtgtaacgtcgttgaactgcagggcaccgttggggccagcgtggccatcgatcgtaagaaaggcttcgccgacgcgattgccaaagcgtcgaatatcaaaattatccgctcccagtccggcgacttcacccgcagtaaagggaaagaggtcatggagagctttatcaaagctgagaataacggcaaaaacatctgcatggtgttcgctcataacgacgatatggccatcggcgccatccaggccattaaagaagctggcctgaagccgggcaaagatattctgaccggctccatcgacggcgtgccggatatctataaagcgatgatcgctggtgaagccaacgccagcgtcgagctgacgccaaatatggccggcccggcgttcgatgcgctggagaaatacaaaaaagacggcaccctgccggagaagctgaccatcaccaaatcgacgctgtatctgccggatacggcgaaagaagagttagagaagaagaaaaatatgggctactgagtggggagcccctcattccatccctctccccggtgggagagggtaaaaagcagcgttccagaaaccccgggaagcccagcgcgacccggggtaacctgacatcatttgaaggtgacatcgattatgagcgccgaggcacaccaggagatccttcgcaccgaaggacttagtaaattcttccccggcgttaaggcgctggataacgtcaactttagcctgcggcgcggcgaaatcatggccctgttgggcgaaaacggcgccggaaaatcgacgctgatcaaagcgctgaccggcgtttaccatgccgatcgcggcactatctggctggaaggccaggctatttcgcccaaaaataccgcccatgcccagcagctggggatcggcaccgtctaccaggaagtgaacctgctgcccaatatgtcggtggcggataacctgttcatcggccgtgagccgcggcggtttggtctgctgcgacgtaaagagatggaggccagggcgacggcgctgatggcctcctacgggttttccctcgacgtgcgcgagccgctgaaccgcttttcggtggcgatgcagcagatcgtcgctatctgtcgggccatcgacctgtcggccaaagtgctgatcctcgacgagcccaccgccagcctcgatacccaggaggtggagatgctgttcaccctgatgcgccagctcagggataacggcgtcagcctgatcttcgtcacccattttctcgaccaggtctatgcggtcagcgaccgcatcaccgtgctgcgtaacggcacatttgtgggctgccgtgagacccgcgagctgccgcagattgagctggtgaaaatgatgctgggtcgcgaactggaccataatgccctgcagcgggcgggccgtaccctgctgagcgataaaccggtagcggcgtttgaaggctacggtaaaaaaggaaccatcgccccgttcgacctgcaggtccgcccgggagaaattgtaggcctcgccggcctgctgggttccggacgcacggaaaccgccgaggtgatcttcggcattaaaacggcggacagcgggaaggcgtggatcaaaggcaaacctcagaccctgcgctccccgcatcaggcttcctgcctcgggatcggcttctgtcctgaagatcgcaaaaccgacggcattatcgccgccgcttcggtgcgggaaaatatcgttctggccctgcaggcgcagcgcggctggctgcggccgatcccccggcgtgaacagaacgagatcgccgagcgctttattcgccagctggggatccgtaccccgagcgccgagcagccgatcgagtttctctccggcggcaaccagcagaaggtgctgctctcccgctggctgctgaccaaaccgcagttcctgatcctcgatgagccgacccgcggcatcgacgtcggcgcccatgcggaaattattcgcctgattgaaaccctctgcgccgatggcctggcgctgctggttatctcttctgaactggaggaactggtgggttacgccgatcgggtcattatcctgcgcgatcgccgacaagtggcggagatcccgctcgccgagctctctgttccggcgatcatgaacgctattgcggcataaggagtaacccatgatgcctcgatctctttcgcaaaccggcccggagaagcgacacttcacctggccgaagggcaccccgcagattattgccctgctgctggttctgctggtagacagcctggtggcgccccatttttatcaggtggtgctccaggatggccgcctgtttggcagcccgatcgatattctcaaccgcgccgcgccggtggcgctgctggcgattggcatgacgctggtgatcgccaccggcggcatcgacctgtcggtaggggcggtgatggcgattgccggcgcgacggccgcctcgatgaccgtcgccgggcacagcctgccggtggtgctgttggccgcgctggccgcgggcgcgctggccggattgtggaacggcatcctcgtggcggtccttaagatccagccctttgtggcgacgctgatcctgatggtggccgggcgcggggtggcgcagttgatcaccgccgggcagatcgtcacctttgattccccggccctggcgtggctcggcagcggatcgtttctgctgtttccgacgccggtgatcgtcgccgccgctacgctgctgctgttctggctgtttacccgtaaaacggcgctgggcatgtttattgaggcggtagggatcaacatccgcgcggcgaaaaacgccggcgtcaatacccgcatcgtggtgatgctggcctatgtcctgagcggcgtctgcgcggcgatcgccgggatcatcgtggcggcggacattcgcggcgcggatgccaataacgccgggctatggcttgagctggacgccattctggcggtggtcatcggcggcgcctcgctgatgggcgggcgctttaacctgctgctctcggtggtgggggcgctgattatccagggaatgaacaccgggattttgctctccggcttcccgccggagctcaaccaggtggtgaaagcggtggtggtgctgtgcgtactgattgtccagtcgccgcgctttatcggtttactgaaaggggtacgcggccatgataaaacgtaatttaccattgatgatcacccttgcggtgtttgtgctgggctacctctactgcctgacccagttccccggttttgcctcaacgcgggtgatctgcaatatcctgacggataacgccttcctcgggatcatcgccgtgggcatgaccttcgtgatcctctccggcgggatcgatctgtcggtggggtcggtgatcgcctttaccggcgtcttcctcgccaaagcgattggcttttggggaatctcgccgctggtggcctttccgctggtgctggtgatgggctgcgccttcggcgcgtttatggggctgctgattgacgccctgaagatcccggcctttatcatcaccctcgccggcatgttcttcctgcgcggcgtgagctatctggtgtcagaggagtcgattccgattaaccatccggtgtacgacaccctgtccgggctggcatggaccattcccggcggcggtcgtctcagcgccatgggactgctgatgctgctggtggtggtggccggtatttttgtcgcccatcgcacccgctttggcaaccaggtgtatgccatcggcggcaacgccacgtcggcgaatctgatggggatttcgactcgcagcgccacgatccgtatctatatgctctccaccggactggcgacgctggccgggatcgtcttttccatttatacccaggcgggctatgcgctggcgggcgtcggcgtcgagctggatgcgattgcctcggtggtgatcggcggtacgctgctaagcggtggcgtcggtaccgtgctgggaacgctgttcggggtggcgatccaggggctgattcagacctacatcaacttcgatggcaccctcagctcatggtggacgaaaatcgccatcggcattttgctgtttatctttatcgcgctgcagcgtgggctgaccgtgctgtgggaaaatcggcagaatgcggcggtgacgcgggtgagcggggcggggagtcgctaagaaatgctcctcccgcaggcgcgggaggagcgggcagggcgcttaggcgtccgggaacgctttaataaagttctcgacgtcttctaccatgtggttgttgccgacgaagaaggagcgacgctgatgcaggctttccgggataatatccagaatacgctctttaccgtcgctggccttaccgcccgcctgttcggcgaggaaggccatcgggttgcattcatacagcaggcgcagcttgccttccgggtggctggcggtgctcggatagagatagatgccgcctttcagcaggttgcggtggaagtccgccaccagcgagccgatatagcgtgaggtataaggacgctgagtcgctttgtcctcttcctgacagtacttaatgtacttcttcacgccctgcgggaatttgatgtagttgccttcgttgatggagtaggtattgcccttctccgggaagcgcatacgctcctggcatagacagaagacgccaagggacgggtcgtaggtgaaggcgtgaacaccgcagccggtggtatacaccagcatcgtcgacgatccgtagaccacatagcccgcggccacctgcttgttgcccggctgcaggaagtcttcttctgtcaccggcgtgccgacaggcgtcacgcggcggtagatagagaagatcgtaccgacagagacgttaacgtcgatgttagaggagccatccagagggtccatcagcaccacgtatttggcgtgttcacacccttcgaagacgacaatctcatcttcttcttcagaggcaatcccggcaacaatatcgcgtgctcgcagtgcggcttttaatttttcattagcgaacagatcgagtttttgctgaacctcgccctgaacgttttcagcaccgctggcacccaggatatcgaccagaccggccttgttgatatcgcggtggatgatcttggcgcccaactttattgctgacaacaaagcagtcagctcaccggtggcgtgggagaactcgtgctgcttttcaacaataaactcacctaacgttttcataactcgttccctgcatttttatgttgagtaaaacgaacgcaacaatcttaacaaagaatcaaaaaagtgcgcacaggtgaatcgcgccagcaaaatacagattcgcctgaaatgcatttcgccagggcccgggatatgggtaaaatgtgccccggataagaaaaggaaatgacgaatgcgcattcatattttaggaatctgtggcacgtttatgggggggctggccatgctggcgcgctccctcggtcatgaggtaacggggtcggatgctaacgtctatccgccgatgagcaccctgctggaaaaccaggggattgatttaattcagggctatgaccccagccagctggagccccggccggacctggtgatcatcggtaacgccatgactcgcggcaacccgtgcgttgaagcggtgctggaaaataatattccctatatgtccggcccgcagtggctgcacgacttcgtgctgcgcgatcgctgggtgctggccgtcgccgggacccacggcaaaaccaccactgccggcatggcgacctggatccttgaagcctgcggctataaaccggggttcgtgattggcggcgttccgggcaatttcgacgtctccgcgcgcctgggcgacagcccgttcttcgtcattgaagccgacgaatatgactgcgccttcttcgacaagcgctccaagtttgttcactactgcccgcggacgctgatcctcaacaaccttgagttcgaccacgcggacatctttgatgacctgaaggcgattcagaaacaattccaccatctggtgcgcatcgtgccgggcaaaggcaaaattatcctgccggagaacgacatcaacctgaagcaggtgatggcgatgggctgctggagcgagcaggagctggtgggcgagcagggccactggcaggcgaaaaaactgaacgccgacgcctcgcagtgggaagtcttactcgacggtgaaaaggtcggcgaagtgaagtgggcgctggtcggcgagcataatatgcataacggcctgatggcgattgccgcggcgcgtcacgtcggcgtgctgccggcggatgccgcgaacgcgctgggcagctttatcaacgcccgccgtcgcctggagctgcggggcgaagccaacggcgtcaccgtgtatgacgatttcgcccatcatccgacggcaatcctcgccacgctgcaggcgctgcgcggtaaagtaggcggtaccgcgcgcattctcgccgtgctggagccgcgctctaacaccatgaaaatgggcgtctgcaaggacgatctggcgccgtctctcggccgcgccgatgaggtgttcctcctgcagccgcagcatattccgtggcaggtggcggaagtggcggaagcctgcgtccagccggcccactggagcgccgacgtcgataccctagcggagatggtggtcaaaaccgcccacccgggcgaccatatcctggtgatgagcaacggcggcttcggcggcattcatcagaagctgctggataagctggcgcaaaaagcggccgcggctgaataagcgcgtacgcctccggtcactgccctccgcgtgagggcagttttgttttagctaccaggaattgtgtgatgctgacctgcgaaagcgtacgttctactgactcgccccatttcgccatgctggacgcgctttacgcgcgcgcctttccgtggcacgagcagcgcgaaagcgaggccaaacgtcaggcgctgagccacccgcgctacgcgctggaagcatggttcgatgaaggcgtctttgtcggcctcagcggctgctggcagtttgccggctacggttatatcgaacatctggcgatcgacgacacgctgcgctcccgcggctatggtaaacagctgctggcgcagatcctgacgcgcgccccgctgaccattctggaaatcgatccgctaaccacggccatcgcccataaacggctgcgcttttatcagtcgatggggttccatgctaatccctgggcgcatcatcacccgagctatcatcagggcattgcggatcatgagctgctggtgctgagctacccgcagccgatcgatgagcggcagtatcagcagtttgcccgggatctcgggcacgaggtgatggggcgggagtagcccggctcggcgtaccgctccgggcattcgactggcggcgctgttactctttggcgatcggcgtctcgttctccgcgactttgttatcgccctgaatcttagcgattttctgctcaacggcggctacctgggcgctgtcgtgcagcagggtgtaggttagatcaaactgcgcgctggcgcccggctgcagctgcttcacgcgtttttgctcgcgttcaatggtcaccggataggcgtagctggtccccggctcgataccggtgacatagccctgcttgacggtatcggtgtttttccacagcgtcaggaccggcagctgacgggtatcaaactgaatagaggcccctttatcgcccgctttgttgaccacggcggccagggtctggtgattttcatcggccagcggctgaatattaaataccatctcgtcaaaatctttggtcggtccctgataggtctgccaggtttttaacccgctcttcgcgtaatcattgaacgggctgatgctggacatcggggcgaggaaacgcgcgccttcttcgaggatcggggtgccgaagttgctgtggtagatgatctgataatcatgcggatagtcggcatggttggttaagacgtcatgtaagctgaagctgttgctgcccggcacgtagcgcagttcggtcagggtctgcagatcggcttttttaaaggtgctctctttcaccagcccgcggatgcggatttcatacggcgcgctgtcggccacctccacctccaccagagaggccggcgtgttgcccgccttgccgtgtagggtataaatttgcccgtccgcggtcaccggatggccggtccattcatagccgcagcggaccatcatctcgttgaatccttccagccagccgaggccattgcggctttctaggttgataaacgccgggttgacgacctctttaaccggcgaatcccagcccatccggctgccgaaaccctcaatacgcagcaagttcatgccgcgtgtcgggctcagggtgatggtcaggccgtctttactgtgaatggtgaggattttgctgccttcctgcttaccgccgtgcaggactttttgctcaatgctgaacgcatggtctttcaccttcagctgatcgctgttgatctgccagtttcctttatccatcccctcttcagcgttcgtcagcacccatgtttttgccgcggccgagccggaaaccagcagggcgatcgtcgtcagaaccaatgtctttttcatttttattccctttttgctgaatcgattgtgtcattgacgtgtgaaatctaccggcatgggggtgattaaaatgtgaagcgcctcacctggtgagaaagtggccgtttttatgatgttaaatgagatgaaagtcgtattattttgctaagtaatacgtatttatcaccaggatatgtgatctatattgtttttagctttaacgattcagcttggcggtaaggcaataaacaaacgtatcgtcgtgtggatgaggggactcaggcgatgcgacgggaatccccctgctggcgcaagccttagagctggggtgaaggtaggccggataaggcgtagccgccatccggcacaacgacgggaacggggtctggtacagcttgcccggcggcgctgcgcttgcgcgggcctacggtgttgagtaactgtttgatatacagggctccgtaggccggataaggcgtagccgccatccggcacaatgacgggaacggggtccggtacagcttgcccggcggcgctgcgcttgcgcgggcctacggtgttgcgtaaccgtttgatatagggaaccgtagcccggataaggcgcagcgcgccgccatccgggagactattgcgggcaaaaacagggggacttagccttcgttttccgccagttcacgcagatactggaagatcaggcgcgccgatttcggcggcttgttgccttctttctctttcttcgcattgcggatcagcgaacgcagctgctgacggtcagcatctggccacaggttcagcacttcagcgacggcgtcatccccgtcgtcaatcagtcgatcgcggatctgctccagcttgtggaacagcgcaacctgctggttgtgacggtttttcagcttgtccagcgcctgacgaatcggatcgacatcgcggttgcgcagcatcttgccgataagctgtagctggcggcggcgaccctcttttttgattcgctgggcgagttcgatggcgtcgcgcaggtcggtatccagcggaattttatccagcgcgtttttccccaggtcaacgagttccgcgccaagacgcttcagttcttccgcgtcgcgcttaatttcactcttactgacccagatgatttcatcatcttcatcttcaacgtcatcaccgggcacgtcgtcgagccagtcttcgggctgctttgtcatctcaggctccttaaaaaaagaggctaatgttaccagttaaggcgcgcactgaaaaacggttctctgttagacttcagttaactccttcttacattatggcattagcaatgaaagtcatctctcaagttgcacagcagcgtaagacgctggaagaagccgttaccacggcactggaactggcggcaggtaaatctgacggtgcggaagtttccgtcagcaaaaccacgggcatcggcgtcagcacccgctatggcgaagtggagaatgtagaattcaacagcgatggggcattaggcatcacggtttaccatcagaaccgcaagggcagtgcctcctccaccgatcttagcccggacgctatcgcccgcaccgtgcaggcggcgctggatatcgctcgctatacctccccggacccgtttgccggcgtagccgataaagatctgctggcctttgacgccccggatctggacctgttccacccggcggaggtctccccggacgacgccatcgaactggccgcccgcgcggagcaagcggccctgaaagccgataaacgcatcaccaacaccgaaggcggcagctttaacagccactacggcatcaaagtgttcggcaacagccatggcatgctgcaaagttactgctcgactcgccactccctctccagctgcgtcattgcggaagatgacggcgatatggagcgcgactacgcctacaccattggccgggcgatcgaggatctgcagtccccggaatgggtcggggaagagtgcgcccgccgcaccctgtcacgcctggcgccgcgtaagctgtcgaccatgaaggcgccggttattttcgccaacgaagtggcgaccgggttgtttggccacctggtcggagcgattgccggcggcgcggtctaccgtaaatcgaccttcctgctcgattcgctgggcaaacaaattttgccggagtggctgaccattgaagagcatccgcacctgctgaaagggctggcctccacgccgttcgacagcgaaggcgtgcgcaccgaacgtcgcgatatcgtcaaagacggcgtgctgacccagtggctgctgaccaattactcagcgcgcaagctggggatgaaaagcaccggccacgccgggggcatccacaactggcgcattaacggccgcggcctgagttttgcaaagatgcttaaagagatgggcaccggtcttgtggttaccgaactgatggggcagggtgtcagtggcgtcaccggcgactactcacgcggcgcatccggcttctgggtagaaaacggcgaaattcaatatcctgtcagtgagatcaccattgcaggaaatctgaaagaaatgtggcgtaatatcgtgaccattggcgatgatattgaaacgcgcagcaacattcagtgcggttctgtgctgctgccggagatgaaaatcgccgggcaataacacctgtttgcttaaataataaaaaggaagtgagcaatgcgtaaaaaactgttagcgatgctggctgtctctgcttttgcgctcggttcagcgtcggccttcgccgacctgggcgaagacatggacactctggcagaaaacctgcaagtggtacagaagacctccgacgccggcgagctgaaagcggcgctgaataagatgcgtaccgccgcggtcgatgctcagaaagagaccccgccgaagctggaaggcaaagcggccgacagcgctgagatgaaagattaccgtcacggtctggatattctgatcggccagatcgacggtgcgctgaagctggcgaacgaaggcaaggtgaaagaggcgcaggccgccgcggaggagtttaaaaccacccgcaatacctatcataagaagtaccgctaaccgttcttttcgggaggcatcagccgatgcctcccacctgaaagcctaccgatatcacatttttcccttttctttttccggtctttctgcggtcgttttccgctaaacctcgatcattgttgtgatgcgcatcacgtcatatcgcctgtttttacatttatccggcgaatatgtggagtcgatcacctaagccttctccctttccacttcgaagtggaaaacaactcgctacaaactcctgacccccggcgctactttggattccagagacatcagcggggtaacacaagtgaataacggagcggtaataaacgacgtaggggagcaggcggcgcagaccgaacgcctggctgacaagatgttacagcaggtattcgccctgttaagccgtcacgacatcgtccctaacgacgttcaggagcaaatgctgacttcccacgtgcgggccatggcccaccggtcaatcagcggcgaaccgctaccggaagtggatgccagtctgttcgaagaaatttctgaagattcaatgatgctggcccgcgaagtggtcgcacagttcggcaacctgcctgatgaagaggcctggctgctctccgtccacttcgaagtcgcgaaagataacctgtaaggagcaaaacatggaacaaatcaccgtagtcattggcgaccgtctgggtaaaggccaaaaagtcgccgcaggcgctgaaaaagcgggcgcacgtgctgtggtcgtccctggcgttgcggccgacatgaagcttggcgacataatgaaagcggaaaacgccaccttcggcatctccttctgcggcagcggcggcgccggcgccatcaccgcccagaccaaatacggctacaaagcaaaatatggcatgcgctctattgatgagggcgtcaccgctatcaacgaaggctgcaacgtgctgggcttcggctttatggataaagaagagctgggcgagcggctggtcgaagcctggaaaaagaaatacggcgcataagtatgaaagagcaattcaccaccacggtgagggttgccggcaaaggcgaaagcaaatcacgggccttcgccgatgccctgaaccatgtgcaggctgcggtgatgaaatcatcctcgcgcatcctactgcgtattgagccacaggacgtgacggttgttcatgcgcgcgaagcggtacgaaaagaggcgtttctgttcttctttttgcgccgtgaacgacggacctacagcgtggagctggacgtcaccgtcaacgtgaccgccatcgatctcgataaagtggatttcgtcacgcaaacctgattgttagcaaaaggtctgactatgttcctgataattttaataaaatcgcttatcatcggcggcctggtcggcgtcggcgtgggcgccggagcggcacgcatgtttcatgcccccaccacgcaggggatgggggcgtttcgaaccctgggcgagctgaattcctgtgagggcgatccggcctcccacttctcctttggccttggcttcttctttaacgcctgggcctcttccgttgcagcaggctccttcacccaggatgttgaccaccgcattatccccaactggggcgcggcggcgctgatgctgaaaaatcgtaacgtcggcgaaacgctgcacgatccgaaaaaaatggccatctcctgcggcatcatcggcatgatcgtcgtcgccttcctcaacctgaccgcctcgtccgtaccggaagcgctgcaggtgaccgccgttaaggtactggtgccggcggcaaacctgctggtgaacaccgtgatgccggtgatcttctggctggcggcgatcgatgccggtaaaaaatcaggcttctgggcgacgattttcggcggcgccgcgcagctgattatgggtaacgccgtaccgggtctggtgctggggatcctgatcggtaaaggcgtcgaagagagcggctggaaccgggtgactaaagtgatgatggtggccatcgtcgcgctgtttgtcctcagcggcttcttccgtggcttcgacatgaagatgatcgaatccttccatctgaccgtgccgaactggctggacatgatccacaactcactcagcggcaagtaacgggagccggataatggaacagaataaaggtttttggtatgccgactggtcgttcccgatctttgttggcctgctctcctccggcgtcttcgccgggacccacatgtactacctgtacggcatcggcgcctttaacgaagtggccttcgtggcgatgctgaagtcggggattgataccggcgtttacggcgcggtggcggcgtttggcgctagcttccttttcgcccgcatcatcgaagggtcgctggtagggatcctcgatatcggcggcgcgatacagaccggtatcggtcttggcgtgccggcgctgctgctcggcgcgggctttgtcttcccggtggcgaacttcgccgcgtcgctggtcaccggtctggtcctcggcctggcggtgggctacatcatcattctggcgcgtaagttcaccatcaaccagagcgattccacctacggcgccgacgtgatgatgggggccggtaacgcctccggccgcttccttggtcccttgatcatcctcagcgcaatgaccgcctcgattcctatcgggattggctcgctggttggcgcactgctgttctacatctggcagaaaccgatcaccggcggcgccatcctcggggcgatgatcctcggttccatcttcccggtggcgattagctaagcgcccgatggcgctgcgcttatcgggcctacaagccagcgcggtttgtaggccggataaggcggtacgccgccatccgtacactcttttcatcaggagatagctatgtttgatttactcctgcgccgcgcgcgcctcgtcgacgataccctgactgatatcgccattcaggacgggaaaatcgcggcgctgggcgagattagcgcgccctcccgtaaaaccattgagctgaacggcaaggtttacgtcagcgctggctggattgactctcacgttcactgctacccgaattcaccgatttatcacgatgagccggatagcgtcggcatcgccaccggcgtcaccaccgtgatcgatgccggcagcaccggcgccgacgacgtcgatgacttctatcaactgacccgtaaagcggcgacggaagtttatgcgctgctcaacatctcccgcgtcgggctgattgcgcagaatgagctggccaatatggccaatatcgacgccgccgcggtgaagcaggcggtgcagcgtcatcccgactttatcgtcggcctgaaggcgcggatgagcagcagcgtggtgggcgaaaacggcattacgccgctggcgcgcgccaaggccattcagcaggaaaacgacgatctgccgctgatggtgcacatcggcaataacccgccgaacctcgatgaaatcgccgatctgctgagcagcggcgacatcattacccactgctataacggcaagccgaaccgcattctgaatcctgccggcgagctgcgcagctctattactcgcgctctgcagcgcggcgtgcgtctcgatgtcggccatggcaccgccagcttcagctttgaggtggcgcggcgggcgattgcgctgggcattctgccgcacaccattagctccgatatttactgccgcaaccggatcgacggcccggtgcgctcgctggcgctggtgatgtcgaaattcctcgccatcggcatgacgctgccgcaggtgattgactgcgtgaccgtcagcgccgccgaagggctgcgcctgtcgcgtaaagggcggctggaagtgggcttcgacgccgatttaacgctatttcgcctggagcaccggcccacgctgctggtggatgccgaaaaagagagcctgcaggctgacaacattctggtgccgctggccgcgatccgcgcgggcaaaggctatctgaccgaacaagggagcgcggaacatgccttcgatttttgagaaataccatttaaaacaggtgattaatacttctggccgcatgacggcgctgggcgtttccacaccgcgcccggaagtggttgaagccgcgatggccggtatgaaccagtactttgaaatgaaagacctggtgaataaaaccggcgagtacatcgccaaactgttggatgtggaaggggcgaccgtggtctcctgcgcatcggcggggattgcccagtcggtagcggcggtgctggtgaaagacagcgactggctgctggagaacctgcacgttacgccgattgaaaataacgaaatcgtgttgccgaagggccacaacgtcaacttcggcgcgccggttggcaccatggtggcgttgggcggcggtaagctggtggaagcgggctacgccaacgaatgttctgcccaacagctggcggcggcgatcactccgcgcaccgcggcgattctgtacatcaaatcccaccactgcgtgcagaaaagcatgctcaacgtcgcgcaggccgcggaagtggcgcgccagcataacgtaccgctgatcgtcgatgcggcggcggaagaagatctgcagtgctactaccgcatgggcgccgacctggttatctacagcggcgcgaaagcgattgaagggccgaccagcgggctggtgatcggcaaaacgcagtacgtcgaatgggttaagcgccagtcgatggggattggccgggcgatgaaagtgggtaaagagggcattctcggcctgacctgcgccattgaacactacctgacggcgagcaaagagagcggcgagcagatggtggcgaagatgacgccgtttatcgaacagctcaacgcgcttaacggcgtgaccgcgcgggtggtgtgggacagtgcgggccgtgatatcgcccgcgccgaaattaaatttgatgaagtcacgaccggcgtgaataccggcgatctggttaacgcgctgaagcagggtgaatacgccatctacttccgcggctataaagcgaatgaaggcattatcgaagccgatgtccgcagcgtaaacgcccagcagctggaggtggtcgctcgccgcatcgcagaagttctgaataaggagaaacaagcatgaaactgaccccaaacttttaccgtgaccgcgtgtgcctgaacgtcctggcgggcagcaaagacaacgcccgtgaaacttacgacgcggcggaaggtcacgtcctggtcggcgtgctctccaaaaactatccggacgtcgccagcgcggtggccgatatgcgcgactacgcgaagctgattgataacgcgctctccgtcgggctgggggcaggcgatccaaaccagtcggcgatggtgagcgagatttctcgccaggtgcagccgcagcacgtcaaccaggtcttcaccggcgtggctaccagccgcgcgctgctcgggcagaacgagacggtggtcaacggcctggtctctcccaccggtacgccgggaatggttaagatctccaccggcccgctgagcagcggcgcggcggatggcattgtgccgctggaaaccgccatcgcgctgctgaaagacatgggcggcagctccatcaaatacttcccgatgggcggcctgaagcaccgcgccgagtttgaagccgtcgccaaagcctgcgccgcgcacgatttctggctcgagccgaccggcggtatcgatctggaaaactacagcgagatcctgaaaatcgccctcgatgccggggtaagcaaaatcatcccgcatatttacagctcgattatcgataaagccagcggcaacacccgcccggccgatgttcgccagctgctggagatgaccaaacagttagttaagtagtgcccttgtccctcaacctcaaagggtgaggagcagcttatcccactgaaccatcaaggagttgctatgcctgtcgctcgtcatctgcttgtcgcttcactgtccctgtttgccgccgccgcgggcgccgcgcaaacccactatgcctgggtaggcacctataaccccaatggcgaaggtctgtatcgctttaccgtcgatgccaaaaccggcgccctgcgcgataagacgctggtgagctcgttgccgaacgtcgcgcaattaaccgtgtcgcgcgatggcaaaacgctgtatgccgccagtgaggtcgaaaaaggcgtggtgcaggcgtggcgcattgaaaagaacggcgagctgaccgcgctcagccaggtcgcctccggcggcgccgggccggtgtatctctccctgacgccggacggtaagcatctgctggtggctaactatgtcagcggcagtatcgccgtgctaccggtgcaagaagatggtagcctggctgaggcggtggacaggcatcaggatgaaggcccggcaggcgccgaacgcccggcggcggccgtcgagggcagcttcgccatcagcgatcacaacggcccgcatgcccatatgatcgccgccgatcccagcgggaaatacgtttactctaccgatctggggctggatcggatctatcagtatcggctggatagcgccagcggcaagctaacgccgaacgatccgccgtttatcgccgcctcgtcgccgggggccggcccgcgccacttcgtctttacgccacagggcgacggcctgtggctgattaatgaggaagcgtcgacgctgaccttctatcatctggataagcaaagcggcctgctgcgtgaaggcaaaactgtctccgcgctgccggaagggtataaaggcaccagctttgccgccggacttgtgttgagcaacgatggcaaacagctatacgtcgccaaccgcctgcataacagcattgcccacttcacggtgctggccgacggcagcctgagtcaccaggaagatatctggacgcgtggcgattatccccgcaccctgacgctggataatcaggggcagtggctgtacgtcatgaaccagcgtagcgataatattacccgcttcagcgtggcgccgaaggatggcaaattaacctttgcctccgactatacgccggtcggtagcccatcgcagatggtgatatccgcccaaccctgagccgtaattacaaggaactgacatgcgatttcccaaccaacgcttagcgcaactcttcaccctgctgcgaaatgaaacgctgccgcaggatgagctggcgcaacgcctgtcggtttccacccgtaccgtgcgcgccgatattaccgccctgaatacgctgctggtgcaatatggcgcgcagtttatccttaaccgcggcagcggttatcagctgaagatagataatccgacgagtttccaggcgctggaggagaccgcgccgaaggcgcagcacgtgccgcgtaccgcccaggatcgcatcacgtttctgctggtgcgtttcctgacctcggcgttctctatcaagctggaagacctggcggatgagtggttcgtcagccgcgccacgttgcaaaatgacatggttgaggtgcgcgagcgcttccagcgctatcagctgactcttgaaacccgcccgcgccacggtatgaagctgttcggcagcgaggtgtcaattcgcgcctgcctgaccgacctgctgtgggagctgacccagcaaggcgatatcgcgccgccgatcggcgccgaggcctttgcggcggaggtgccagcgctgctggagccggtgctgcaggagacgctcacgcggcatcatattcgcctcaccgacgccggcgagcgctttgtctgcctgtatggcgcggtggtggtgcgccgcgtcagcgaaggctacccgctggccgatttcagcgctgaagatgtggcgcagaacgtccgcgacgccgcgcgcgagctgacgggtgagctgcagcggctggccgggaaacctttatcgcccgccgaagaagagtggctatgcgtgcatatcgcggcccgtcaggtgcaggatgtcgatccggaaactatcagcgccgacgatgatgaagcgctggtcaattacatcctgcgctacatcaacagccagtataactacaacctgctggacgacgcccagctgcatgccgatctgctgacccacattaaaaccatgatcacccgggtgcgctaccagatcatgatccccaatccgctgctggataacatcaaacagcactacccgatggcctgggatatgaccctggctgcggtctccagttgggggaaatatactccgtacaccatcagcgaaaacgaaatcggctttctggtgctgcatatcggcgttgggctggagcgccactacaacatcggctaccagcgtcagccgcaggtgctgctggtgtgcgataccagcaatgcgatggtacggatgatcgaggcgatcctgcagcgtaaatatccgcagctggagatcgccgctaccatctcccagcgcgagtacgaacagcgggacgcgatcgaggcggatttcgttatctcaacggtgcggatcggcgaaaaagacaagccggtggtgaccatcgcgccgttccccaccgactatcagctggatcaaatcggcaagctggtgctggtggaccgtacccgtccgtggatgctgaataagtacttcgatgccgcccacttccgggtggtcgataaaccgatggatcagcaaacgctgttcgccgagctgtgccagcagctgctggaggaaggctttgtcgatgcggagtttcatgcttcggtggtggaacgtgaagcgatcgtcagcaccatgttaggggatggcattgcgctgccgcactccctggggctgctggcgaaaaagacggtggtttataccgttatcgccccgcagggcatcgcctggggcgacgaaaccgcccatctcattttcctgctcgctatcagcaagcgcgagtatgaagaggcgatggcgatctacgatattttcgtgactttcctgcgcgagcgcgccatgagtcgcctcgccgcgacccgcagcttcgatgagtttaaaacggtggcgatggagtgcgtcagccggttttgagaggcgttttccagattcgagtgtaattcaattgtaatgctatactgcattacaaaattccactttccggaggcataatggccacgctcaatgttcgactggacgataaactcaaaaaagaggcttatgccgtgctggagaaactcgatatgacaccaacggaggcggtacgcctgctgtttcaatacattgcggaaaatggccgcatgccggtgaaaagtatgaccatcagtgatggcgaagcggcgttattacgcaccgttcgcgaacggctggaaaacccacggccgggggttaaggtgagtctggatgacctatgaactggagtttgatccacgagcctggcgcgaatggcagaagcctggcgagacggtcaaaaaacagttcaaaaataagctccagcagattgtgcagaatccgcgaattgagtcggccaggctgagcgatttaccggattgctacaaaatcaagcttaaggcgtcaggttatcggttggtgtatcaagtacgagatagtgtggtggtggtttacgttattgccattggcaaaagagagaaagcggccgtttatcatcaggcgaataaacggctctaaacgctatcgcaaatgatgtacgacctggttgctgctgccgcgccagataagcgccggatctttcaaatcctgcacaaacttaccgtcaaccagcacgttaatcaggttcaccacctgcatttgcgcctcattcagctcatcaagtttatagccggtccagacccagatatctttgccggggcattcggcgcgtacgcgctgaaccagctttaaaatatccgcgacgttctgcggatgcagcggatcgccgccggagagcgaaagcccctggcgtttgatgcgggtgtcgttgaggtcggcgatgatacggtcggccatctcagcggtaaacggcataccggagttcacccgccaggtgcttttgttgtagcagccggggcactcgtggacgcagccggagacaaacagggtgcagcgggtgccggggccgttgacgatgtcgacggggtagtactggtgataattcattttcacttctcaattaacgccagagcggcgttggctgcgctcactcaccccagtcacgtactgaatgtacgctcccggggattccttcgtttgccgccttgctctgacgttaattgctttgcgaaaacgaaggagtgcggccatttcctggcgtcgctgcgctcggccgagctacaacagtggtagtggtagcccggataaggcgctgcgcgccgcgatccgggaacggctccttagtggccaaacggctacggggccggtcccttctccccgttggggagagggggaggggctaaaccagctggaattaaccaatctgcccattgcccaggtgcttcacgcggcgcttcacctcttcctgcttgccggcgttgaacggccgcgcgtccgggctgccgagataaccgcacacccggcgggtaacggaaacgcgggcggcgtcgtggttaccgcatttcgggcaggtaaagcccttgctggtgcactcgaactcgccggtaaaaccgcactcgtagcactcatcgatcggcgtattggtcccgtagtacggcacgtgctgatagctgtaatcccacacgtcttccagcgccttgaggttatgctggatattcgggtactcgccgtagcaaatgaaccccccgttggccagcggcgggtacggcgcttcgaaatcgatcttgtcgtacgggttgaccttcttctccacgtcgaggtggaagctgttggtgtagtaacctttgtcggttaccccttccaccacgccaaactcggcggtgtcgagacggcagaagcgatcgcacaggttttcgctcggcgtgctgtacaggctaaagccgtagccggtttcttccttccacaaatcgacggcgtcgcgcaggcgctggacgatggccacgcctttctcacgcaacgcctcgctgtcgtacatatgctggttgccgtacagcgcattgatggtttcatggataccgatatagcccagagaaatggacgcgcggccgtttttgaagatctcggagacgtcgtcgtcggctttcagccgcacgccgcaggcgccttccatatacaggatcggcgccacgcgagccttcactccttccaggcgggcgatacgggtcatcagcgctttgcgcgccagctgcaggcgctcgtccagcagcgcccagaaggcggcttcatcgcctttcgcttccagggcgatgcgcggcaggttgagactgatcacgccgaggttattgcgtccatcatgcacctgctcgccgttctcgttttcccataccccgaggaagctgcggcagcccatcggcgttttaaacgacccggtgactttcaccacctgatcgtagttgaggatatccgggtacatgcgcttgctggcgcactccagcgccagctgtttgatgtcgtagttcgggtcaccgaacttatggttcaggccgtcgcggatcgcgaacaccagtttcgggaacaccgcggttttgcgatttttaccgaggccggcaatgcggttgcgcagaatcgactgctggatcagccgcgattcccagctggtgccaaggccgaatccgaaggtgacgaacggcgtctggccgttggcggtatgcagtgtgttaacctcatactccagcgactggaaggcgtcgtagcactctttttcggtacgggcgcgggcatagccttcggcatccgggatctgccactcttcggcgattttgcgatgctttttgaagctttcgctgacgaacggcgccagcacttcatcgatgcggttgatggtggtgccgccgtaaatatggctggcgacctgggcgatgatctgcgccgtcaccgcggtggcggtagagatagacttcggcggctcgatctccgcgttgcccatcttaaagccctgggtcagcatgcctttcaggtcgatcagcatgcagttgaacatcgggaagaagggcgagtaatcgaggtcatgatagtggatcatgccgcgttcgtgagccatcaccacatcgtggggcagcaggtgctgccgggcgtagtgcttggcgacgatcccggccagcaggtcgcgctgggtcgggatgactttactgtccttgttggcgttttcgttgagcagcgcggagttggtctgctcgacgaggccgcggatctcctgattgagacggccgcgcttctcacgctggctatcgcggtcatggcgatactcaatgtaggcgcgcgccagctgcttataggggccggacatcagctggttttccaccgcggtctggatctcgttgatgtcgacctgggcgcggccctgcatttgttggctaacgacttctgcgacggtggcgcaatagtctgcgtcatcgactcccgctgctttagctgcacgcagaattgcttcctgaatgcgctctgagttgaacggcactttacagccatcacgtttcatcacatgcggtgtcatgatcactccatatatagaacaggttatccacagaggcggaggttatcccgaaggcgctgcacgctacggctcgtgctgtttaccttcgggtccggcccgttttatccacatctcatcaccgccagacatcgacaagatatggtgacataatagacgattaatacaacatgttgggccgaggcgcattttaagttctatatgtagtgatttgcatcaaagatgtttgcgattttattgacccagaacaaggtaaaaaggtgagagtacggatgatgggcgctggcgataaatgtaaatttaggcgcttaaaatataagcaaaaatcgagcccgttcacgcatgaaacgggcaaatattcaggcaatcaacgtatcgttaagcagatcgaccagcagtagcagggcatagcgagcctgctgcgggtcagcgggcagcggcaggatggcgctggccatatcgccaagggcgtgctgttccggcgtcagagcaataatggtcactccctgcgtacgcgcctgcaaagtggcgctttgcaacacagggttggcctcggcagtggccagcaccagcagcagatgatcgtcattgagggtgctggcggtcagccgcatcagcgctgcatcctgacagagattaatcgcgatgccggagggcagtagctgatgctggagcagcgcggccagcgtcacgtcctgggcgccaagggcgaagcagtgtaccgcacgggcgctcagcaggcgcgatttacacttttccaccgccgcttccgcggtatggccgagctgacgagttagggtaacgccaaggctgctaagtttgtcgcgccaggcgacgggcagggcggcgctgtccggcgtaagccagctggcgcgccgttcgctggcctgcgccagctgtttacgcagatcacgaatatcatcgcagcccaccgagcgggcgaagcgggtaatggtggcagggctgacccccgcgctggctgccagctcgtcaatagaggcgctggcggtaaagcttagattttgtagaataaaggtggcgacgcgcgactcctgggcactaaagcggcgcattccttcctgcagctgacctacgatatccatcctcatgttccctttggcaaaacccgcatttgaaaatatttttcaattatcgactgtctctctttatagcactcacgccgcatatttcctatggtcagagcagtaaagggtgacgccctggcgataaaaatgcgcaaaaattgagcctcgatcacatcggtgaaaattattttcatatagccttcactatcacacaatattaacaatatagtcgtccaggccctgggggctgaagcgataacacgtaaaggggaagcgcaatgccacgaatcgtactctgttgtgccgcaggcatgtcgaccagcatgctggtgaacaaaatgaaagcagaagcccagcagcgtgcgctggcgctggaaatctatgcggtggcggtggcggaatttgaacgtgaattgccacacgccgacgtcatcctgcttgggccgcaggttaaatatgaagccgggcgcctggccgcgctggccgcgccgcagggcaaggcggtggcggtgatcgatatggctgactacggcatgatgcgcggcgccgcggtgttggataaagcgctagccctgctcgaacactaattttctcatcccgtttttcatcatcatcacgtgcggtcctggcgatcgcgcgcggcgctctgtatgccgaaaatccgaaaagaggacactatgcaagcactgaaaattgccgttatcggcggcggcagcagctacacgccggagcttattgaagggattatcgttcgttacgagcagcttccggttacagagctggcgctggtagatgtcgaatccggccgggaaaaggtggagatcatcgccgcgctgacccggcggatgctgaaacataaagggctggagcaggtggcggtcagcgtccactttacgctcgatgaggccatccgcggcgccagctttgtgctgacccagctgcgtgtcggacagctggcggcgcgcgccgccgatgagcggctgggtctcaagtaccacctgctgggccaggagaccaccggcgtcggcggttttgccaaggcgctgcggacgatcccggtgatccttgaggtggcgcgtaaagtggaacagctggcgccggaagcgttcattctcaactttactaatccggcggggatcgtcaccgaggcggtcagccgctacagcaaggcgaagatcatcggcctgtgcaacgtgccgatcaacatgcagcacatgatcgtcgggatgctgggcgcccaggagtccgaagtaaaactgcgctttgccgggctcaaccatatggtttgggtgcataaggtgctacaggggcgcgaggatgtcaccggcaaggtgatcgacatgctgtgcgacggtaaggcgctgtcgatgaacaacattaaagagctgccgtggccagcggaattcctgcgcgcgctgaaggcgattccgtgcccctatcatcgctatttttggctgacgccggcgatgctggcggaagagatcgccgcggcgaaaaccaagggcacccgcgccgaacaggtgatgaaagtcgagcaggagctgtttgcgctgtacgccgacccgcagctggaagaaaaaccggagcaactgagctttcgcggcggcgcctactactcggaggtggccgtcgagcttatcaacgcgatctacaacaacctgggcgcggagatggtggtgaatacccgcaacaacggcgcgattcatggtctggatgatgatgcggtggtggaaaccaacagcattattgatgcgcaaggggcgcggccgctggcgttcggcccgctgccgccggcgatgaacggcctgacccagcaggtgaaagccttcgagcggttgacgattgaagccgcggtacacggctgtcgcgaaagcgcactgctggcgctggtgaccaacccgctggtcggtaacgtcaccgatgcccaggcgctgctggatgaagtattaaccatcaaccgtcaatggctgacgcaatttaactgaccgctatttcccctcgggagcacaccatgtcgaatacaagctggattgaacgttacgtcatgccggcggcgctgagaatcgccgggcaaaagcacgtcctgtcggtgcgcgacggcatcattctcaatatgccgtttatgttgattggctcattcttcctgattttcgcctacctgccgatccccggctatgccgatatgatgagcagcctgtttggcgaggtctggcgcgataaaatgttgtacccggtgaaagcgacctacgacatcatggcgctgatttccagcttcggcatcgcctaccggctggcggagaagtatcgcactctcgatccgctgagcgctggggcgatgtcgctggtggccttcatgatgacgatcccgcagaacacgctgtttacgccggtacacggcgcggcggaggtgattaaaggggtgatcccggtgagcatggtcggcagccaggggctgtttgtcgccattgtcatttcgctgctgtcgacggagatttatcgtttggtcgccagccgcaatctcgttatccgcatgccggacggcgtgccgccggcagtggcgaaatctttcctcgccctgatccccggcttctgtgtgctggcggtggtgctggcgctgcgcctggcggttgaggcctcgccgttcggcgacatcaacagcatgatcgccactttgatcggtattccgatgcatcacgtcggcggtacgctgccgggcatgattatttcagtcattttgattggtattttgtggaccctgggcctgcacggcgacgcgattgtgctggtatttattcagccggtgtggctgtcgaatatgtcagagaacctgacggcctttcagaacggccagccgatcccgcatatcattacccagcaattttacgacctgtggattgcgcccggcggcaccggcgcgctgctggggctggtgatatttatgttgctgcgcagccgtagtcagcagatgaaacagctggggaaaattgccgcgcccggggcattgtttaacatcagcgagccgatggtgtttggcatcccgctggtgatgaacccgtactttttcctgccgtttattttaacgccggtgctgctggtgatcgtgtcctataccgcgatggcgaccgggctggtggcgccgcccgccggaatcgcgctgccgttcaccacgccgatcttcatcagcggctatctggcgaccggagggcatatctccggcacggtgctgcaggtggtgaatttagcgatttcgctggtggtctactatccgttcttccgcgcctgggatcggctaaaggcaaaagaagagcacgcctcggcgcaaccccaagcgagcgctgcgattgctgatgccgaccgcgcataacctccagcctgacaaatcgtagccccggtgagcgttgcgccaccggggaaaagcgttatccctgcagccaccatatcgcttcgaacggccgcagcgtcagcccggtcgggcgcggggtggtctcggcatagttgctgatgatcatcttccactcgcccggggcctcagcgggctgccaggcctgcagctcgcggctcaggttagcggcgactaccagcgtttgcccctgccactgacgacgatagcaccacagcgacggatgctccggcagcagatcctcgtaatcaccccaggtcagtagcggcagggttttacgcagcgtaatcagctgctgataggtataaaacaccgaatcggggtccgccagcgccgcctcgacgttgatctcctggtaattatcgccaaggccgatccacggctcaccgtcgctgaagccaccgttctcgccggcgtgccacggcatcggcgtgcggctgttgtcgcgcgacttgctggcgaggatcgccagcagttcgtccgggctttgcccctgcgccgcacgttcgataaacatattgtggctttcgacgtcacggtaatcgctgatgctgctgaagtgcggattggtcatgccgatctcttcgccctggtagatatagggcgtgccctgcatgccgtgcagcaccatcgccagcatcttcgccgccgtcacccggtactcgccttcgtcaccaaagcgcgacacgatgcgcggctgatcgtggttacaccagaacagcgcgttccacgcccgattgtgcattccctgctgccagtggcggaacagcgccttcagcgccacatagtccgggcgggcgagggtccatttctctccgccgggataatcgacttttaaatggtggaagttaaaggtcatcgacagctcgcggccgtccagcgcggcgtactgctggcagtgctccagcgaggtggaggacatctcgccgacggtcatcaggttacgcggggtgaacacatcgcggctcatctcctgcaggaactcatgcacccgcgggccgtcggtatagaagcggcggccatccccgtccagatcgcagggaaaggtctggtcttttgagatcaggttgaccacgtcgaggcgcagaccgtcgacgccgcggtcagcccagaattcgcagacctttttcagctcggcgcgcaccgccggattctcccagttgagatcggcctgctcaatggcgaacaggtgcagataatactgcccgctgtcggcgtgccactgccaggcgttaccgccaaatttggagcgccagttgttcggcagggcgtccggttcgccatcgcgccagatatagaactggcggtagggactctccttattcagcgactgacggaaccattcatgttcggtcgacgtgtggttcagcaccatatccagcacgatacggatgccgcgggccttcgcctccgccaccagggcgtcaaagtcggccatcgtgccgtaggagggatcgatggcgatgtagttcgccacgtcgtagccgttatctacctgcggtgagacgtagaacggcgtcagccagatggcgtcgaccccaagcttttgcagatagtcgaggcgggaggtgacgccgcgcaggtcgccggtaccgctgccagtggtatcctgaaaactcttcggatagatttgataaataacgccgttttgccaccagtgggggagatgattcatagtactttcctgctgcaacgaggggcgccaaaggcgccccgaaagaagaagttagacaatctgcaaggtgccctgacggtacttgcgctgatacaccacgctggtgaggataatcggcaccaccaccgcgatagccatcgccatggcgtacacctgccagtaggtaggctggatggagaggatccccggcaggccgccgacgccgatgccgttcgccagcacgccgttcaggccgcacagcaggccggcgaggccagagccaatcattgcgcacagcatcgggaagcggtatttcaggttgataccgtacatcgctggctcggtgaccccgagataggcggagatcgccgccggtaccgagatttcacgttcattctgcttgcggctggcgatgatgatgccaaccaccgccgacgcctgggcaatattcgacagcgcaatcagcggccacaccggggtgccgcccatgctctggatcatctgcatatcgatagcgagggtggtctggtggacaccggtaatcaccagcggcgcgtagaggaagccgaacagcgcggcgccgatcggcgcgaagctgccggttaacagatggcgtaccgcgaaggccacgccgtcgccgatcaggcggccgaacggaccgattatggagtgcgcgaggaacaccgcgaggatcagcgagcagaccgggacaatcaccaggtagaggtagtcaggcacaatgcgcttgaggcgcgtctcgataaagcctaaggccaggccagccagcagggccgggatcacctgcgcctggtagccgactttggcaatggtaaacaggccgaagttccacacctccggcacctgctggccgaggagataggcgttcatcagctgcggggagacgagggtgacgccaaggacgatcccgaggatcggcgtgccgcccatcttcttcaccgctgaccagcagatccccaccggcagatagaagaagatcgcctcgccaatcagccacaggaagtcatagatggttttcagcgatggatacatctgggccagcgtctggccattgctcatgggcaggtcgccgataacgttgcggaaaccgaggatcagaccgccgctgatcagggccggcagcaggggaaagaagatctcggcgaagtgtgagattaattgttcatgccacttcatattttgccgcgcggcctgcttgacctgctctttgtcggcggaggtctggccggtggtcgccagcagggccttgtagtaatcgcccacctcggtgccgatgaccacctggaactggccggcgttagtgaagcatcccttcaccatgcgcagctgctcaatctcttttggtctggcgatggccgggtcgttcagcacaaagcgcaaacgggtaatacagtggctgacggtggcgatgttaccgcgcccgcccaccagttcgatcagtttatcgatgtcctgctggtttactttgctcatgatgaagcctcaaaaacagaggggagagatgccgtttttaccttgagggcatcctaaccgttccgcttaatttgcaaaatgggaacgttcccgaaacccggcgacgatcacataaatcgtccgagcgagattaattgagggcggcgggaatcacgatctggcggggatcgacgctgccggcgatctgctcgatcaactgccgggcggcccggcgtccggactcggcatagcccggatcgacggtcaagatttccgggtggagaaacttcatcagcggcgtgctgccgacgctggcgagctgcagcgcatcgcgaccctgctgctggaggtacttgctggcgccgagagcgagggtatccgtcgcgcagaccagggcgctggtttcagccatcagcacgctggcgacggtgtcatatccctgcttcatgcccagccccggcagggcggcggtgggcgtcagacgatgcttttcacagaaggcgaggtaggccagatggcggcgttcgccggtggtgacgtcgctgtgcggtacgccaagaaaactgatgtggcggtgtccgcgatcgtagagccgctgcatcagcagcgtgatggccccctcgtcgtcatagcacaccgaggcgaagccgggagcgtcgcgggccatcagcaccagggtgtcgcgccagggggcgagcatcgcttcgtcgatgccggtaaaaccgaacagcaccacgccgtcaatattgcgccgggcgagcatgccgagatgctcctccaccaacgccggggagaactggctctccatcataatcggatcgtaaccctgctcataaaaggcgggcagcatggtctgcacggcaaggttttccgacagcgaatcgagacgggtgacgataatcgccaccactttatcgctctggccgcgcatggcgcgggcggaacgggagggcgagaaaccgtgctgctgcatcaccgcttcgacgcgctcgcgggtccgttcgctgaccccgctctcgttgttaaggacgcgggataccgtcgatttccctacgccgcttaagcgcgcgatatctttgatggtcagccggttctgcatgcggaattctcgtcagggatggtagaagtgagcctaatgctactcaaccaaaccgcaatgagcaaagtctggtttacgttcggtttagttgcgcgggtttatcatcgccattattgccacacaatcctcagcgagggcgctataattcgcgccgtttatattcacttaccggagatagttatggaccccgatcccactcctcatcctcgatggagcaacctttctttccggtaagcctgtttaacactgctttaccggaaagcgtaaagcagtgacgtccttgatgtccctgccataaaaataacatgcctgacaggtaggttttgctacgcccgtcggcaacgctgcgttcgctttggcgagcgcggagggactgtttatgctgaaaaattatacccggcagctgttcgcgcagcttagccgccatctgccacgtcgtttagtccagcgcgatccgctgccggacgcccgccatctggcgagtggtcccattcctgaatcgcttggtcagcattgcctgaacgtggcggcgatggacgaccaggagatctggcgcgcctttgacagccaccctgaagggctcaatgaaggcgaagtggcggcgaaaattctcaaacatggtgacaaccagatcccggcgcagaagccctccccatggtgggtgcatctgtggacctgctatcgcaacccgttcaacctgctgctgaccgtgctcggcatcgtctcctattccaccgaggatctgttcgccgccggggttatcgccctgatggtggggatctcgacattgctcaatttcatccaggaggcgcgctcgaccaaagcggcggatgcgctgaaggcgatggtgagcaacaccgccaccgtgctgcgggtggtgaacgagcagggggagagccgctggctggagctgcctatcgaccagctggtgccgggcgacattatccggttgtcggcgggggatatgatcccggcggacctgcgtatcctgcaggcgcgggatctgttcgtcgcccaggcctcgctgaccggcgaatcgctgccggtggagaaagtggcccgcagccgcgatccgctgcagcaaaacccgctggagtgcgacaccctgtgctttatgggcaccaacgtggtgagcggctcggcgcaggccatcgtcttcgccaccggcggccgcacctggtttggccagctggccggccgcgtcagtgaacaggagagcgagccgaacgcctttcagaagggcatcagccgggtcagcatgctgctgatccgctttatgctggtgatggccccggtggtgctgctgatcaatggctacaccaaaggcgactggtgggaggcggcgctattcgcgctgtcggtggcggtcggcttgacgccggagatgctgccgatgatcgtcacttcgacgctggcgcgcggggcggtgaagctgtcgaagcaaaaggtcatcgtgaagcacctcgacgccattcagaatttcggcgcgatggacatcctctgcactgataaaaccggcaccctgacccaggataagattgtgctggagaaccataccgacgtctccggcaaggtctgcgagcgggtactgcatgccgcctggctcaacagccactaccagaccggcctgaaaaacctgctcgacaccgcggtgctggacggggttgagctggatgccgcccgcgggctggcggaacgctggcagaaggtagatgagatccccttcgacttcgaacgccgccgcatgtcggtggtggtgaaggaggatgacgccgcgcatcagctgatctgcaaaggggcgctgcaggagatcctcaacgtctcgacccaggtgcgctacaacggcgatatcgtaccgctggacgacaccatgctgcgccgcattcgccgggtgaccgataccctcaaccggcaggggctgcgggtggtggcggtggcgaccaaatacctgccggcccgcgaaggcgactaccagcgcgccgatgagtcggacctgatccttgaaggttacatcgccttcctcgatccgccgaaagagaccaccgccccggcgctgaaggcgctgaaggccagcggcatcacggtgaagatcctcaccggcgacagcgagctggtggcggcgaaggtgtgccatgaagtgggactggatgctggcgaagtggtgattggcagccagattgaagccatgagcgacgacgagctggcggcgctggcgaagcgcaccactttgtttgcacgtctggcgccgctgcataaagagcgtatcgtgacgctgctcaagcgtgaaggtcacgtggtgggctttatgggcgacggcatcaacgacgccccggcgctgcgcgcggcggatatcggcatctcggtcgacggcgcggttgatatcgcccgcgaggcggcggatatcattctgctggagaagagcctgatggtactggaggagggggtaatcgaaggccgccgcaccttcgccaacatgctcaagtacatcaaaatgaccgccagctccaacttcggcaacgtcttcagcgtgctggtggccagcgccttcctgccgtttctgccgatgctgccgctgcacctgttgattcagaacctgctgtacgatgtttcccaggtggcgatcccgtttgataacgtcgatgatgagcagatccgcaaaccgcagcgctggaacccggccgatctcgggcgctttatggtcttctttggaccgatcagctcgattttcgatatcctcaccttcggcctgatgtggtgggtgttccacgccaataccgtggagatgcagaccctgttccagtccggctggtttatcgaagggctgctgtcgcaaacgctgattgtgcacatgatccgcacccggcgcattccgttcgttcagagccgggccgcctggccgctgttcgccatgaccctggtggtgatggcggtgggtatcgcgctgccgttctcgccgctggcgagctacctgcagctgcaggccctgccgctgagctacttcccatggctggtggcgatcctggcgggctatatggtgctgacccaggccgtgaagggcttctacagccgccgctacggttggcagtgagggacgcgttttcggatgaaccacgtaaaaaaggcagcctgcgggctgccttttttcatgccgaggttagcgatcagcgacgcacggcgatagcttcgatctcgatcttcacgtctttcggcagacgtgcgacttcaacgcaggagcgcgccgggaaggtggcgttatgctcggtgaagaacgcttcgtaagtggcgttaacggtagcgaaatcgttgagatctttgacgaatacggtggtcttgacgatatcgccgacggtgaggccagcggcttcaacgatcgctttcacgttgttcagcgactggcgcgcctgcgcggacacgtcttccgggacgctgccggttttcgggtcgaccgggatctggccagaggtgatgatcatgctgccgaggtcaacgccctgaacgtaggggccaatcgccgctggtgcattttccgtcgcaatagttttgctcatgttatctccagatgaactgagtaatgttacgcaaaatcattcaggttgccgccaggcggtaagcgctgtatcgccggcgcagacgccgcctgaaggacgaagcgtagggtggtagccattatagggaggcctaccaccaataccaaccgcatttagttggccagcaccacataatgagaaaactctttttcgcagtatttgcatttgagtgcgatgtcatcagcgcgttttttcactgcaaaactggaagaaaccggttcggcgtggctgatacagttgctgttcgggcagaccagcacgctgtcgatacgatccggcaggctcgggcgggatttgcccaccacttcgtaatcatcaatgcggtttaccgtcgcctgcggggcgtacagcgacagctggttaacctgctcgtcggtcaggaaggtgttctcgattttaatcaaatccttgcggcccatctcgccggagggcaggttcaggccgatggtgatgcgctggtcggtttcggtcagtttgaacagggtgagcagcttaaagccgacctgcgccgggatatggtcaatcacggtgccgcgtttgatcgcttctacctgcagtttattgtcgtgtgtcatctctcattcccccttacagtgccagctcgctattcagtaccagtgccagtaacgcctggcgggcgaagatgccgttaccggcctgctggaagtaccaggcgtgcggtgttttatcgacatcggtggtgatttcgtcaatgcgcggcagcgggtgcagcactttcatgttggcgcgcgccccttcgaggtcggcggcgcgcaggacgaactgcgctttgacgttggcgtattccgacggatccagacgctctttctgcacgcgggtcatgtacagaatatccacttccgccatcacgtcgtcgatggcgctatgcaggctccaggcgatgcctttttcatcgagcatatcgaggatgtactgcggcatggccagcgcgtccggggcgatgaagtagaagcggttgccgttgaatttggccagcgcctgggtcagggagtggacggtacggccatacttcagatcgccgaccatcgccacgttgaggttttcgaggcggccctgggtctcctgaatggtgaacaggtcgagcagggtttgggtcgggtgctggttagcgccgtcgccggcgttcagtaccggcacgccgccggagaattcggtcgccaggcgcgcggcgccctcctgcggatgacgcatcacgatggcgtcgacgtaggtgctgatgacggagatggtatccgccagcgtttccccttttttgcccagtgaggtgttggcgctgtcggaaaagccgaccacgctggcgcccaggcggtgcatcgaggtttcaaaagagaggcgggtgcgggtcgaggcttcaaagaaacagctggcgataaccttatgcttcagcagctcgggttgtggattggctttcagctttgccgccgtcgccagcaccagttcgaggtcttcgcggctgagatcgtttatggaaatgatatgtttttgatatagcgggttagccatgcttatctcctgacgcctgggcaaaaaaaagccccttaaataaggggcttcgggaatccaatgagcaacggaaagaaaaacggcaggccagcgtctgcattgagacgcgctaagacagaatgtcgtacgcaattggccatgcttcctcccggcaaaacgactggcattatacgcagaccgttatgacgatcaagcgattcattcacaaacaggtaatcgtttgcctgtcgaaaagtgcgccagcgcaaagaagcgtgaaactgtactggtatggcagccgcgatgggggtataacacgataaaatgaaatgctgttttatatttgaggtaagcaatgattattggcaatatccaccatctgcagccatggctgcctgccgcgctgcgcgaggctatcgaacaggttatcgctcaggtcagcgaggcgacgccgctgggtaaacacgatatcgacggcgacaacctgttttatctgatttctgaagacaccaccgagccgcaggccgcgcgccgcgcggagtaccatgctcgctatctcgatatccagattgtgctccgcggcagcgaggggatgaccttcagcaccttgccgccaggagagccgcagaccgactggctggcggagaaagacatcgcttttcttgccgaaggccagcaggagaaaacggtgatcctcaacgaaggggactttgtggtgttttatcccggcgaagtgcataaaccgctgtgcgccgtaggcgccccggcgaaggtgcgcaaagcggtggtgaagatgctgatggcgtaaaatggcgaaccgaatcccggatgaacgccgtgccatccgggacacagccgcgagcgaggggctatttgctcagcgtcgccaccatcaccgctttgatggtgtgcatccggttttccgcctggtcgaagaccacgctcgccgccgactcaaacacctcgtcagtcacctccatgccgccgtgcaggccgtaatcggcagccatctgtttgcccagcgtggtctggtcgtcgtggaacgccggcaggcagtggaggaacttgacctgcgggttgccggtcagcgccagcatcgcgctgttaacctgatagtcgcgcagcagggcgatacgttcggcccatttttccttcgcctcgcccattgagacccagacgtcggtatagataaaatcggcgcctttcacccccgcggcgatatcttccgtcagggtgatgttgccgccctgctgtttggccagcgcggtgcaggtctccaccagcgcggcctccggccagcaggccgatggcgccaccaggcgcagatccagaccggtcaacgcggcggcttccagcatcgaattgcccatgttgttgcgcgcgtcgccggcgtagaccagcgtcatctggttaaaggctttgcccggcagatgctctttcatggtcagcaggtccgccagcagctgggtggggtggaactcgttggtgaggccgttccacaccggcacgccggcgtattgcgccagggtctctaccacttcctggccgtggccgcggtactgaatgccgtcgtacatccgtccgagcacgcgggcggtgtccttgatcgactctttatggccaatctggctgccgcttggccccagataggtcacgcgggcgccctgatcgtatgcggcaacttcgaaagagcatcgtgtacgggttgagtctttttcgaagatgagcgcgatgtttttccctgccagtttctggacttcgataccgtttttcttatcggctttcagctttgccgccagctcgagcagggcggtgatttctgcaggcgtaaaatcgagtaactttaaaaaatgcttctggtaaaacgcagacatggttccctcacctggcataggccactaattgaattaaaattcaatttatatgtatgaatattcatttgcaagtctgtgatcgaaatctttcactgagaagtggaggcaatgacggcggtatgtgacaatagggataactgccgcacattatgaggaacgagccatggcaaacccggaacacctggaagaacagcgtgaagagacgcgtctgattatcgaagagctgctggaagatggcagcgatccggacgcactgtacacgattgagcatcacctctctgcagacgatttcgaaaccctggagaaagtggcggttgaagcgttcaagctgggctacgaagtgaccgagcccgaagagctggaagtggaagagggtgacatggtcatctgctgcgatattctgagcgaatgcgcgctgaacgcagacctgatcgatgcccaggtggaacagctgatgacgctggcagaaaaatatgacgtcgagtatgacggttggggcacctattatgaggacccgaacggtgaagacggcgacgacgatgacgaagagtatgtcgatgaagacgacgatggtgttcgccactaagtcgcaaatgtcgtagatggatacggcggcgcctgccgccgtatagcaaggaactttcatggattacccgcagattctttccccgattatcaacttcctgcactgcccgacgccgcaggcgtggattgacgaagcccgcaagccggaaaacctggcgctgctgctgaccgaccacatggtgtgcgagctgaaagcggcgcagaacgccatgctgctggtgcgtcgctacgtcgcggataaagctgacgccgacgaactgttggcctgcctgaagccgtacgaagacttcacctaccgccgggggccggagccggattttgtcaccctgcataaacggatcaacaaaagcgccatgccgcagaccgacgacccgtggggtcgccagctgctggacagcatgattttattgattaaagaggaactgcatcacttctggcaggtgcgggagatgatgctggcgcgcgatatcccctatgtcaaaatcaccgccagcaactatgcccgcggcctgcggcgcgaagtgcgctcgcatgagccggtgatgctgatcgataagctgatctgcggcgcctatatcgaggcccgctcctgcgaacgctttgccgccctggcgccgcggctggacgacgatctgcaaaagttctacctgtcgctgctgcgctccgaggcgcgtcactatcaggactatctggatctggcgcagaagattgccggagaagatatcagcgagcgggtgcgccagctcggcgaggcggaagcggcgctgatcctccgtcccgaggccgagttccgctttcacagcggtgtgccggtagcggcgtaacccacgatattcgggccctgtagccccggtagccactaacaccggcagtttcagtagccatggggagagatagcgttgagagcttcagctcgcaatggtacgggccgtaggtcgggtaaggttagccgccacccgacaaaaaaacggcaccgcgagcacgggtaaggtgccattcgggacatacccggctcgcgctacgcttagccgggctaccgaactgtagccccggtaagcgtagcgctaccggggacgcctgcgatatcgaggcgctacagcgttttcagcatccgtacttcgcagtccacgtggccggtgcagcccagcggcccgtcaatgtgctcgaagccaagatgttcatataagccgatcgcctccgtcaggaaggcggtggtttccagatagcagcgcttaaacccttgttcgcgggcgtagtccagcgccagcagcgccagcttcttcgccagcccctggccgcgggcgctggtcataaaatacattttctgcagttcgcagatatccggctcgctgcaggcgagcggcgcgacgccgccgccgccaaccacttccccctcttgctccaccacccagtaggcggagcccggctggctgtacagctcatacagctcatcgagattcgggtcggcgaccgtatagcctttatcggcggtcaggccatattcagccgagacctggcggatgaccctggcgatggcggcattgtctgccgccgtaatgcgacgcagcaacgtcgccgcggggacgctcgtattcatacaatgactcattacccaaaaaagacgaatgatgatgttaataacatcgcgacaggggaaagcgcaagcgaggatgtttcataaaaaacgccccttgccgggtggcaaggggcgggaggatcacagcgcggcgatcaccgcctgctgttcaatcagcttcgctttcgcttccgcgtagccttccagcttctcgcgctctttagcgatcaccgcttccggcgcgcgggcgacaaagccttcgttggccagcttgctctcgatgcggccaatttcaccttcgattttggccacttctttcgccagacgcgccagctcatcttctttattgatgaggcccgccatcgggatcagcagctcggcgccgtcgacaatcttggtcaccgagaccggacctttatcatcggcaggcagcacggtaatgctttccagacgcgccaggttcagcaggaagctgcggttgtcgttcacacgacgctcggcctctttgctgcagccgcgcagcagcagttccagcggtttgcccggagcgatgttcatttccgcacggatgttacgcacggcgacgatcgcctgcttcagccattcggtgtcggccagcgccgcgtcatccacctgagaagcatcgtactgcgggaacggttgcagcatgatggtgtcggcggtgatcccgcagatcgctttcacgcgctgccagatggtttcggtaatgaacggaatgatcggatgcgccaggcgcagcagaccttccagcacggtgaccagagtatggcgagtcccgcgcagctccgcttcgttgccaccgttcataaccggcttggtcagctccaggtaccagtcgcagaactggttccaggtgaactcatacaggatgccggcggcgatatcgaagcggaagttatccagcgcttcgcgatacgctttcacggtgtggttgaattccgcgatgatccagcggtcggcgagggagagcaccatttcgccgccgttgaaaccgcaatcctgatcttcggtgttcatcagcacgaagcggctggcgttccacagcttattacagaagttacggtaaccttccagacgcttcatatcccagttgatgtcgcggccggtagaggccagcgccgccagggtgaagcgcagggcgtcggtgccgtgcggctcgatgccgttcgggaactgtttctcggtacgcttgcggattttatccgccagctgcggctgcatcatgttgccggtacgtttttccagcagttccggcagggtgataccgtcaaccatatccagcgggtcaatgacgttacccttggacttggacatcttctggccttcgtcatcgcggatcagaccggtcatgtagacggtcttaaacggtacctgcggcttgccgttttcatctttgatgaagtgcatggtcatcatgatcatgcgggcgatccagaagaagatgatgtcgaagccggacaccatcacgctggtcgggtggaactgacgcagggcatcggtgttttccggccagccgagggtggagaaggtccacagcgcggaggagaaccaggtatcgagaacgtcttcatcctgacgcagggcaacgtcggcgctcaggttgttttcctgacgcacttcgtcttcgctacggcctacgtagacgttgccgtcgttgtcataccatgccgggatgcggtgaccccaccacagctgacgggagatacaccagtcctgaatatcgcgcatccaggagaagtacatgttttcgtactgcttcggtacgaactggatgtcgccgttttcaacggcttcgactgctggcttggccagcacgtccgcgcgcacgtaccactggtcggtcagcatcggctcgatcaccacgccgccgcgatcgccgtaagggacggtcaggtcgtgcggtttgatctcttccagcaggccgagggcgtcaaccgccgcaacaacggctttacgcgccgcgaagcgttccagtttctggaactccgccgggatctcgctggagtagacgtcggattcattgcctttggtgtcgtagacttccgcgctttcgcggatgtcgccgtcaaaggtgaggatgttgatcatcggcagctggtgacgacgacccacttcgtagtcgttaaagtcgtgcgccggggtgatcttcacgcagccggtgcctttttccatgtcggcgtgttcgtcgcccacgatcgggatgcggcggttaaccagcggcagcaccacgaatttgccaatcagatctttgtagcgcggatcttccgggttaacggccacgccggtatcgcccaagagggtttccggacgggtggtggcgaccaccaggtaatctttaccgtcagcggttttcgcgccatcggccagcgggtagcggatgtgccacatggaacctttcgattcgcggttttccacttcgaggtcggaaatggcggtgcgcagtttcgggtcccagttaaccaggcgtttgccgcggtagatcaggtcttctttgtacaggcgaacaaagacttctttcacggcattggaaagcccctcgtccatggtgaagcgctcgcgctcccagtccacggagttgccgagacggcgcatctgacgggtaatggtgccgccggattccgctttccactgccagattttgtcgataaaggcgtcgcggccgtagtcgtggcgggttttcccttcttcagcggcaatcttacgctcaaccaccatctgggtagcgatacctgcgtggtcggtaccggcctgccacagggtgtttttgccctgcatgcgctggtagcgaatcatggtatccatgatggtttgctggaaggcatgacccatatgcaaactgccggtgacgttcggcggcgggatcatgatgcagaagctctcctggctttcatcaccattcggtttgaaatagccctgcttttcccagtgctcgtaaagcggctgttcgatatcttgtgggttgtatgtcttttccattatttccaggttgccgtgttcaggttgaaaccagccatgcggtacgccttatagcgttcgcgcgccagttgtttcagattgtcttcgtaagggacaaagtctatcacttctgtgaaagcggtggcaaaatctgcaaagtttagccgcaggctgataagaatatcccgcgggctgctgttgcgcttttgcggccaggcaatctctaccggcgcgccgcctctcgggccttcgcccgccaggttatgcggcacaaagctttccggcggccgcgaccacagcgcctcgtcgaggcgaatcgcctgctgttcatcttcgcaggcgatcaggacgcgcttgccgttgcgccaacgttctgcggcaatgtcacacaccagctgctcgacggcgctcaggccgtcgacggtggcgtcattgtccagaagatagaacgttgcgtttttcatatatggggcttcttgttgtggatttaaatgcaaagccgggcggcgctacgcttacccggcctacagtgtgctgccgtttgtaggccgggtaaggcatcgccgccacccggcatgtcacatcactcttcgccgttaaaacccgcacgattgagcaggaactgcgacagcagcgccaccggacgaccggtcgcgcctttggccttaccggaacgccaggcagtaccggcgatgtcgaggtgcgcccagttgtacttgcgggtgaagcgcgacaggaaacagccggcggtgatcgcgccgccaggacggccgccaatgttcgccatatcggcaaaattggactccagctgatcctggaactcgtcggccagcggcaaacgccatgcgcggtcgcccgccagttcggaggcgccgatcagctcatgggccagcgggttatggttcgacatcaggccggtaatgtgatggccgagggcaatcacgcaggccccggtcagcgtcgccacgtcgataaccgcttccggctcgaagcgctcaacgtaggtcagaacgtcgcacagcaccaggcggccttcggcgtcggtgttcagcacttccaccgtctggccggacatagtggtcaggacgtcacccggacgataggcgcggccgccaggcatgttttcacagcccgccagcacgccgatgacgttcagcggcagctgcagttcggcaaccatccgcatcacgccgtacaccgccgccgcgccgcacatgtcgtacttcatttcgtccatgccttcggcaggcttgatggagataccgccggagtcgaaggtcaggcctttaccgaccagcacgatagggcgcgcgtcctcagccgggttgcctttatattcgatgaccgacatcagcgactcgttctgcgacccattgccgacggcgaggtaggcgttcatccccagctcgcgcatctgctgttcgccgatcacccgggtgatgacgtttttgctgtaggtatcggccagctgacgcgcctgggaagccagataggcggcgttacagatgttcggcggcatattgccaagatctttcgccgctttgatgccggcggcaatcgccaggccatgctgaatggcgcgttcgccgctggtcagctcgcgacgggtcggcacgttaaagaccattttacgcagcgggcgacgcggctcgcttttgttggtcttcagctggtcgaagctgtacagcgtctctttggcggtttcaaccgcctggcgaactttccagtagttgttacggcctttgacgtgcagctcggtcaggaagcagacggcttccattgagccggtatcattcagggtattgatggttttctggatgacctgcttatactgacgctcatccagctcgcgctctttgccgcagccaatcagcagaatgcgctcagacagaatgtttggcacatggtgcagcaataacgtctggccaggtttgccttccagctcgccgcgacgcagcagggcgctgatgtagccgtcgctgattttatcgagttgttcggcgatgggggagaggcgacgtggttcaaagacgccgaccacgatacaggcgctccgctgcttctccgggctaccgctttttacactgaactccatgcactatgctcctgaatcttaaagacaacagtggtggctacggctatactcgtcgcctttcaagttgcagatgcgccggctgcgcctgcttaccctgacgtggcacattgtgcgcgccaggggccacagccctgctgccttcttacaactcgaaatccattgagtatataattgcaagctttcgtaactcatatccgctgttgcggtgacttcgtgttaatcttaacgttattaaggcctgggttcgtcagaaaagatcctgacatgcagaaccgatgagtcatttaatcttagcgacgttttcgacgaccaaagagaataaatgacgtttaagccatgaaacaagcaattttcctgcactaaaacgggtttttacgggcgtatttatagtgataatcataagatatctggttcgtgagacgctgaaaagccagttggcgatcctattcatcctgttactgattttcttttgtcagaaattagtcaggatcctcggcgccgcggtggatggcgatatcccaaccaatctggtgctctcgctgttggggctcggcatcccggagatggcgcagcttatcctgccgttaagtctgttccttggcctgctgatgaccctcggcaagttgtacaccgaaagtgaaattacggtgatgcacgcctgcggcctgagcaaagccgtgctgatcaaggcggcgatgatcctcgcgctgttcaccggcgcggtggcggcggtgaacgttatgtgggcggggccgtggtcgtcgcgccatcaggacgaagtgctggccgaagctaaagctaaccccggtatggcggcgctggcccagggccagttccagcaggccagcgatggtaacgcggtgatgtttatcgaaagcgtcaacggcaaccgtttccatgacgtcttccttgcccagctgcgtccgaaaggcaatgcgcgcccctcggtggtggtggcggattccggcgagctgtcgcagcagaaagacggctcgcaggtggtgaccctcaacaagggcacccgctttgaaggcaccgcgatgctgcgcgacttccgcattaccgacttcaataactatcaggctattatcggccaccaggcggtgagcgccgatccggacgacaccgaacagatggatatgcgcaccttgtggaaaacccacaccgaccgcgcgcgcgccgaactgcactggcgcttcacgctggtggcgaccgtcttcattatggcgctgatggtggtgccgctcagcgtggtgaacccgcgtcagggccgcgtgctgtcgatgctgccggcgatgctgctttacctggtgttcttcctgctgcaaacgtcgattaagtcgaacggcggcaaaggcaaaatggacccggctatctggatgtgggcgattaacctgctctattttgcgctggcggtgctgttaaacctgtgggacacggtgccgatgcgccgcttccgcgcccgttttaataaaggagcggcctgatgcaggcgtttggcgtacttgaccgttatatcggtaagacgattttcaacaccatcatgatgaccctgttcatgctggtgtcgctctccggcattatcaagtttgtcgatcagctgaaaaagtccgggcagggcagctacgatgcgctgggcgctggtctctacaccatcctcagcgtgccgaaggacatccagatcttcttcccaatggcggcgctgcttggcgcgctgctggggctggggatgctggcccagcgcagcgaactggtggtgatgcaggcatccggtttcacccggctgcaggtagcgctggcggtaatgaaaaccgcgatcccgctggtgctgctgaccatggccatcggcgagtgggtggccccgcagggcgaacagatggcgcgcaactaccgtgcccagcagatgtacggcggctcgctgctctcaacccagcaggggctgtgggcgaaagatggccacaattttgtctatatcgaacgcgtaaaaggcaacgatgagctgggaggcgtcagcatctatgccttcaacccggagcgtcgtttacagtcggtgcgctatgccgcttcggcaaaattcgatagcgaaaataaagtgtggcgtctgtcgcaggtggatgaatccgacctgaccgatccaaagcaggtgaccgggtcgcagatggtgagcggcacctggaaaaccaacctgacgccggacaaactgggcgtggttgccctggatccggatgcgctgtcgatcagcgggctgcacaactatgtgaaatacctgaagtccagcggccaggatccgggacgctaccagctcaatatgtggagcaaaatcttccagccgctgtcggtggcggtgatgatgctgatggcgctgtcgtttatctttggcccgctgcgtagcgtgccgatgggcgtccgggtggtgacggggattagcttcggctttatcttctatgtcctcgaccagattttcggcccgctgaccctggtctacggcataccgccgatcatcggcgcgctgttgccgagcgccagcttcttcctgataagcctctggctgatgatgcgcaaggcctagcgggtaagcctgaaacgtaagccccctcagcgatgagggggcttttttttagcgcttgcgtccgcccagcaggctgcccagcatgccgcggacgatctgattggtgacctggcgaaccgcgcttttcgctgcggtctgcacgataccgtcgcgtttaccgccccgcgggccggtgctgccgaacaggatatctttcaggccgccaagcagcccgtcgtcatcgccgttctgctggcccttcgccggcggagccgactgctgcccggtggcgacctgcaccccttgctgcagcatttcgaaagccgactcgcggtccacctcctcctcatacttaccgtacagcggcgagtggttcagcagaccattgcgctcgtcatcgctgaccggccccattcgcgaacagggggcgataaccatcgcccgctcgaccaccgacgggctgcctttctcatcgaggaaggagatcagcgcctcgccggtgcccagctcctggatcgcctgctcggtactgaaggccgggttggcgcgcatggtctgggcggcggttttcaccgccttctggtccttcggcgtaaaggcgcgcagggcatgctgcacgcggttgcccagctggccgagcacggcgtcgggaatatccgccgggttctgcgagacaaagtagacgccgacgcccttggagcggataaggcggatcacctgttcaattttatccagcagcacctgcggcgcgtcgttgaacagcagatgcgcctcatcgaagaagaacaccagcttcggtttatcgaggtcgccggcttccggcaggcgctcgtagagctcggagagcatccacagcaggctggcggcgtacagcttcggcatctggtagagcttttcggcgctaaggatattgatcacccctttaccgctggcatcgacgcgcatccagtcggcaatatccagcatcggctcgccgaagaagtgctcggcgccctgttgctccagggtcaacagcccgcgctggatggcgccgatcgaggcgctgttaatattgccgtactggttctggaaagacttggcgttatcgccgataaactgggtgatggcgcggaggtctttgaagtcgagcagcagcaggccgcggtcgtccgcgatgcggaaaataatgttcagtacgccgctctgcacctcgttgagattgagcaggcgcgccagcagcagggggccgagatcggagaccgtcgcccgcaccgggtggcccttctcgccaaagatatcccagagcaccaccgggttggcgtgcggctcccagtcgctgacgccgatcttctccagccgcgcctgcagtttctctgagctctgccccgcggcggcaatgccggtcaggtcgcccttgacgtcggccataaataccggcacgccaatctccgagaacgactcagccagcttctgcagggtgacggttttaccggtgccggtcgcaccggtgataagcccatggcggttggccatcgcgggcagtaaatagagcgcgttatccagcgtgcgcgcaatcaacaggggtgagctcatggtcgattcctccatttatcctgcgacgattataggcaacctcgtcgtccggcgttgggaaaatcgtcacgcgccgcgcacgctgtaccgtgagggtctcaggcgcagtggcgctggatgagcgcgatgctctgctcaatttcgcgctcgatatccgcttcgctccattgcgccagctcgggggcgaagggctcaaaagcgtacaccccctgatagccgcgggcttccagcgctttaacctgctcgcaggtgccgagacgatcctgcggggttagcatgatgcgctcggcatcggtgagctgctcgcgcggacggctatcgtccactcctgaaaggtgcaccagcccgatatccgccacctctacctggctgaactcgtccgccgcctgcgggtaaagatggtgatggaaggtgtcgatcagcagcttaaacggcacgcgggcgtcgtggatcagcgtctgcgcctggtgcgcagaacgcagcgagctttgcgggaagcccagcggctccaccaggccgtggatgccatagaaggcgaacagcggcgccaggtcgcgcagggcgcccagggtttcgctggccggcacctcgctgccgtcgttgagcggacagagcaccagcgatttggcgccgatggcctgggcctctttcagcagcgattcggtcaactgccgcacctcttcgctacgacggttaaaggggtagaccgcgttaatcgtcaggatctcgatgtggtagcgcgccgccagctcgcgcacctgctgatggctcagatcgtcggtcacttttccgctgggtaaatcgttgcgcagctcgaccttattcaggcccagacggttcaccagacggaaaaacgcttcaatgctgagcgctggcgcgattttgcggttaatacaaaaacgttgcattgcgatggccataggacactcctgacggaagagggggtaggttcgttcaattggctaacagtcaaaacgtttattccaaaattagcaagaatggaaatgatgaatgtttgagctgtctcgcaaaatatcaccggcaccgactaccggcgcgacagcggcgggaagcctggcgtcgagggcaacgaggcgcgatgcgggaagcgcacaggcgaccggttagcgcaaaatgcgactgttatcaccaaaatgaaatttcatttcacaacaatgttgaaatataaatttcattttactacggttatagcacagcagaatcagcgacgggccggtgtgcgctggcccccttcactatgaggcgagaacatgacgatcacaggaaactttattggcgggaaaaccgttattagcagcagcaacgaaacgatgccggtgtacgacccggcgacgggcaaagcggtgcgcgaagtcacggtgtcaaccgcgcaggaagtctccgaggcgattcaggttgctcgcgatgcgtttgacagctggtcccgtaccacgccgctgcgccgcgcccgcgtgctgttcaacttcaaaatgttgctggagcagcacgtggaagagctggcggggatcatcgtcagcgagcacggtaaggtgtggtcggatgcgctgggcgagctgacccgcggtatggaagtggtcgaattcgcctgcgggatcccgcacctgattaaaggcgaatactcctctgacgtcggcaccggcgtcgacagctactcgttgatgcagcccctgggcgtggtggcagggatcaccccgtttaacttcccggcgatggtgccgatgtggatgttcccgctggcgctggcctgcggcaacagtttcgtcctcaagccgcccgcgctggcgccgacggccgccgtgcgtctggcagagctgctgaaagaggccggtctgccggacggcgtgtttaacgtcgtgcactgcagcaatgaagatgctgagcagctgtacactgatccgcgtattgcggcggtgagcttcgtcggctcctccggcgtggcggagtatatctataagaccgccagcgcccacggcaagcgcgtgcaggccttcggcgccgccaaaaaccacgcgattgtgatgccggatgccgatctcgacgctaccgttaacgccattatgggcggcgcttttggctccgcaggcgagcgctgcatggcgctgccggtggtggtggcggtgggagatgaaaccgccgacaaactgatcgcccgcctgaagccgctggtggaagcgctgaaagtaggtccgggctgcatgcgtggccaggaagagaacgagatgggaccggtggtgtctgatacccatcagaaaaaagtgctcggctatattgataaaggcgaaagcgaaggggcaaaactggtggtcgatggccgcaaactgcgcgtgccgggttacgacgcgggctactatgtcggcggcaccctgttcgatcacgtcaccccggagatgaccatctggcgcgaagagatctttggcccggtgctggggattgtgcgcgcggcggactatgacagcgcccttgagctggtcaacagccacgagtttggcaacggcagcgccgttttcaccagcaacggccacaccgcgcgtgaattcgtccacgacgtgcaggcggggatggtcggggtgaacgtgccggtcccggtgccgatggcgttccacagcttcggcggctggaagcgctcggtgtttggcgcgttgaacgtccacgggccggacggcgtgcgcttctacacgcgtatgaagaccgccaccgtacgctggccggcagggcagcagaccgtatctgaattcagcatgccgacgttaggttaatcggcgaaggagagcgccatgtcgttactggctaaatcgcgaaaagagggacagatccagcatattacgccgcaaagcgccggttggcgctatatcggctttgatgtctggatgttgaaaaaagggcagaccgtgacgctggagagcggcgatcgcgagctgtgcctggtgctggtcgccgggctggcgtcggtgaaaacgcagcatgccgatttcccgaatctcggtaaacggatgtcgccgtttgaacgcaccccgccgtggtcggtctacgtcccgccgcaggataaagtcgaggtgactgccgattccgatctggagctggcagtatgcagcgcgccgggcaaaggcagcttcccggcacgcctcattcggccggaagacgtcggcgtagagcaccgtgggaaagggcgcaatcagcgccgggtgcataatattctgccggacagcgccgaggcggactgcctgctggtggtggaagtctacaccgacgagggggccaccagctcgtggccgtcgcataagcatgataccgcccagccgggcaaagagacgcagctggaagaaacctactatcaccgcttcgatccgccgcagggctttgccttccagcgggtctacaccgacgaccgcagcctggacgcctgtatggcgccctacaaccacgatgtggtgatggtgccgcgcggttaccatccggtggcagcgattgccggttacgatagctactatctgaacgtgatggccgggccggaccggaaatggctcttcacctgggaagatgaccacgcctggatcaacacgccggagtacccgcgccacgactgacgcgaggtgcagaagcggataaagaaggccggttagcgatgctaaccggccttcctgtttgagggcggcgggtgttttttcgcgaaacgctccgcggaatcccactcccgacccggcaagcgcagcgccgcaggggaggatacctccggcgccatacccgcctttgtgccggatggcgctacgcttatccggcctacggcctcctcccgtaagctcctataccccaggcccggtgctgcttttatgccgggcggcggctcacgccttgcccggcatacggttcgtgcgacctgccgttaatttattcaccattgttgctgaaactgccggtgctgacggcctcaaaatcgctgagacgttcccggaaggccggggcagcccgcatggatgcgggctgagggccgtgttttgcacggacgctgcctcggcccgacccgaagcctgcagggataagtcgaagggaccgcgtagcggcgattttgctggccggagcccggggggacagggggcggcggcgactggccgccccctgtgcgctccctgcgccatgccaggcataacgcagaagattaaccgggagcgcaatgtgcgctgaaatcacatgcgacaaacgctttacccggattaataaagttgcataccaataacattatctccggcaccccgcaggcgcatataccccaggcccggcaagcgcagcgccgccggggaggacaccaccggcgccatacctgcttttatgccggatggcgctacgcttatccggcctacgggagcctcccgtaagcccctataccccaggcccggcaagcgtagcgccgccggggagggcaccaccggtgccatacccgcctttgtgccggatggcggcttcgccttatccggcctacgggatcctcccgtaagtccctataccccaggcccggcaagcgcagcgccgccggggaggacaccaccggtgccattcccgcctttgtgccggatggcggcttcgccttatccggcttacgggagcctcccgtaagcccatataccccaggcccggcaagcgcagcgccgtcgggcaggacacctccggcgctatacccgcctttgtgccggatggcggcttcgccttatccggcctacggcatcctcccgtaagctcctataccgtaggcccggcaagcgcagcgcgaccgcaggcacggtgctgcttttatgccgggcggcggctcacgccttgcccggcatacggttcgtgcgacctgccgttaatttattcaccattgttgctgaaactgccggtgctgacggcctcaaaatcgctgagacgttcccggaaggccggggcagcccgcatggatgcgggctga

SEQ ID NO: 61 - DNA, 269970 bp, Unknown
  source: /note="Description of Unknown: MKP2_coc_1 Mutant Bacteria sequence"
tgcgccaggaagacgccatctacggcggggagatgagcgcgcaccattacttccgcgacttcgcctactgcgacagcgggatgatcccgtggctgctggtggcggagctgctgtgcctgaagaacagttcgctgaaatcgctggtggcggaccgccaggcggcgttcccggcgtcgggggagatcaaccgcaagctggggaatgcggcggaggcgatagcgcgcatccgggcgcagtatgagccggcggccgcacacatcgacacaacggacggtatcagtattgaataccctgagtggcgttttaacctgcgcacgtccaataccgagccggtggtgcgtctgaacgtggagtccagagcggatactgcgttaatgaatgagaaaaccgccgagctgctcaacctgttaaaagaggaatcgctttgagtcctatgttttcagcgatctatcgctaccgtggctttattattgacagcgtcaaacgggactttcagtcccgttaccagactagcttcttaggcgcggcatggctaatcttacagccgatcgccatgatttccgtctatacattaatcttttctgagttaatgcgtgcccgcctggcgggcatggacggcccttttgcctacagtatctacctctgttccggggtgttaacctgggggctgtttacggaaacgctcaatagtctggtcaacgtttttctgaccaacgccaacattcttaaaaagcttagctttccgcggatctgtttaccaatcatcgtcaccgcttcggcgttcattaacttcctgatcatttttggtctgttcgtgctgtttctgatcgttacgggcaatttcccgggcatgattttctttgaaatcattccggtgctgatcgttcagatgctgttcaccctcggcctcgggatcatcctcggggtgctgaacgtttttgtccgcgacgtcgggcagttcgtgaatatcctgctgcagttttggttctggtttacgcccattgtctacgtgtccaaaacgctgccggagtgggtctctggtctgctggcgtataacccgatggcgaccattatcggttcataccagaacgtgatgctctatcaccagagccctaactggctggcgctgcttccggtcacggtgctgtccgtcattctgtttttatttgcctggcgtttatttaaaaaacatgccgctgatattgtggacgagatttaatcatgagtatcaaagttcagcacgtcggcaaggcgtataaatattatccatccaaatggaaccgggtcattgagaaacttctgccgggcgataagccgcggcacagcaagaaatgggtattgaaagatatcaatttcagtattgaacccggtgaagcggtcggcattgttggggtgaacggcgcaggtaaaagtacgttactgaagctgctgaccggcaccactcagccgaccaaaggcagcattgagatccaggggcgtgtcgctgcgctgctggagctgggcatgggcttccatcctgactttaccggtcggcagaacgtgtatatgtccgggctgatgatgggcctgagccgggaagagattgagcgcttaatgccagagatcgaagcctttgcggatatcggcgactacattgaagagcccgtgcgcatctactccagcgggatgcaaatgcgcctggcgttcgccgtggccacggcctcacgcccggatattctgatcgtcgatgaagcgctttccgttggtgactcccgttttcaggcgaagtgctacgcccgtattgcggactttaaaaagcagggcaccacgctgctgctggtctcccacagcgccggggatatcgtcaaacactgcgaccgcgccattttcctcaaaaatggtgatatctgtatggacggcaccgcccgtgacgtgaccaaccgttatctggatgagctgtttggcaaagccgacaaaaacagcgcgccaaaaagcgcaacggcaacctcgtcagccagcggcgaaagtcagatgtctctcgatgagattgaagatgtataccacacgcgcccaggctaccgtccggaagagtaccgttgggggcaggggggtgcaaaaatcattgattatcatatccagagcgccggggttgattttccgccttcactgacgggcaatcagcagaccgatttcctgatgaaagtcgtatttgaatatgactttgattgcgtggtaccgggtttgttaatcaaaactctggatggcttatttctatatggtaccaactctttcctggcctcggaaggccgggaaaacatttcggtatcacgtggggacgttagagtatttaaattcagttttccggttgatttaaatagcggtgactatcttctgtcgtttggtatttcagagggaagcccgcaaaccgaaatgacgccgctcgatcgtcgctatgactccatcattttgcatgtaactaagagcatggatttctggggagtgattgacctgaagtcgactttcaatagttaccaatgaagatgagaaaaaatcattccatgactactaatacacataaattggttagcgaattacctgaaatttatcagactatttttgggcatcctgagtgggatggcgatgctgcacgagactgtaatgaacggctcgcgctaattagtgaacaatatgacagcttgtccagagagttaggaaggccactacgggttctcgacctgggctgtgctcaggggttcttcagtttaagtttggcaagcaagggtgccagcgtattaggtatcgactttttgcagcagaacattgatgtttgtcaggcgcttgctgaagaaaatccacattgtgatgtcaaatttcaagtcgggcggatagaagacattgtcagcactctggaagaaaaccaatttgatctcgccattggactaagtgtttttcaccacattgttcatctgcatggggttgctgaagtcagatcgctgttagagcgtttggcaaatctgacgcaggcgatgattctcgagctcgctgtcaaggaggaaccactctattgggggaaatctcagcctgaagatccgcgtgaacttattgaccaatgtgctttctatcgattgattggaagatttgacactcatctgtctaatatttcacgtccgatgtatattatcagtaaccacagggttattcttccggaatttaatcagccttttacttcatggcgcgacagtccttacaccggagcaggctttgcgcataaacagagccgtcgctattatttctcttcggagttcatatgtaagttctatcgttttagtacagtaagttgcttactaactgataaggagagcgagcgtaatcgtactgaactcgcccatgaagaagcttttcttaaatctccaccatctggcttaaaagtgccggcgttgtttactgcaggggggaatggagaagcgggatggttggtaatggaaaaaattcccggagagttgttaaacgacgttctggccagtgaacggcatattgatcgggaaaaagttatttccgatctcctcgaccaattagttattttggaagaacatggtctatatcatgatgatttcagaacatggaatgttttaattgacgataatgacagcgctcgtttaatagattttggttcgattggcgatgtacaacaagactgcagctggccagttaatattttccagtcgttcattatttttgtaaatgaaatattttgtgaaaataaatcctggaggggcttctggcgttccgcaccattaagtcctttccagttgcctgaaccgtattcaaattggttgacagcattctggaaacatcctgttggtgagtggagttttgctttactccaacaactcttttcaaccaaagatgctctaccggctgcgagttccattatggacgcttctgatctatgggtccgggctcaggagcccgtattgttggaaagtcaaacgcaaatacgcaatacggatgcgcgggtagtccgtctcgagtcgcaaatcaatgaactcacctccctgattaatattatgggtgagagcattcagacgtttgagaagcgtgagtatccgccacaagacgttactactaatgtacagccgcgtatcgagattgagcagagtaaagccgttgattcagaagagattatgcgacttcatacgcagctcaatgatgctcagcaagaaatagagaatctacgtcatgagattgctaaaattcattatagtcgctcatggaaaatgaccaagtggtatcggtacgctggcttacagtactatctgcttcgtcagtacggcttcaaacagcgttttaagcatttactcaaacgagtgcttagcaacgtattttattttttgcgtgcacatccacgactaaagcagaaggtgatcaatctactgcgtacaattggaatttatgactttgcttatcgtatgcatcgtcgtatgaatcctggttcacataacccttatccaaacgacccacaataccagtcgcagactgaaaagcagatcttacatccagagttattgcctccggaagttaactcaatttttagcgagcttaaaaacaaaagataaggtgagtcacttgcatattttgattgacgtacaaggatatcaatcggaaagtaaattccgtggagttggtcgcagcacctatgaaatgagtcgtgcgatcataaaaaatgcgggccagcatcgagtaagcattttaatgaatggcatgtattcgattgatagtataaatgaaattaaaaaaagctggggtgatatattaccgcaggaagaaatgtttattttttcagctgctggccctacagctcttcgcgactgtgaaaaccatccccggagtgttgccgccacactagctcgtgaacttgctattgctaatatcaatcccgacgttgtttttattattaatttctacgaaggttttgacgatagttataccgtctcaattcctcaaactacagtaccatggaaaacagtttgtgtttgtcacgatctaattccgttactgaataaagaacgctatctgggcgaaccaaacttccgtcagtattattatgataaactagctcaatacgaaagggcggacgctatttttgctatttccagatcatccatgcaggaagttatcgattacacatcgattccggcagaaaaaattattaatatttcatctggagtaagcgattcatttaaaattaaagattatactcacgatgaaatcaaagacttacgtaataaatatcatcttcctcaagagtttattctttctttggcaatgatagagccacgtaaaaatattgaagcgctgattcatgcatatagtttattaccgcatgccctgcaacagagttatcccttagttttggcctataaaattagcaccgatgaaaaggaaaggctgtaccgagttgcagagaactatggtttatctcgtaatcagcttatttttacaggcttcttaaacgatagtgaccttatcgcactttacaatttgtgcaaaattttcgttttcccctctatacatgaagggtttggcctgccgccactagaagctatgcgttgtggtgcagctacgctgggttcaaatgtgaccagcttacccgaggtcattggtatggaagaggctttatttaatcctctggatgtccccgacatttgccgtgttatgcaaagggccttgactgacagtgagttctactcagcattaaaagctcatgctccggcgcaggcggcaaagttcacatgggatcacaccgcgcagctcgcgttaaagggatttgagaggcttgtagataaggcttccgcatcagaacctctggatatcacaagcttcaccgcacacaccattaatagaattaaaaatattgcagaattaagtgaaaccgaacgcttacagacagcctgggcgattgctcgtaatagctttgctacacatcagcgcaagctgctggttgatatttctgttcttgttgagcatgatgcgaaaacgggaattcaacgggtttctcgcagtatacttagtgaattactgaaatctggcgttgctggttatactgtcagtgcggtttattatcgaccgggtgaatgctatcgctatgccaacgaatacctgaatacccattttaacggggcgttcgggcctgatgtacctgtactgtttaccaaagatgatattctggttgctaccgatctaactgcccatctgtttcctgagcttactgtccagctggattttattcgtctatccggtgccaaggtttgttttgttgtgcatgacattctgcctctgagaagaccggagtggagcgatgagggaatgcaacgcgtgttccccatttggttatcttgcattgcgcagcacgctgaccgcttgatttgtgtatcagcaagcgttgcagaggatgtaaaagcctggattgcggaaaacagccattgggtgaaaccgaacccgctgctgaccgtcagcaacttccatctgggagccgacctcgatgccagcgtaccgtccactggcatgccggataatgcccaggcgctgttagcagcgatggccgcggctccatcatttatcatggtgggcacgatggaaccacgcaaaggacatgcgcagacgctagcggcatttgaagaattgtggttacagggcaagaactacaatctgtttatcattggtaaacaggggtggcatgttgatgatttatgtgaacgtttacgtcaccatccacagctaaataaaaaactattttggctacaaaacattagcgatgagttccttacgaagttgtattctcagtctagtgcgttaatcttcgcatctctcggagaaggctttggcctgccgttgattgaagcggcgcagaaaaagctgccagtgattattcgcgacattccggtgtttaaagagattgctcaggaacatgcgtggtatttctccggtgaagcgccgtccgatatcgcgaaagcggtagaagactggttagccctgtacgagcaaaacgcgcatcctcgttccgaaaatatcaactggttaacctggaaacagagcgcggaatttctcctgaaaaacctgccgattatcgcgccagccgcgaagcaataatcgctatcaacagggctaccccggtggcccttgtgatgagttcgttatgaaaattatttttgctactgagccaattaaatacccgttaacgggcatcggtcggtattccctggagctggttaagcggctggcggtcgcccgcgaaatcgaagagctaaagctgtttcacggcgcgtcgtttatcgatcagatcccccaggtggagaataagagcgataccaaagccagcaatcatggtcgtttgtcggcgtttctgcgccgccagccgctgctgattgaggcgtatcgcctgctgcacccgcggcgccaggcgtgggcattgcgcgactataaagattatatctaccatggtcccaatttttacctgccgcatcgcctggaacgcgcggtgaccacgtttcatgacatctccatttttacctgcccggaatatcatccaaaagatcgggttcgctatatggagaagtccctgcatgagagcctggattcggcaaagctgatcctgaccgtctctgacttctcgcgcagtgaaatcatccgcctgttcaactatccggtggagcggatcgtcaccaccaagctggcctgcagcagcgactatattcctcgcagcccggcggagtgcctgccggtcctgcagaaatatcagctggcgtggcaggggtatgcgttatatatcggcaccatggagccgcgtaaaaatatccgcggtctgctgcaggcctatcagctgctgccgatggagacccgcatgcgctacccgctgatcctcagcggctatcgcggctgggaagacgatgtgctgtggcagttagtcgagcgcggtacgcgtgaagggtggattcgttacctgggctatgtcccggatgaggacctgccttatctgtacgcggcggccagaacctttgtttatccctccttctatgagggattcggtttacctattcttgaagcgatgtcttgcggtgtgccggtagtatgttccaatgtcacttctttgcctgaagtggttggcgatgccggcctcgttgccgatcctaatgatgtagacgcgattagcgcgcatattttgcagagcctgcaggatgatagctggcgggaaatcgccaccgcgcgcggtcttgcccaggcgaaacagttttcgtgggagaactgtacgacccagaccattaacgcctataaattactctaagggtgtcagttgagagttctacacgtctataagacctactatcccgatacctacggcggtattgagcaggtcatttatcagctcagtcagggctgcgcccgccgggggatcgcagccgatgtttttacttttagcccggacaaagagacaggtcctgtcgcctacgaagaccatcgggtcatttataataagcagctttttgaaattgcctccacgccgttttcgttgaaagcgttaaagcgttttaagcagattaaagatgattacgacatcatcaactaccattttccgtttccctttatggatatgctgcatctctcggcgcggcctgacgccagaacggtggtgacctatcactcggacattgtgaaacaaaaacggttgatgaaattgtaccagccgctgcaggagcgattcctcgccagcgtagactgcattgttgcctcgtcgcccaactacgtggcctccagccagaccctgaaaaaatatcaggataaaacggtggtgatcccgtttggtctggagcagcatgacgtgcagcacgatccgcagcgggtggcgcactggcgggaaaccgtcggcgataacttcttcctcttcgtcggcgctttccgctactacaaagggctgcacattctgctggatgccgccgagcgtagccggctgccggtggtgatcgtcgggggcgggccgctggaggcggaggtgcggcgtgaggcgcagcagcgcgggctgagcaatgtggtgtttaccggcatgctcaacgacgaagataaatacattctcttccagctctgccggggcgtggtcttcccctcgcatctacgctcagaggcgtttggcattacgttactggaaggcgcgcgctttgccaggccgctgatctcctgcgagatcggcaccggtacctcgttcattaaccaggacaaagtaaatggctgcgtgatcccgccgaatgacagtcaggcgctggtggaggcgatgaatgagctctggcataacgatgaaaccgccagccgctatggcgaaaactcgcgtcgtcgttttgaagagatgtttacagccgaccatatgattgacgcttacgtcaatctctacactacgctgctggaaagcaaatcctgaggccagctacccccgccgttgcggcgggggtcaacgcgttagtgtcgactcttcagattatcaatcacttccccaagatccagcccctggtcctgcagcagcaccagcaggtgatacatcaggtccgacgcctcattcttcagttcgaagcggtcgttcaccgtggcggccagcgcggtctccacgccttcttctcccactttctgcgcaatacgcttggtgccgctggcatacagcttcgccgtataggagctctccgggtcggcgtgcttacgctcggccagcagctgctccagctgatagaggaagagccactggtggccggtttcgccgaagcagctggtggtgcctttgtggcaggtcggcccgatcgggtttaccagcaccagcagcgtatcgttgtcacagtccggcgtgatgctcaccacgttgaggacatggcccgaggtttcacccttggtccacagccgctgcttggtgcgtgaataaaaggtgactttgccggtcttttcggttttctccagcgcctccttgttcatgtagccgtgcatcagcacttcgccggatacggcgtgctgcacgatggccggcatcatgccgtccgttttttcccagtccagctgttcagtcaacatacccttatctccacgccctgtgccgccaggtacgctttcagttcgccaatattaataatctgtttgtggaataccgaggccgccagcgcgccgtcaacgtcggcgtcgcggaaggcttcgaggaagtgttccatagtgcccgcgccgccggaggcgatcagcgggacgtggcacaccgcgcgaaccttcgccagctgctgcaggtcgtaaccgttgcgcaccccgtcctggttcatcatattgagaacgatctcgccggctccgcgcttttgcacttcctgcacccaatcgagcgtctcccactgcgttacccgggtacgactctcatcgccggtatattgattgacgtgatacttaccgctctcggcgtcaaaccaggtatcgatacccaccacgatacactgcacgccaaagcggtcggcaaggcgggtgatcagcgtcgggtcggcgagagcaggggagttaatcgagatcttatcggcgccgaaggagaggatctgcgccgcgtcttcctgcgacttgatcccgcccgccacgcagaaaggaatatcaatcacttccgctacccgcgacacccagctcttgtcgaccacccgaccgtcgctggaggcggtgatatcatagaacaccagttcgtcggcaccttcgtcggcatagcgcttggccagcgggacgatgtcgccaatgatctcgtgattacggaactgtacgcctttcactacctggccgtcgcggacgtcgaggcaggggattatccgttttgccagcattgaatggcctccgttacgttgaatttaccttccagcagcgcgcgaccgacaatcacgccgcgcaccccggtgccgcgcagggcggcaatatcattgagatcgccgatgccgccggatgactgaaacgccacctgcgggtagcgggcgcagacttcctcgtacagcgagacgttagagcctgccagggtgccgtcgcgggagatatcggtgcacagcacgtgctgcaggccgaccggcagataactttccaccagctcctccagcgtcacgccggagttttcctgccagccgctgaccgccacctgcttattgccgtcggcgtcgatacgcacgtcgagggcgagcaccagccgttctgggccaaagcgtttgaaccagcctttcacttcctccggggatttcaccgcggtggagccgaccaccacgcgggcgacgccggcctcaagcagggccgcgacatccgcttcggtccgcacaccgccgccaacctgtaccgggacgtcaaccccggcgaccagcgatttcagcagcgggatttggcgtttcgccggatccttcgccccggtcagatcgaccaggtgcaggacttccgctccctgagcggcataggcctgcaggcgcggcagcggatcgctgccatagtcgcgctgctggccgtaatcgccttgatggagacgaacgacggtgccgtcgattaaatctaaagcaggaataatcatcacatctccaggaagtttttcagcagctgcgccccggcgctcccggagcgctccgggtgaaactgcacgccaaagaagttatctttctgcaccgcggcggtgaacgcctcgccgtaattgcactgggcgatggtgtacgggttgaccggcatggcgtagctgtgcacgaagtagaaatacgcgccttcttcaatgccgcggaacagccgatcgccagctttggcatacacccggttccagcccatgtgcggcagcggcagaccgtggtcggtcatcttcggcacctcttcttcgataatgcccagcagatcgacgccgttgttctcctcgctgcgcttgccgagcagctgcatgcccaggcaaatccccagcaccggctgggtacaggctttgatcaggtcgatcagctcccggtcgcgcagctgatccatcgccgcctgggcggtgccgacgccgggaagaaacagtttatcggcacgcaataccacttccggatcgcggctgaccaccggctcatagccgtggcggccaatcgccgatttcaccgaattgaggttggcgcagccggtatcaaggatcaccacattcattacagcacccctttggaagacggcagggcatcgccctggacgcggatcgcctggcgcagcgtacggccaaaggctttgaacaggctctccacgcggtggtgatcgttcttgcccttggttttcaggtgcagggtcaccgccatggtgtaggagagcgagcggaagaagtgttccaccatctcggtgctcagatcgccgacgcgctgataggtgaagtccgccttatactccaggtgcggacggccggagatatccagcgcgcagcgggcaagacactcgtccatcggcagcacgaagccgaagcgattgatgccgcgcttgtcgccaagggccagcttcagggcttcgccgagggccaggccggtatcttccaccgtgtggtgatcgtcgatgtacagatcgccgccgacgttaacctccatgcggaagccgccgtgggtggcgatttggtcgagcatatggtcaaaaaagccgacgccggtgtggatcttgctgccgccttcgcggtccagccacactttcacatccacctgggtctctttggtgatgcgctcgacgtgggcatagcggtcgcggcgggtcagctgctcgcagatggtcggccagtcgagcgtctcgcggtcatagcgcagaccggtaattcccatgttatccgccagctcaaggtcggtggcccggtcgccaatcacatagctgtgggatttatccagcacgccctcttccagccacggcagcaccagctgcgtttttggcttgcggcaggcgcagttgtcgcccgggaagtgcggacaaatcagcacctcttcaaagttaacgccctgcgaggcgaagatctgcatcatcaggttgtgcgggccatcaaacgcttcctgcggcagactgtcggttcccaggccatcctgattggtgatcatcaccagcttatagccttcctgctgcagcttcagcagcgccgggatcacctgcggctcaaacgccagcttgtcgaaccggtccacctggaaatcctccggcggttcggaaatcagggtgccgtcacggtcaataaagagatacttctgggtcatacattctccgcagtcaaagcgtcaatcacgcgctggctctcggcacgggtaccgatagtgatacgcaaacagccgcttaatgaaggttgtttattctggtcacgtaagataatgccctgatcccacaaagatttaaacactgcgctggaggcggttatccgcgccagcacatagttggtctcggaatcgaagacctgctccacgcaggcgatgccgcgcagctgttccaccaggtagcggcgctcgtcaaggatctgcgccacgcgctggcgcatcgcggcgatcccctccgggctcagggcctgggcggcgatatcggccaccggcgtggagagcgggtacggggcgatcactttcagcagcacgttgatcacctcggcgttggcgagggtgaagccgcagcgcaggccggcgagggcgaaggctttggacagcgtgcgcagcaccaccaggtgtggatagtcgctgagccagccggagagcgtcgcctgcgggcagaattcaatataggcttcgtcggccaccacgatggctttgttgcgggtcatctccagcaggtcgcgcatcgactgcgggtcgataatctgcccggtcgggttgttcgggctgcagacgaagaccaccttcacgccgtccagccgcgcctcgatgcccggcaggtcgagctgccagtcggccagcgtcggcacggtgcggcactcgacgccgatggtttcggcgctgacgctgtacatgccgtaggtcggcgggcagtagagcaccgcgtcttcgccgggctcacagaaggcgcggatcagcagctcgatgccttcgtcggcgccgcggctgaccagcacctgctccggtttgacctcggcgtagcgggcgtagctctcaatcacggccttcggctgcggctccggatagcggttcagcgtctgttcggtaagctggaaggctacggcggtagggaattcgttggcgttgagccagacgtcgcctttgccgcccagccggcgagcggattgatacggggtcagcgcgcggacgttggcgcgggctaaatcttcaatgctcatgcttgctccttcagggcggcaacgcgcagcgttacggcgtttttgtgggcgtcaaggcgctcggcggcggccaggatctcaatcgttgaggcgagggcggcaaagccgtcgcgcgacagctcctgcacggtcatccgcttctggaagtcggccaggccgaggcttgagcaggtggcggtgtaaccataggtcggcaggacgtggttggtgcccgaggcgtagtcgcccgcggattccggtgaccagtcgccaaggaaaacggaaccggcgctggtgatgctatccaccagctcgcgggcctgacgggtctgaatgatcaggtgctccgggccgtacaggttggaaatagccacgcactgcgccagatcgcgggccacgatgatccggctggcggagagcgccacgcgggcagtttcggcgcgcggaagggcggccagctggcgctccacggcttcggcgacgcggctgcccatgtcggcgtccggggtcaggaggatcacctgcgagtccgggccgtgttccgcctgcgacagcaggtcagacgcgacaaagtccgggttggcgccgctgtcggcgatcaccagcacttccgacgggccggccggcatgtcgatggctgcgccgtccagacgctggctgacctggcgtttggcttccgtgacgtaagcgttgcccgggccaaagattttatctaccttcggcaccgactcggtaccgagggcgagggcggcgatggcctgggcgccgccgacgttaaagatggtttttacgccgcacagctgcgcggcatagaggatctcatcggcaatcggcggcggcgagcagagcaccacctgctgacagccggcgatgcgcgccggcgtcgccagcatcagcaccgtggagaacagcggcgctgagccgccgggaatgtacagtccgacggaggcgatagggcgggtgacctgctggcagcgcacccccggcagcgtttcgacatccaccgcctgcagctgttgcgcgttgtggaaggtctcgatgtttttcaccgccaccgccatcgcctgcttcagctcatcgctgaggcgctcgccggcggcggcgatctccgcctcgctcacctgcagcgcggcgacggtggttttatcaaacttcgcgctgtattcgcgcagcgccgcgtcgccgttggctttgacgttattcaggatctccgtcaccgttttactgatgctgtcggaggcggaaatcgccgggcgcgttaagagttgctgttgttggtctgcgctacagccgttccagtcgatgattgtgttgaagctcatgattgtattcccctgtgtgtcccgtgaccggctggccgattactccatcattttctcaatcggcagcaccagaatggagctggcgcccagcgccttcagtttttccatggtctcccagaacagggtttcgctgctgaccatgtgcatcgccacgcgctgcttgtcgcctgccagcggcagaatagtcggccgctcggcgcccggcagcagggccaccacttcttccaggcgttcggtcggggcgtgcatcatgatgtatttcgactcgcgggcctgaatcacgccctgaatacgggtcagcaggcggtcaatcagctgctgtttggcgtcggccatttcgccgtcgcgctggatcagacaggctttggagcggtagatcacttccacttcgcgcaggccgttagcttccagagtggcgccggtggagacgaggtcgcagatagcgtcggcgaggccggcgcgcggcgccacttccacggagccgttcagcagacaggatttaaaggagatacctttttgatcgaggtagcgcttcagcaggtgcgggtaagaggtggcgatacgtttgccgtccagcgccgccgggccgttccaggcttcatccaccggagtcgccagcgacaggcggcagccgccgaagtcgagacggcgcagggtgaagtagcgcgggtcttcgccctgggcgcggcggctgagcagctcttcttccagcacgttttcgccgataatgccgaggtcgacaacaccgtccatcaccaggcccgggatatcgtcatcacgcacgcgcagaatatcgattggcatattttccgccagcgcaatcagacgctgggtgtgcaaattgactttaatgccgcagcggctgagtaattcgcgtgaatcttcgcttaaacggcctgatttctgaatagctatgcgtaaacgggtgttgtctaacattgttcttttcctctgaatacctgtctgaatctgtccgaatttggtccaaaaaaaagcccccggaagtgaatcttccgggggctctctgcgcgttcatgcaccactggaagatccaaacgtcttccagcacacatcgcctgaaagactagtcaggatgatggtgatgatggtggtgtttaaattgaacgcggttcataaaaattctctgtgaatgactatgcatttgatgtcctttaacctaaaccacttccgccgcagaaagcaagggcttttttctatcattaattcatttcatattgagcgaagaaattgtcagttgccgctggctggcgtagcctgtaatcagcacagcgaaagagtcaggagcctgggatgaaaaaggtcgcgatagtcggtttgggatggctggggatgccgctggcgctgtcgttgacggcgcgaggctggcaggttaccggcagtaaaactacgcaggatggcgtggaggcggcgcggatgtgcgggatcgacagctatccgctgcgcctggagccgcagctggtctgtgataccgaggacctcgacgcgctgatgaacgtcgatgcgctggtgatcaccctgccggcccggcgtaccggggcaggggaagggttttatctacaggcggtgcaggagatcgtcgataccgcgctggcgtaccatattccgcggatcgtcttcaccagctccacctcggtgtatggcaacgtcaacggtacagtgaaggagaattccccgcgtctgccgcaaaccgccagcggacaggtgctcaaggagctggaggactggctgcacaacctgccggggacgtcggtggatattctgcgcctggccgggctggtggggccttcccgtcatccgggacgttttttcgccggcaagtcggcgccggatggccagcacgtggtcaatctggtgcatttgcaggatgtggtggccgctatcgaactgctgctgcaggccccgaagggcgggcacatctataatctatgtgcgccccgccatccggcgcgcggcctcttttatccgcagatggcccgcgagctcggtctgccgccgccggtgttcagcgacagcccgggcggcggccagggcaagattgtagatggcaatcgtatctgcaatgagctggggtttgagtaccagtaccccgatccgctggtgatgccgatggagtgatccgccagcggtgattcgcataccgtaaggggggtagcgatgaaaccactgctggatgtcctcgtgatcctggatgccctggaaaaagaggggagctttgccgccgcgtcggcaaagctctttaaaacgccctcggcgctgagctacaccattcaccgcctggaaagcgatctcaatattcagctgctcgaccgcagcggccatcgcgcgcgctttacccccagcggacagatgctgctggagaaagggcgggaggtgctgcatatcgcccgcgaactggagatccgggcggttaagctgcagcaggggtgggagaatagccttcgtctggcggtggacagcacctttcccgtggcgctgctctcgccgccaatcgcggcattttatcaacaacagccgctgacccggctgcacttcacgctgaacccctccctgctggactggcggccgctgactgacgggcaggccgatctgctgctgggggcgctcggcgagccgccgccgctgagcggttatgactatctccccctcggcgagctggagctgctgctggtcgttgccccacagcatccgctggcgcgacaccgcgcaccgctaagctggcgaaccctgcgccgttaccgggcggtggccaccggcgagggcggggcgctactcagcgatcaggagaccctgacggtgtgtgacgccgcggggcagctggcgctgctgcgcctggggctgggctgggggtgcctgccgcgctatcaggtgcagggtctgctggacagcggcgagctggtctgcatgaccgtgcgcgggctgtcgcctcgtcaacgcgcgtggatcgcctggaatgacgccacctgcggtttggctggcaaatggtggcgggaaacgctattagcaaatagtgctatttttacaatttatcatacggaaaccgtatagatattagcacgttaaaaattatgcttacgcaatgaacttcataacatcttgtcaacgccgttgaatttgttgcaaaatatgcggcctgaaaaccagagactagccgacgcttttttttaaagtgtcggttatttttttggtcgaaagacacatcattcaataccaagaggccgggcttcgtaccggatagatatttactaaaaaccgacagtcgttgtcgctgaggaatagaaagaaatggggcaattttttgcttacgcgctggcgttcaccgtaaaaggggataactatgtcgcataacgctactccaaatacctctcgcgtggaattacgtaaaacgcttacgttagttccggttgtaatgatgggcctggcctatatgcagccgatgacgctgttcgatacgtttggtatcgtctctggtatgaccgacggtcacgtgccgacggcctacgcctttgcgttaatcgctatcctgtttactgccctgagctatggcaagctggtacgtcgttacccttctgccggctcggcgtatacctatgcgcagaaatccatcagcccgaccgttggctttatggtgggttggtcctcgctgctcgactacctgttcgcgccgatgatcaacattctgctggcgaaaatctattttgaagcgctggtgccttcgattccgtcgtgggtgtttgttatcgcgctggtcgcctttatgaccgcctttaacctgcgcagcattaaatccgtggccaatttcaacaccgtgatcgtggtgctgcaggtggtgctgattgccgttatcctcggcatggtgatttatggcgtgtttgaaggcgagggcgccggtacgctggccagcagccgtccgttctggtccggtgacgcgcacgtgatcccgatgattaccggggcgacgatcctgtgcttctcgtttaccggtttcgacggcatcagcaacctgtctgaagagaccaaagatgcagagcgcgtcattccgcgcgcgatcttcctgaccgcgctgatcggcggcctgatcttcatctttgccacctacttcctgcagctgtacttcccggatatctcgcgctttaaagatccggatgcgtcacagccggaaattatgctctacgtggcaggtaaagccttccaggttggcgcgctgatcttctccaccatcaccgtactggcgtccggtatggcggcgcacgctggcgtggcgcgtctgatgtacgtgatgggccgcgacggcgtgttcccgaaaagcttcttcggctacgtgcacccgacctggcgcactccggcgatgaacatcatcctggtcggcgcgattgcgctgctggcgattaacttcgacctggtgatggcgacggcgctgattaactttggtgcgctggtggcgtttaccttcgttaacctgtcggtgatttcccagttctggatccgtgagaagcgcaacaagacgctgaaagaccacttccagtatctgttcctgccgatgtgcggcgccctgacagttggcgcgctgtgggtcaacctggaagagagctcgatgattctgggcctgatctgggccggtatcggtctggtctacctggcctgcgtgaccaaaagcttccgcaacccggtgccgcagtacgaagatgtggcctaaggcatagcgtgatgtaaataagaaaagccggagggaaacctccggcttttttttgtctgcgccggttcgacatcgaggcctgatttttttgcagggcggcgcttgccgggcctgggggacataagctgacgggaggccgccgtaggccgggtcaggcgcagccgccacccggcagaagagcttatcctgcctgcaccataactttcagcagcgtatccagcaggccgggaaaacgggcgtccagatcttcccggcgcagcgaaatcatgttctcccgtccctgaggccgttgccagatcacaccgctgtcgcgcaggacgcgccagtggtgggtcatggtggacttggccacctcctcctggcgcagggcgttgcagctcagttcgctgccgtcggccagcgtacgaatgatctccagtcgcagtgggttaccgagcgcggaaaggacattttccaggcgaatttgttctcgttcggggtgattggcgatcataataatcctgtgtcggcggtggcgcggcgcatggcagccgcagcccatatcggcggctggcggctactatacccaaactccggttcagataccacgcgcgccgccgcaacctgcccaatcgtaatgatagcaaaaatagttcgaatatactcgtacagttgtactaagatagacgcagttaaatgaactgcggatcatttcgaccgcagactgaccgtcaaaacgactaaggacgcatcatgccccgacccatccctctcgaacgttatcgcaacatcggtatctccgcgcatatcgatgccggtaaaaccaccaccaccgagcgcatcctgttttataccgggatgagccataagctgggtgaagtacacgatggcgcggcaaccaccgactggatggcccaggagcaagagcgcgggatcaccattacctcggcggcggtaagctgcttctggccggggatggaccgcagcttcgagccgcaccggatcaatatcatcgacaccccggggcacgtggatttcaccattgaggtggaacgttccatgcgcgtgctcgacggcgcggtgatggtgtatgactccgtcggtggggtgcagccccagtcggagaccgtctggcgccaggcgaataaataccacgttccgcggctggccttcgtcaacaagatggaccgccccggcgcggacttcttccgcgtggtgcagatgatgatcgaccgtctgaaggctaacccggtgccaattgtgatccccattggcgcagaagagcatttcaccggcgtcgtcgatctggtgaaaatgcgcgccatcctgtgggatgacgccacccagggcatgaccttcagctatgggcctgtccctgacgatctgctggcgacggcacagcagtggcgggagaaaatggtctcggcggcggcggaagccagcgatgagctgatggataaatacctggaaaccggcgagctggacgaggcggagatcgttgccggtctgcgccagcgcacggtgaagggggaaatccaggcggtgctttgcgggagcgcctttaaaaacaaaggcgtgcagcgcatgctcgatgcggtggtggagctgatgccatcgccgctggatattccggcgatacagggcgtcgatgagcaaggccagccggcggaacgccatccgagcgacgatgagccgctgtcggcgctggcgttcaaactgatgaccgacccctacgtcggccagctgacctttatccgcgtctactccgggacgctgaagaaaggcgatgcggtgtggaacccggtgaagggtaagaaagagcgcatcgggcgtatcgtgctgatgcaggccaacgaccgtcacgaagttgacgaactgcacgccggggatatcgcggcctgcgtcggtctgaaggatgtgaccaccggtgatacgctgtgtgatccggatgcgatcattaccctcgaacggatggagtttccggagccggtgatttcgctggcgattgagccgaagaccaaagcggaccaggagaaaatgggcatcgcgctgcagcggctggcggcggaagatccgtcgttccgtctgcataccgatgaagagtccggccagacgattatctccggcatgggtgagctgcatctggagatcattgtcgaccggatgaagcgcgagtttggcgtcgaggccaacattggccgtccgcaggtcacctaccgcgaaaccctgcgcaagaaagtgacggacgtggaaggcaaatttgtgcgccagtccggcggcaaagggcagtatggccacgtcgtgctgaccctggagccgctggagccgggcagcggtttcgtcttcgaggacgccaccaaaggcggcgtggtgccgcgcgagtacatcccttccgtggagaaagggctgcgcgaagcgatgggcaccggcgtgctggcgggttatccggtggttgacgtgaaagcgaccctgaccttcgggtcgtaccacgacgtggactcctcggagatggcgttccgcatggcggcgatcttcggcttccgggagggcgcacgcaaagcggacccggtgatccttgagccggtgatgcacgtcgaggtggagacgccggaagagtacgccgggaatattatgggcgatctctcttcccgtcgcgggatggtgcaggggatggaagagcgcttcggcagccagatcatccgcgccgacgtgccgctggcggagatgtttggttattccaccacgctgcgctcgatgtcgcagggacgggcaacctacagcatggagttccaccattacgcggaagcgccgcgtaatgtggcggatgaaatcatcgccagccgcgcgaaaagctaagcaacgttcccgggtgcgacgcgaggcgtcttacccgggctactctggtaccagcgcccaggcccggtaaggcgaagccgccaccgggcaaaaaggtaagcgtgaactggggacgcaatacccggcggcgctgctggactgcccccaaaagttggacacccaactgagtttgtagcccgggtaaggcgttagccgcaacccgggtatttcagccaatcagacaatatcctgtgcgtactgccacagcgccttcagctgcgccagcttctctttatcatccgcatactgttgatacagcatctgcagctcatcggcataggcttgcaaaaactctggcgtaaacacctgacgacggtgctctaaccagcgctgctgctcatgttcatcgagcgtgccggggaagttgcgcgcccggtagttaaacagcaggcgttcgatacgcttatcggcgaaggtaatatccagcgccggcagattgcgcggttcggtttccagcacgattttcatcgccgcgcggtcggcatcgctaaagaacccattgtaaagctgggcgtcgacgttttcggacggcacgaacggctcggcttcggcatagaccgccaccactttctcccgcacctgcggattcgcccgcagcagctgggcattctccagacagcgctgaatggagatccccagccggtcggcatcctgcgggcgcagggtattggcctgagccagcaccggacatttattgagatgcaccagcttgatcggcgccgccggcagatcgccaagctcggcgcgcggggtgtaaagccgctcgcgcaaggcatcggcatcgagctccagcagcggcgccatatcgcccgccagatcgaccataatcaccgcattgcggttttccggatgccaggccaggggcgccaccaggctggtgttgccgcgcgcggcgccaaacatgccggagacatgcaccaggggcttcatctgcggcacgtcgataagcgtcgccagcttgcgcttattgcggtggctgtagagataatcaaacagccgcggctgccgggttttcaccagcttcgccatggcgatggtggcgtacacatcggccatcgcgtcatgggcgttctggtgttcaataccgttggcgacggtcagatgttcaagccggaagctcggcaacccttcgtcattctccggccaggcgatcccttccgggcgcagggcatagcaggcgcgcatcacgtcgagcagatcccagcgcgagttatcgtgctgccagctccaggcataagggtcatagaagttgcgatagaagatattccgcgtcacttcgtcatcaaagcgcacgttgttatagccgacgatacaggtttgcggcaccgtgaacagatcgtggatgcggcgggcaaatatggcctcattatcccctttggccagcgcttcctgcggcgtgatcccggtgatcatcaccgcctgcggctgcggcaggtaatcgtcagcgggtttgcagtaaaacacttcgggctcgccgagcacattcagctccgcgtcggtgcggatggcggcgaactgcgccggccggtcgagggaagggctggtgccgaaggtttcataatcgtggaagaggaatgtgctctgtatgctttcgttttttactgtcacctgatgtatgcgctctatgttatatgtatttgattttagtttgttttaacgtcttgactgccatttcttgataacttttgtacaccgctaaacattgtcgattacgccagtacatgcgatattgagtacaggataagtacataaatcatcatttagctgagtacaaaaaacagaatggcaattagcgacacaaaactgcgttctctctatggtaaaccatattcgggcccggctgaaatcactgattcagacgggcttgggatccgcataacgcctaaaggagtaatcagctttcagttccgttttcgttgggacggcaaacagcatcgtctggggcttgggcgttacccatccttaacgttaagagacgctcgcaacaaggttgctgatttgcgcgaggcagttgataaagggattgacccccggattatggccggcgggctacgcgcccaaaacaagcccacggtaaaagagtgcctggactactggaaggaaaattacgtcgatatctcgttgagggaaaaaacacaggcgctctataaatcgacagtcattaaacatttgagcgatgtgtttgcgggggttcctgtcgaagatatccccgtacggctgtgggtggagctgttcactgaagaggagcgtatcaacccccggcgtgccaggcagctgctgattcagctacgatcggcgattggatggtgcgttcgcaggcagtttgtcagtgcacctgaactgatgctcctgcagcctaaggatatcggtgttaagccctcagtcggtgaggtgacgctgagttacaatcagcttgcaaaaatctggctggctattgagcgcagccgcggttcaacatcaaaccggctgttacatcagttattaatgctttatggcgcaagaaatagcgagatacgggattcggtaaagggtgagtttaacagggaagaggggatctggctgcttccagccgaaaggagtaagaccaaaaaagttgtcaggcgacctatttttgacgcggcggatactttgctgaaaaaggcagaaatgacctacggaaatattctctttcccgggcctgatctgactaagcctatgtctatcgccggtgctaatcgcttcctgaaaagaatcgagctttcactggggattggcgaatttaccgcacatgactttcgtcgcacgctggcaactcgcctttctgaagagggcgttgccccgcatgttatcgagaagatgctggggcatgagcttggcggcgtcctgactgtgtacaataagcatgactggatagcagaacagaaagacgcctacgagctgtacgcagaaaagatattctggcatatcaagaagatttcgggttgattccgccgtttaagatccacgcttccacctccgacagcaggtattgtttggggtgggtgcgtatcggttttggaaaattataacgctcggtatatttccatatagtcatacgcgatgagatgcgcatcatctgcatcacttctttctcggttatcatttcaatgctggccactaaccacctcctacggcctactggcctgttttttcatggcatcgagcaggatatcctgcactgtacgttttgaattgcgccgttccatcaccatttcatccatactgctggcggcgataatgtggtgtatgaataccgggcggttgtgtccggcctggatctgccgggttggcccgatacgttcgataatttgctggtactgctccaggtcccaccagtgcgagaaaaacaccagtatgttgccgccgtcctgcatattcaggccgtggcctgcgctggctgggtgagcgaacagtaccggtattttcccggcgttccagtcgcgtagcgtctgcggatcctggtcaagatggcggccgcgtgggaacgctttaagtaaccgctcgaggtcgtgtttccagtggtaggcaaccagcaccggcgcgccagctgcttcggtgagtatgctgtccagcgcctgcagctttgcgtcgtgcaactccgcccagctccccgcgtcgtcggtgtacaccgcgccgctggcaatttgcaggcacttaacggttttggccgccgcgtttggcgcttcgatgccttcgccgttcagctcgaggaacatttctttttccatctcgcgatactgctggcgtgccttcggcggcatgtccacgcggatcacattatggattggctctttgatatcgaaccagtcggcggcgtcgagcgagatagtcacatcggcgagtgcgcgctgtatttcgtcctgcgaatgcgcgaacggctccagctttgtccagctctggccgggaaattgtatcgagttaaaccagcgggaggtaaacgcgccgtacgtgcgcccgaggcgttgcccctgatcaacgaaccacgcttgcccccacaaatcaaccaggccattcggcgctggtgtaccggtaaggttcatccagcggcgcacgtgcttatgcgccactttaccgagtgctgcagctcgcttacccccgccgcgcagccggaacgattttagccgggtgctctcatccgggatgacggtaccgaacggccagcgaccgccgagctcttcaaccagccacgccagattgtcgtagttgatggtgaacacgctggcgttgctgtttgccagcgctgcagcgcgcgctttggcggtaccgacaacgggctgcacctcgatattgcgcaggtggccccactttacagcctcatccggccaggtgctggccgccacgcgcagcggcgcgaggaccagcgccggctgggtttccgcgccgcacatgaagagatcttccagcgcggtcagcgtcgccaccgttttgcccatacccatacccgcccagatgttgcagcgctctatattaatttcgtggttaatgatgagatcttgatatactctgggtttaaactctttaaagttattcgtcataattgtggccttacgtgctgggcgatacgcagggggaaaaatggatatatgggagaagagtaagttttttatttttgtattgtttgtcatgcccggcttcataagtatgaaggtttatgatgtatttcagtcaagacccgggcaggattattcaaaaacgttaatagatgtaattgcttatagttgcgttaattacgctttgctattagtgcctatttattacgtagaaacatctaatttaatgctaaaacatccagtttggtattacttcttttacttgtttaccttttttatacttccaatagcattgccagtgttgttaatctatatcagaacaagacgtgggttcacacgttttatgccccatccaactggcagaccttgggacttttattttaaaaaagctaaaaaaagctgggttatcgtaactctaaaaaatggtaaaaaatatgggggtagatatgattcggaatcatttgcctcaagctctcctgagccagagcaaatatatcttgagcatcattgggccttagatgccgatggtgatctggatcataagttgagagatacgcttggaattatcattttgactaatgagattgagagtatagagtttattgagattaccagtacacctgcgtctggtacgtgatgagataacggagtaatttatgacagttaaagataataaaggtattgcccaagatggctggcagccgccaagaacgactgaaataccccgggcgccggttaacaatggctatcagcctccgcgacaaacccagccgaaccaggttgaaaatccgccacctaaaaaacgttagtattttactgaagctagagtatctatcagtatttcctccagatctttgctatcaagcaccaccacgttaaagcccagtgcgcgtagccgttcgtgctcgcgcagctggtcggcgcgtggtgatttgcctggtgatttgcattccacaaaaacgatacggccaccgggcagcagcacgatgcgatcgggaaccgaacggcggccgggcgacacgaatttataggcaaccccgccggcggctttcaccgccgcggcaaggtgcttttcaataatgctctcgcgttcgtaggccatcagcttttatccagaggggcatgaatgggcccctcgatcggtcggatggattcgagcagcaaacgccggcgcgtacgctctgcaaaatggcggcggccggtttctttgtggtagcactcattcttgccgactacccacatagttttcgtctcgctcagtttcacggtcttcggtccgtcgacggtgataacggtcccggtatgcgttttcacgattgtcataacacctccgcgatagtccacgccagcaacgcccataaacatacgagcagaaacaccaacagtaataccagctgcaacaagaccttacctcgataactcatcgtccaccgccttgcgccgttcgcgcatgttctgcatcaggcagaaatcattccgccgttcgctccattcctgattgagctcgttgcgcgattcccggttggctttcgcccagaccttcgccgcgcggtcgaactcgcctgcttgctccagctgcacggcttcgcgcgcagaccggtaatacagcggactgtctctgtacttgaatgccataggggtcattccttacggtaatgaagcgcttcaaagccgccggcgttcagcggtatatcgggcgcccaggtggggttagtggagagcagggaagaaagcgcggcgtcggtgtagttgtcggagtccggcgcttcgcaaatcacctcatcgtgcacggtcagcacaatgctgtatccggcgttctcgatcagtggcatgttcccggccagaacgtcgcgggcggcagcctgtgtgacgttttcgaccagctttccgccgtaggttttgagccgttgccatttccgcgagtaggaattgatccccatgtaggtgatatttcctttctcaatcgacggcgacgggtagcagagtgcgcgcccggacggcaactggatacgcagccatgcgccatcgcggcgcactttcatatagccgcaatagagtgttttctttggtgtagcgatggcggcgcgtacggtgcgttcgagctggaaccagaaatcgcaggtttccgggtgcgcccggcgccacaggcgcttaagcgaatcgcaagcgatgaatacgcgctcagttagcccgtatgtcgctttacgcttcaccgattcgtcataccagctcttagcctcgcgctgcacatcgcgcgggatattcggcagcgcggcggtcgccagctcttcgagatcgaggccgtagaccagcgcaaaggtcaggaacgccgccacgccaccgccaaagccaaggcccagctccatcactttgccgatctggcgctggtatttggtcacgtcttcgtgcgatatgttgaaggcgcgggcgtaggccagtttgtagagatcgggcccggtgccttcgtcataccgccggaaggcgtccagcttccacgcctcaccggccagccacgccagctttcggccttcgatgttcgacaggtcggatacgacaagctttttacccgctggcgccataatgcagccgcgaagggcggagctggtcagctccatgacgttatcgaaaagcaaatcggcgcagccggatttaagcgcctcaatgccctcgtcgatacgttcctgctcgagcgtcgggcggggcaggttctggggctggaacagccgcccggcccagcgcccggttcgcgatgcgccgcaaaactgcagcgtaccgcgcagacgtccgtcgctgctgatacccttcatcagcgatttgtacttactggtgctcgtggtgctggcctgcaggcggatagccagcagctctttcactggcgacggcagatcagggtcggcaatacggcgttccagcgtgctgcgctgcatatccggcaagtcaacgccgtacgattcgacgatgtgcataatcatcgcatcgcgctgtgtggccgcctgcacttcgccgtcggtcattacctgcgtacgctttgccagttgcttctgttcaaggtccacggcttcgatcgctgcctgcgcgaactgcacatccatgcagacgcctcggtcgttgatctgctggtcgcgatgccacagcgccagctcagcgccctgatagttccactttggcagccgcttatagacttcgcgcattgcctcgatatccagcccggcgtaggcaacgaaccgctgccactctaccgggtgcgttttgctggttgcgcggcgcagcttgctgttcttcggacgaggtttacagaagagctggatcagcgatttgccttctttgtccttcgccttgtcctgcggaacacccagcacttcgcagagcgcccccagcgcgccgggcaggctgtgcgccagcgcctgcaccatcgtgtcgcgccagcgctcaaccggcggagccagccgggggtgggtgtggcgtagcaccgtgcggtcgaagtgtgaattgtggaaataaagcagggtatcgggatcggtaagggctttaaatagagggccggggattggctcgccagcagttaaatcccagacgttaaccggctcgttaccgatcgcccaggcgaacagcatcacctcgacgctctccgcgtacgcgtgggtaccgttggtaatcgggatttcgcaataggtttccaggtcgccccagagaatggtttcagacattttattttcttcatgaaataaaaaaccgcctcttggcggtttttttattgagaggagatgtggtgtgctcagtatgctaaatagtcatacaggcataataacttcctgaaatcggtatcacatcgacctgcgttgtcttcaagatattttttaagctcactaagggagatattatcttccatgactgcatacataattcctccaataactttccagtctgcgagattgttagttatgtcagtaattgatgtataattgttttcacaatccctaacatatctttttagatcatctataatcttgtctatttgtcgtgatttgtacttatctacattgataaggttttcgcaaattgaagaaaaggcaaagattggaaacctttctcttgttgatattacttgcttatttaggagcgaaataagttgggagtttgcttcatcaactattttaaaatagttttgaatcatttcagttttggtttgaaactcatatttgactgttttctcggacccgacagccaacaccatatcctcgttttttagttcgtcgatattttcagtgatgttaacttttatttcaccgccactttttatagtattccatactttttgaacttttctgatatccattgctgatacaggtagtacgagtttagacagcgcgtcgtatatggctgtgtaattatcggttttgattttatttattctaatcgttgccatgccttcaatatcaatatcgtgttcggttatctctattgattgattgtctggcgcatactccactaaaaggaagttatcacggattttttttgctagtgcagtattgacatttacataggaaaaaattgtcttcaagagtgattttatattggagtcactaatgctataaccaatgaatatgatcgggttatgtatgaaaatagataataactgtgcacgaattaattcatatttgttattgaaattatcgtagtcttcacgtgttataatgatattgttagagtcactgacgcaaccatgtattttatatacggagccataaggattgcttaataaaatatcgttgccaattagtgggttaaattcaaaaaatttttcacacaatctgtcgtagttcgttgtaattacagagcctatattttttcgtgctctaatcaatgcgtcaatttcattactcttttcgggttttatcatcagaggggtcagtaattgagttaaatagattttgaatctgcttaactttataccttctttcatgctgtcataaaatatgtcattaatttttacaaacttcccttttcggtcttcggctagtcgtttgttaaattctaactccaatttacttgctaatagatcatagctatactccccatttaccatagattcagcttttaaatcatagtaaaactcttcattctcagtcagttcaaaggatataaactctagaaggccattccaactgaatgagttttgaagatatcttaggctaaatccagtgccgatgaaaagcactgggtgatttttgtaatgccctacaaactcttggatttccataccaattctcaacgttgacattcatatacctcatagaatcaaattttgatagaaaattccaatagtcttgtaaaaaagcccgacgctcagtcgggcgttttttttgctttaaactagaccttcggcgtctgcaccttcgctgatatcgtcaaagtcgtccggtgttgccacaccgccgccagcgaaagcgtcaccatcgcgcaggaactggacgccgcttagtgatgcgttgatgcgcttaccaaagttgttatcctgcgcccagatatccaccacggcgttaacgtagcagccggcatacgggcgaccgtcggcctgaatcagtgcggtacggtcgcggtcgataacagtagggcgggctttgttcgccgcattcaggaataaattacccgggaagccctcatattcggctttctcgtctccgttgtgcaggcagagattgagctttttctccagctggccgtagatggtttcccacttctcgccccatttctctttcgccacctgtttaagcgttttgcgaacttcttcgagttgcgggtgtttcgggtccatcaggaagaccgccgagaagcgcggatcgccttcgccgtttacggttttcgcttcgaacagagcagggaaggccagacgtacgttattgagtttcaatttcatggtgttgttccttaaatcaaatgaggtcagcggcgatcgcatcttcggacacgtcgtcaaaatcgtttacagggttaacgttgagcgcggggcgcgggtcggattctggcgcgatggtgggcttaccatcagagcgggttatcagcgcttcgactttcgtccagcggcgtgggctttctttcttcaacagtttttcggcctgagtcgggcttatcaccttctggctgtacatctgatcctgtttcagcctgaaagatttcagcagctcttcggcttcaacttcatcgcgccatgcacgattgccctgcttaccggttaccagcttgaaccccgataccggatgcctggtggccgagataagcgaactaaggggccttaacactaaagacctcgagtctattaaagcatgggtaaccagaacgcatgataaatgggtaccaaaatttaaagaattcacgaccatattcgctcggcgaggtatccccctgggctcgtctaacgaagacgagttccttgcggacaagaccggtaaccgccgctggttgccggtagatgttgtcgaaatggttagtaccgatgccatagtccgtgacagagagctgctgtgggctgaagcccgcgagacgtttaagcgcctcggcggtatccagttccgcgatgctgaacgcctcggcgcaagcgtccatgagcagtacaccattaaggacgcgtggctcgagacggtcgagaaatggctcgagacgcccgacctgatgactaatgacattccgcgaaattgcgaatttttacgcgctagcgacgtgttgcgcgatgcaattgggttagatccgcgccacatcggaaaacgcgaagaaatgcgaatcagtaatgttttgcaaaattgcggttataagcgcgttcaacgtcgtgttgatggaaaaatgactcgtatcttcgagccagtgtaacaacctgtaccagcctcaaaaaacaggttggtacattttaactaattgaatttaaaggtcagtaccaactgtaccaactgtaccaaccaaatactttatatgtgcgtgtgattatataggctgttttgggagtttatataaaagggttggtacaggttgggtcaggttggtacacattaaattttaccagtagtaactaaacacacgaagcaaaaaggagataacacgatgcaattagctattgatttcgaacaaggtgaactgctttgcccgcattgcggtgggaattacgtacaccacggcgctgtggaggtttttaactgtaaggaagatgccaacgaggggcttcatgttcgcatcgaaggagattcgcttaccgcagacaggaatttaaaaggtaacccaagctctaggcgtcatggattacgaattgcgctttggtgtgaatcctgcaaaggaaactcgtaccttacgattgctcagcataaggggaatacgctaatcgacgtcgcaccagacaacaacggcaaggagtaaagaccatgcgcgcacgtcaaaagctaataaaaaccgctctctatgctcgcgcgtgcgcgcgttttgcgaggtgacctatgccagtcgtcgtcacagttaaaacggactggttgcgagtggtgaccgatatcactaacaccgggataccgctgcaggaactggccaccgggcttgatgtttcaaagtcagcgctcattggctggaagcagggaagcagccccaaccatcatacgggggaagcgctaatcgctttctggtgtgaagtgacacatcggcatcgttcagaacttccggtgcaggtcatcaggcgtcgttttgttcgcagcggaacccgtaatttttggccgaaagaaccaacggcccgccggtaatgaaaacttgcaaaaacagggcgttcaccgactaaaaatgctatgcaaaaaccgccctgttttatgcacgatttatgcagtcgattttcacactttcccgccagcaaaccgcaacaaataacctcttcaagctaaatcggtaacgagtgccgatcgcgtggtgccgataacgtacattatgttaaatcatgccgttttttaacaaattatccatttggtcaggattccgaccaacacccccgcgcacactctaggctccacgttccacaggagccaccacaatggcacgacagaagaaaaccatcgagactaccggggcaggagacaacgcagccgcaggacgccaccggcgcagcgctggcgggcgtcggcattagcggcgagcagctggcgacctctgaagccccaacggttgaccccgaagcaatcgcactcgcgaaccgcaacgccattcttgcaaccatcaacgagcagggcgccgccatcatcgcgcgctttgaatcgctgggtttctccgaccttaccgaccaaagccttaccgacaacctcgacttcctcaacctcgtacgcaaagccactgaggccaccaccggcagcgcgggcgcaacggtgacgaacgaagagggtaaaccgcagccggtacgcggcgcacctgtattaaccgaacacggctggcacgttccgggctaaggagaattttatgtgtggtagtacaccaaaagttgttcagtcagacccgcaggctgaggccgacgaagcagctgacgctgctgcgaaggccgcgaatgccgacgcagcagcgcgcaagaagcgcaagaaaggctcctcgctgctggctagcggtgctgaaggtgcaacggatacaggttcgtccctgctgtccaccggcgcacaggcagcgaaaaacaccttaggggcataaccgatggaagaactggccgtacggctgattaagcgtgtcgattctctgaaagcggcccgccaggtgcacgaaagcgtctggcgggagtgctacgactacacctacccgctgcgcggtgcagggctatccgaaacggttctcgatgcgcagagcgcaaaatccaaagtggcgaagctgctcgacggcacggctaccgatagcgcccgtatgctggcatctgcgctcatgtccggcatgaccccggcaaacgcgcagtggctgaatctggataacgtcaccagaactatcgacggctggttatgtggcgtgaaatgccgaatcacccgaacagccagcggcgataacaacaacaccaaaacggaggtgtatacgctgacggcgctggagggtaccggcgtgcgttgtctgcctggttcgcttttcgtgccggattatgcactgcaggattattcaggcgttgaaatgtggattgatgcaggaataaatgattttcgctcaggtaccgatgtagatttaacggatgatgttgaggcaattcgtgcaaatgttgacgcgatggtagatttcgccgaacgaagcgggagaaacattattttgctaagtttgacagcggataactattccactgaatttctgggcggcatccggtatacgcgtattttggaattgaataaccactggtcacaaaaatatccaaattattacgcgcgtggcaatgacggcctggacctgcgcgaaacgttggttgctaattataatcctgcaatagcccaggatgttatcgattacggccacgatataacgcctttatcactgcgcattgatgacaggcatcctaacactgtgggctacgggatatacgcatctgtggcttatgagttccgacagagacgaggttattaatatgggtatttttgttgtatcggatgcgtcgccaaaacaaagcggcaataaccccatgtatcttgaaaaagattcaattattatccgcagccagacgcttggtcttttggatttcagtaatgatcagtgttactcagccggttctccggtagctgcatatgcaaatatgaaaaatctggtgcataacgggtcgaatgcaacaaatggccctgcgccacgagtactggaagggggcatgctgaaatttgacggcaccgaacccagcaccaccgattatgcgctgctgccaacagatgagttttctttacccgctggatgtaaacgtgcgctggttagtgttgcattaaaactgcccgcgtctggttatggaacgccagcagccacacgttacccgatgttccttggccggatgaataacacagccgcaggaaacattaatttcggcgtgtgggggattgtcagcactgccggtgtgctcacttctgtgcagggggctgcgatgggcagtgttgctgtttcggctacggcgcaactcgcattactcaccaatggaggcgtacatgttgtttccgtatatgctgatggcgaaacgacacctggtacgctgatcacgcgtatttatgtcgataacatcctggtggctacggccacaaataacgcatgggatggggttgtgccagagcctactaatcttccgcgtattggtagttatcctgcgaccatccacagtccgtggaacggcatgaaggtaggccgaccgatggtgatgaaccttaccgggaaagataccgttgcgacggatatcatctctcaatccgtagaactggctaaacagtatctggtttaaggtggtgaaataatggctattaaatatttatccaatctcaaaatagagaacgaaattgacggatccgtgacacatctgtttgatgtggacggcgttattttcggcgttgtggtatccggtgacgctaaacaagtggtcgataaagattacgcagcttcgaatgcttatcaggttgcggatttccctcttcccgtttcataaggtcaggattccgacctgattaacgccttaccctcgcttcactacacagtgaaccccgcgggggtaaggcatgcgaatgaacaacctttcagacgtagcggcaggagcctcctacgtcacatctattggcagcggtggttactggctgctccagctcctcgataaagtcagccccagccagtgggcggcgatcggcgttcttgccagtatcgttttcggtctgctgacctacttcaccaacctttatttcaaaataaaagatgaccggcgaaaggcgcgcgactatgagcaacaaagctaagttcagcgccgcgatgctggcgcttctggccgctggcgcgtcagcgccggtgttgatggaccagtttctgactgagaaagaggggagcagtctcaccgcctataaagacggctctggcatctggaccatttgccgcggggccacgcgtgtggacggtaggcccgtcattcaaggtatgcggctgacgcaggcaaagtgcggccaggttaacgccatcgagcgcgataaggcgctggcgtgggttgaaaagaacgtgcacgtgccgctcacacctccgcagaaagtcggcattgccagtttctgcccgtacaacatcgggcccggtaagtgcttcccctcaacgttctaccgcaagctgaatgccggcgaccgtaaaggggcatgcgctgaaatccgccgatgggtattcgacggcggccgggattgccggttaacgaaaggacagaagaacggctgttacgggcaggttgaacgccgggatcaggaaagcgcgctgacgtgctgggggctgtacgaatgaacggaaaaacgaaactggtgattgtggggggagtgctggcggtgtgcgccggcattttctgggcgggatatctgaagggctggtacgcgcattctgagcacgtaaacagcctggctaaagaaaggctgccgaagcaggagaaggcggtagcagctggcgagaagaaggcggcgacggcgaacgctgaagccaaagtggtttaccgtaccgtttatcgtgatgtggtgaaatatgtcaacgacccgaatcatactgtgtgcgaatttgatcctgctgctgtgcagctgcgccagcgagcaatcgacgcggccaacaccatccccggatttgatgaaccagccgtgcagaataagtgacgctggcgccgatagtgacgccgatctgcaggcggacacgcagacggcggaatgcgtgcgcgagctgcgtacgaacatttatcgttggcaatcgtggtatcgcgcgactgaatagaaatacgagtacataagttagtacattagctaatgttttgtttttataagtatatttaaatcaatgtattacattttgatgttagtagtcgtggatatagatccgggctggttgacgctatcttgcatagtctgttcattatccgtggtggcgtgcgaccggtatggtaaacgatttgcccggtcatcagaaggggcgcggcaagcaacttcctctgctgtgtcatattttcttgcaattaaaccctgatatgaaacgcgaagttccgtaaaaaggacggcggatctgtaaatctagaggatatgccgttgaaaggccgtttgtttattgctgtatctttgctcgcttcgagcgtttcctgcgcatttgccgtcgacttacctgctacggtcgcgccgccttccattcaggctggctcctgggtgctgatggattacaccaccggtcaggtcctgaccgcgggtaacgaacatcagcagcgcaatcctgccagtctgaccaaactgatgaccggctacgtggtcgaccgcgccatcgacagccatcgtatcacctttgacgacatcgtcaccgtgggtaaagacgcctgggcgaagggcaacccggtgttcgacgggtcatcgctgatgttcttaaagccaggggatcgcgtcagcgtccgcgacctcagccgtgggctgattgtcgactccggtaacgacgcctgcgtcgcgctggccgactatgtcgctggcggccagccgcagtttgtcgccctgatgaatcagtatgtcgaaaaactgcacctgcgggacacccatttcgaaaccgtccacggcctcgacgccccgggccagcacagttcggcctatgacctcgcggtgctctcgcgggcgattattcatggcgaaccagacgtctaccacatgtacagccagaaaagcctgacgtggaacgggatcacccagcaaaaccgtaacggtctgctgtgggataaaaccatgaacgtcgatggcctgaaaaccggccacacctcgggcgccgggttcaacctgatcgcctcggcggtggatggccagcgccggctgatcgccgtggtgatgggggcggacagtccgaaaggccgcgagcagcaggccgctaaactgctgcactgggggcagcagaacttcgacaccgtgcaggtgctgcagaaggggcagaaggtcggcaccgagcgtatctggtacggcgataaagagcagattaagctcggcaccgatcaggatttctggttagccctgccgaaggcggaagtgtcgcgcattaaagcgaaatatgtgctggataagaaggatcttgaggcgccgatcgccgccaatcagcgggttggcgagatttcactgtatgacggcgacaaggtggtggggcactatccgctggtcaccctcgaaagcatcaataaaggcggagtgttctcgcgaatgagcgattacctgcatcacgagctgtaaccacgccaaccgcctctttgcaggcggttttttttcgtctgtcgctcgtgctggcggggcgcctgtttttacagcagtgtggtggcgactctgtgaattcgcgcacatactgaggggggatctcctgttaaattaactgtatattcatacagtaatttatctccaaaggaggcaagatgaactacagcatcaccaccctcggcaagaaaaccatcgccggtttccatctggtcgggccctgggatcacaccgtcaagcaggggtttgagcaactgatgatgtgggttgagaaccaccaggtgcccgcccgcgaatgggtggccgtctactacgataacccggaggaagtgccggcggaaaaactgcgctgcgcgacggcggtcaccgtggatgaggattatgtcattcccgccaacagcgaaggggtgatcctggcggcgattgccggcggggattacgcctgcgcccgcgcgcgggtggtggattacgacttcgccaccccgtggatgcagttttttgacagcctgcagcagagcacggcgtatcgcatcgccccccagccctgctttgaggtctatcttaacgacggcaaccacgacggctactgggatatcgacatgtatgttcccgttgagcgcgtcgcgtcgtagcggtttacccctgtttcggacaaggttttttacattcccggcatgctccgggcgaaaaagcagttacaattggccttttcgttttgccggagagggttgtgcgcgctgataaatcactcaagccatttgagatccgcttgtatcgccattatcgggtggtgcatggtgtgcggattgcgctggcctttgtgctcacttttttgctggtgcggctgctgaacgtgcctgagggaacctggcctctcatcactctggtggtggtgatggggccgatctccttctggggtaacgtcgtgccgcgggcgtttcagcgtatcggcggcacgatcctcggttcggcgctggggctggtggcgctgaagcttgagctcatctccctgccgctgatggtcctctggtgcgcggcggcgatgttcctctgcggctggctggcgctgggcaagaaaccctatcaggcgctgctgatcggcattactctgtcggtggtggtcggggcgccgcccggcgatatgcataccgcgctgtggcgaagcggcgatgtgatcttcggctcgctgctggcgatgctgtttaccggcatctggccgcagcgggcgttcatccactggcgcatccagatggccagctatgtcaccaactttaaccgcctctaccaggccggcttctcgccaaatctggtggatcgaccgcggctggaaaagcatctccagcaggcgctgaatgacgtggttaaaatgcgcgggctgatcacccccgccagcaaagagacgcacatccagaaggcgatcttcgaggctatccagaccgtcagccgcaacctcgtctgcatgctggagctgcagataaacgcctggtgggcaacgcgtccgggtcacttcgtgatgctcaatgcgcacaccctgcgggagacgcagcagatgacccagcagacgctgttgtccatcgcccacgcgctgtacgaagggaaccctcagcctgtgcgcgccaacaatgaaaagctgactgagatcgtcctcgaactgcgccagctgctgaaagagcagggtgatgacggcctggcggaaaccccggtccatggctatgtttggctctcaatcgaactggcgcgccagctggagctgctctcgcatctgatctgccgcgcgttgcgcaaataaacatcagatgcaccgggtaaccacatgggttgtttcgattcagcagcgtttagggttatgataaacgcaaaggaaaaaacattgtcatcagcggctgctagcagttatgttagccctataacgcagtcgctttacgaatccgaatctcaattattaggggtgtaaaaatggaaacaactaagccttctttccaggacgtactggagtttgttcgtctgtaccgtcgtaagaacaaactgcagcgtgaaattcaggacgttgagaaaaagatccgtgataaccagaagcgcgttctgctgctggacaacctcagcgactacatcaaaccgggcatgagcgtggaagccatccagggcatcatcgccagcatgaagagcgattacgaagatcgcgttgatgattacatcatcaaaaatgccgagctgtccaaagagcgccgcgacatctcgaaaaaactgaaagtgatgggcgaagccaaagtcgaaggctaaaccctgccggtccggcggcggtcagcgtcgccgggctgttccgcgtttccctctcttccctgcttttttctgcgaaaactttgttccggcaactgcctctcctcaccgacactttgctatactggcccgcgaaaaacgtattgatatcggaaaggtttctctcatcctggccgggcatctgacgcagcggcgtcagggcgatatctcaacacctctcacctctccgacgatcgattcgccagaagacaaactcaggtgctgaccgggcgcgacagaactcttccgctgctttcgccgacaggagtcaacctcacgtgattaagtcattctttgctgcactctcgtttatcagccgcctgccggtcccggcgcggttatctcagggcctggagatcgaacagtaccagcgcagtatcgtcacctttccgctggtcggtttactgctcggcgccatcgccggcgcggtggcgctcctcctgcagccgtggtgcggcgtcccgctggcggcgctgttcggcgtgctggcgctggcgctgctcaccggcggattccaccttgacgggctggctgatacctgcgacggcattttctccgcccgcacccgcgatcggatgctggagatcatgcgcgacagccggctgggcacccacggcgggctggcgctgatcttcgtgctggtggcgaaagtgctggtggttggcgagctgctgctgcgtgatatccaccccatcgcagccctggcggcggcctgcgccgtcggtcgcgggatggcggtgctgctgatgtatcgtcatcgctatgcgcgggaaaaggggctgggcaatctgtttatcggcaaaattagcctgcagcagacgctggtgacgatggcgatggcgatcgcgctggccaccgccctgctggggctgcaggggctgcgcgccgcgctgatcaccctggtgctgatctggggtctgggatgggcgctgaagcgaaccctcggcgggcagaccggagataccctcggggcggcgattgagctgggcgaattactctttttactggcgctgctgtaaggcctgacgccaacggtgaggaacagaatggaaacactttcggcgttactggctgccattccgcagcccgatgtggcggccatggcgcgcgctcagcagcatattgatggcctgttaaagccgcccggcagccttggccgtctggagacgctggcggtgcagctggccggtctgcctggcttgcaggggcagctggcgctggcggagaaagcgattgtggtcatgtgcgccgaccatggcgtctggcatgaaggcgtgaccccttcgccgcaggtggtgacggccattcatgccggcaatatggtgcggggcaacaccggcgtctgcgtgctggcggcgcaggccggggccagggtgcaggtagtggatgtcggcatcgatgccgacccgctgccgggcctgattaacctcaaggtggcccgcggtagcgggaatatcgcccggacggcggccatgagccgccagcaggcggagacggtgctgctggccagcatgcatctcacccgccagctcgctgccgacggggtgaaagccttcggcgtcggcgaattgggaatggccaataccaccccggccgcagcgacgatcagtgtcctgacgggcagcgaccctgacgcggtggtgggctgtggggccaatctgccgctggcgcagcggggccataaggtggcggtggtgcgccaggcgatagcccataatcagccgaacccggcggacgggctggatgtcctggcgaaggtggggggttacgatctggtgggcatgaccggggtgatcctcggggcggcctcctgtggcctgccggtggtgctggatggcttcctctcctatgcctctgccctggccgcctgccgcatggccccttcggcgcacccttatcttattccttcacacctgtcggcggagaaaggagcgcagatcgccctcgacgcgctgggtctgcggccgtatctcgatatggacatgcgcctgggagagggcagcggcgccgcgctggcgatgcacctgctggatgccgccagcgtgatgtacaaccagatgggaacgctggcgcagagcaatattgtgttgcccgatagcgcgccgtcgtcctgatggtaaaacgcatcgtcccgcgatgggggcgatgcgccgggtttacagggcttgctgccagaccgcctggggcaggagataaaccttcgccggggcgcgcatgccctcagtgacaatatggcggatgccgctggccatcaccgccagggtgacgtcaaaggcgttcaggctatcgccgaagccagcggtcagattgagcatcgaaccattggccagcagatagacggttttgtcggccatgcggtaggcattgatatacggcatcacctcttcctgggggtgctggcgcaggtaatcgccgtcgatctcttccgccacgtggccgacgttaaggataaatactcccgctttcgcgcggtccagcgcctggcgattaaccacgtttttaccgcctgtcgccgtggccaccacgtccgccgaggcgatagcctcctggaggtccaccacgtgccagccgtcgtaggccgcctgcagacggcgggcaggatcgatctccgccaccatcacctgaccgccaaaagcttttgccgccgccgcgacgccctggccgaccaggccgtagccgatcaccagcacttttttctcatgcagggtgaggtgagtggtctggaagaaggtgtgccaggcagtgagaccgaccatatggcggttgtgcagcccctctttgaccggcagatcgtcccagttaaagatcggatagcctggctgaatatcccccagccgattgacgcccgagccggtggcttccaggcccgccacgatgttcccaaactcgccgcgctggtggagcagggtggtgatatcggcgcccatctcgcacaggtgagtgggctgccaggcaatcgctttttcccatgactgttgccagtcggcatcgctcatattgcgccacgcgcaggcctcggcgccgcgctccaccagccaggccaccacgtcgtcctgcacggtggtggggttacaggtgattaaaaagacctgagcgcccttgtcgaggatcccctgcaccagcgggatcattttcatgtcgaggtgcatacagcaggccagacgcacgccgctgaggtcgggcagcgcggcgacctgacgcagggtacgcggcatattctggctggcccatgccacttctttcgctaaagagattttattattcactgggttatgaccttcaattcgcaaaaggggtatccccctgaccgaaaagggattctatcagcccccgcgagaattcacagcacaatgccgtcggacatcgccgcgcgcgctatcccctgcgaaagacagggttgttaatttaaggttaaaaaaagaaaataaaatataagtaatttctatgatttgagcgatgaagcgatgttgagtgttattcctgcggggatgttttcacggctgcggattttccttggccgcctgaagccgcacgcgctgccggtggcccgccggcatatcgtgctgggatccattggcgccggcaccggactggcggtgaccagcatgttcagccactggctgctcggcgaagtcaatctgtggtttattgccccgatgggggcctcggcggtactcctgtttggcgtaccgagcagcccgctggcgcagccgtggtcgattgtcggcggcaacgtgctgtcggcgctgatcggcgtcacggtcggtatgctggtccccgatgcggcgctggcctgcggtctggcggcggctctggccatcgccgggatgtattttctgcgctgtctgcatccccccggcggcgcggtggccctgacggcgatcctcggcggcgccggggtgcacagcgaaggctatcactttgtgctgaccccggtgctcctcaactcgctgatgctggcgctgctggctattgtgtttaataacctggttggccgccgttatccgcatccgctggcggcggaggaggtcaaatccagggcggtgccgctgggtatttcggtcacccgggaagatattcacgccgcgctgctggaaggccagttcctcgacattgatgaagacgatgtccaggagttgctggagaatatcgagcagcaggcgcggcagcgtatcgcgacggcagcccgccgctaagggcgtacagtgggctgcgggttacagatcgccggtaagatactgcgcgaccccgcggccaaagctccagtcgcctttctggttactgataatcgacaccatcagatcatcgccgctcaggccgcagtgttccgccagctcctcctgcaaaatggcgaagaagcgctgcttctgcgcctcgctgcgcgggctggtatagacccgcaccaccaccagatcccgcgtgcgggtcaatccgaggccggtatcttcaatcaccatatggtgggctttgttttcatgaacaatctggtaacggtcgcgttctggtacctcgaaggcgcgcagcacggcgcgatgggcggcatccagcagggttttgacctcctgttccgtacggccttcaatcaggtcaaatgtcagtaatggcatgcaggtgctccttatcgttagggaataatgatgggctcaacaagatgctagccgatgccgccgccggcaaaaaccgctatagttgaatacattgtttttactggtgaacaatcacatgagcgagagtcgtccggagagttactggccccatctgtactggctgacggtgctggaagaacaaaaaagctatacccgggccgcggaaaagctggggatcagcaagtcggctatcagccagaaaatcagcgagctggagcgggtgaccggtaaaaccctcgtccatcgcaccacccgcagcgtgagcctcagcgacgacggactgcggctggtggcggagctcaacgagccgtttggtcagctgcgggatattttcaccggcgcctgcgatgagggcgggccgctgcggggaacgctgcgcctgaccgcgccggtggccttttcccgccagcagctggtcccggcaatcgcgccttttttgcatcagcatccccaactgcatctgcagcttgaggtcaccgaccggctggtctctctggccagcgaagggttcgatctcgccatccgccactgtcggcgcgaggcgctccccgatacccacgtcgcctggccgctgtgtcacaccgcgacgcttaccgtcgcgtccgccgactatattcgccgccatggccgcccggagacccccgaagatctgcgccaccaccaatgcctgacctatccccgtgggccacagcgcccgcagtggacgttcgcctcccgtcagtcgcccgatgctcgggtgaccatcaacgtgcaggggccattcgccaccaataacagcgagtcgctacgtgatgcggtgctggcggggcttggggtggcgctgttgccggatttcagcgcccgggaggccattggccgcgggctggtgcaggagctgctgccggcgtggcagccagtagatgtgtttgccgatcggctgtacgtcatccggccctataccccgcgcgtgtcgcgcgcggtggaaaccttcagccgctacctgaaagcgaccttcagcgagacgcgtccagctcctgcgccagcgcctcgctaaagcggggcagcagatggcgctcgccggtaagcagctgcgcgagagtaacggtcttgtcagcgcaatagacccgctcgctgccgagctgcgcttcgaaggcgttcgccgcctgatgcgccgcgctcagatcggcgtcaataaggatcaccgcatgggccagcaccacgtggccgccgcccgccgccagcggccgccagtactgggcggtaccgacaatcttgcgcgcctccgcgccttctccgcaggcaagattataccgtccatcgcaaaaggaaccgctcaccgcccgggcgtggctggcaacgccgaagcgcgcgagggtgcgctgcagcacagcgcacagcgaatgatagatcggttcggcggcttcgccgagcggctgctgcaccggccaggcgaggctaaggttgataatgcccggcccctggggcaccagaccgccgccggagcggcgaagccataccggccagccgcgcgcggcaaaatgcgcgctgaccgccggcagatccgtaaactgacgatagctccccggcaccaccaatccctgcggcgcctgccagagctgggcgacggcctcgccggcgctggctttggcaaacagcggctgttccgcctgggtgggatcctcgcaaaactgcagcgccagcgaagagggggaaaaacggcgaggccagcagtcggccagggttaactgagacatgtattctccttaccggagggcacgggttacgccctccgctggtgggtcagtcgacggggtgctttttcatcagcagcgcggtgagcgctgacagcaggcatcctgcggtcagatagagggccacgctgtgccacgatccgccggagaaagtgaccagcgccgcggcaataaacggggtaaagccgccgccgaccacgctcgccacctggtagccgacgccggcgccgctatagcgatagctggcgccgaacagctcggtaaacatcggctgctggacgcagaccaccatatcatgggcgatattggccagcatcagggcgaagaacaggatccagaaaacggactgactctctagcgccataaagaacgggaaaccgctcaaagtgccgatcagcgccccggtgatatagatccgtcgacggccaaagcggtctgccagccaggcgaagcaggggatagtcaggcagctaagaccgcccaccagcaggccaatgttgagaaacagctcgcgcggcaggccgaggttttgcgtggagtagttgagggcgaaggcggtgacgatatacatcgtcagcagttcacacagccgcagggcgataatcagtaaaaatgctcccggatggcgaagcagcgcttccactaccggtagccgctttttcatctgcggcgcgttgtcctggctctgctgcgcttcaaactcctgcgattccgccatgccgttacggatccacagcgcaataaggaccagcaccacgctgaacaggaacggtacgcgccagccccagctgaggaactgctggtcgctggtcaggctgctaatcagcgataccagcccggtagagagcaggaggccgacgccgtagcccacctgcaccccactgctgtaaaaggcttttttcccctgcggggcattctccaccgagagcagcgccgcgccgccccattcgccgccgacggcgaatccctgaaccgctcgcaggaacaccagcagcaccggcgcccaccagccgatctggttgaacgaggggagcaggccgatgcaggcagtggcgatacccatcatccagacggtcatcatcagcatccgtttccgcccgaggcgatcgccgaagtggccaaaaataattccgccgagcgggcgaaaaagaaacccaacgccgaaggtggcaaaggcggcaagcgttcccatcgccgggccgatttgcgggaaaaattcgcggttgaacaccagcgcggcggtaatgccatagagaagaaaatcgtaccagtcgaccaccgcgccggcaaaactaccccaggccgcccgccgggcccgatgtagtgaatctggcgcctcgccgggctgcacgcttattgttgaatccataccctgtcctgtcagtcacgtacttcattgttattggaatgagacgcttttaccgttgcgtctgctctgagactaccgcgcagcggccgtggaggaaagtagtttgcctgctaagcgggggagatggcgcaaaaaagaatcgatgggaaagacggtcgaaatcacaccctggacttaacattctggcaatttgccatccagcttatacttttaattaaatcaacggataacaaagatggacaccttttaagaatcgacgtaaatggtttacacttaacgtgtctccctctctggaatggtgagtaaaatgcgtctacttcttgcagttttattttgttctgtcatgttgccttctgcttatgctgaaaaactgcctgcgccgacaggaaaacctgtactgaccatttccggaaaaatcggaaatatgaatgtcggcgacaaggccgtttttgatctcgcaatgctggaaaaactggggatgaagacgatagaaaccaccaccccctggtacaccggcaaggttcgttttgacggtattccccttagtaaactcatggatttagtcggcgcgaaaggcacatcggcccgcgtgctggcgctgaacgactacaccaccattatcccgattgatgatttttataaattcccggtcattatggcgttaaaaatgaacggtcaatatatgcgcattcgtgataaaggcccgttatttattgtctacccttacgacagcagtgctgaattacagaaccagatctattattcccgatcggcctggcaagtttcaaagatgattatagaataagggttggatcttgaatcgaatactcacggctattattttgtcgttatttgttgtcaccggatatattacttatctggtgcatgagcgacaaagtgagttgcaaaaatttacccgctatacggactcgtagtcaatgtcgcagatggtgtcggaatatatgcggctggagtctcgtctggcgggaatggcgattggggccgaaggggcggaccacgatgaggtgcgcctgcgtcttgagatcatgatgagccagatcgagcttctgcaggagggcgatctgggtaaatttatcaataaaagcgagcagcggaagacggtggttgcgacgctgattcgtaatcttcatctgctcgataaacaagttgataccatgacgccggagcaggtcagacagatcctgccggtgttaagcgagctggatggtccgctgacctcaatggccgccgccaccctgacgcaagatatcaatatcgttaatatcacccatgataaaatccagcatctctattatatctactcggtgatctccattctgctgatcgccatgtgtataactctcggtctgctgatgctccgacagaataataatctgcgtcgcgcccatgttcgtatgaaaacgctggccaacgatctgcaggcctcgaaagagaagctgcaggtgcagaaccgccggctgcagtacgatgcctaccatgattcgctgaccggtatgcccaaccgtctctctttctggcagcggctgcaggagatcgtcaaccaggtgcgtccgtataagggatgcgccgtggtgatgcttttcgacctcgacagctttaaggatgtgaacgatacccttggccatgatgctggcgataagctgctgcaggatctggccagtcgcctctcttttttccgcaaaacctccgagacgctgtatcgccttggcggtgatgagtttgcgatgctctcctacgatctcactgaggagatggcccttgagcgggccaatgttatccgggagaagatcagccagccctatcagatctacgatgcgcagattaatatcgacgcctgcattgggatcgtgatctctgacggtgaaagccgtaccgattatctgtacaagtgcgccgacctcgcgctgtatgaggcgaaaaaagagggtagcggccatgtgcaaatcttccggccggggatgctgcagcgcctgcaggagaacaaatcgtttgaagacgatctgctgcaggccctggcccatgacgaattcaaagtctactatcagccgatcgccgataccgtcacgcgcgaaatctacggctatgaagcgctggttcgctggttccatccggtgcgtggcgccgtgccgccgacggtgtttattccggtggcagagaaaatcggtcttattaatgcccttggcgaatgggtgctgaaaaccgcctgtgccgaagcggccagctgggcgacgccgctgaaggtctcggtcaacgtttcaccaattcagttgatgaatacatcgctgaccgacaccattatcgaggtgctgcatcagaccggcctcgatccgcgacgtcttgatctggagatcaccgagtcggacgtattcaatgagaacacccgttcgctggaaattctcagccagctgcgcgagctgggcattcagatctccatcgatgactttggtaccggctattcttccctgtcccgtttaagctacttcccgttcgataaaattaaaatcgaccgctcgtttgtcatcaatattccggagcaaaaagacgatctggatatcgtccgcctgattatcagcatgggaaagagcctgcatatgcgcattgtggcggaaggtgtagagaccgaagagcagttggcttcgctgcaggcgctgggctgtgacctggttcagggatatttaatcggcaaaccgagtccgctgcgctaacaaatttttaacgcgtttatttttattctccgggcgatttcaggatcctgaaatcgccttttttattttctcttagcgctaatccctgcgaggtataaaaaggagtaggcgtaaaattccacaacaaaataatatccttaacgtttaaaaggggtatatgatatgcatcatataggctatttctgaacgtcgcgtttgagacggtaaagtgaggcacaatcatgcagcgaatcattattcccacccattacgttcacacccgcagcacgccgctgtggaccaaagagaccgccccggcctctatctggcgccgccatctggatgccggcacccggcagggcgtctaccctcgtctctcggtgatgcagggggcgatccgctatctcggctatgccgatgaaaccagccccgagcccgttgaaaccctgactattgaagccggccagtttggcgtctttccgccggagaagtggcactgtattgaggccctctcagaggacacggtttttaatgtcgacttttatgttgatccaaaaattctcatcgagggataacaagagatgaccagtgaaaataaaggttataccttagcgctagagaatggccgacttcaccagaagcaggaaaaaatatttctcaaaccaatggtgttgtatattccacagcaggcggtggaggccgttaatgacctgctgagcaagttgccggacgacagggaagagggggagtttctgttgacggtcaccaataataataacggcgtctcggttgataaaaccttttcctcgctggcggcactgcgcgacccactcaccgcggctgatgcggtgaaggatctgatcaatatcgttcgcggttacgagtccgatgaagagaccaacgtctgcggctggtaagcccgctatcccgcagtcggatggccgccgtcgcccgacgccatctggctgagcagccactcccgcagagcgataatatccgcccgctgcgctaccgcttcggtagtgaccaggtagtagcgggcgccaggcaatgcgttgctgaacggcgcggataatacgccgcgctgcagcagatcccgcgccagcagttcgctggcgatcaccactccctgaccggccaccgccgcctgcagggcatgggtctcatcgctaaaggttaaccccgcatcaatattcagcgtcggcggtccatagcgccgacgccagttctcccagctcggcgaatcagctggcacgcgccggttggcaacgtgaaacagcgtcacccgctgcagatcttcaggccggctgaggcccagagtcgggctggcgaccacgataaagcgatcctcatacagcagcgtgcagtacaggtccggctccggcgtttcacgatagcgaatcgcggcgtctaccgtgcccagatgcagatccactcgttcgacgctggtgtgtagccgcaggtcgatagccggaaagcgggcggtgaaatccgctagccgcggcaccagccagtgggtgagaaaattggaggtggtggtgacggttaaggatggcggctgacgggcatgagcgatctggacgacggcctgttccagggcgctaaaggcgcgttgggtggcggcgtaaaggatctcgccatcagcggtcagactgacgccctgcgcgctgcgttcgcagacccggcactccagcaccgactccagcagtttaatctgatggctgaccgccgtcgcgctgacgccgagcgcctcggcggcctgtttaaaactgcggtggcgggcgacggcatgaaaagcgcgtagcgcccccagcggcggcagacggggtggtctcatggctgagtttttctcatctatggctgaaaactatgcgtttgtgtaaggcaatatagtggcgataggctacgggcatgtaaagacaatgacatgaattaaattcatgcagcttcgcctgtcaggagtcaactatgcacgttgtaagccgctacaccgccgcggaagccgcggcaacgatcgacccccgcggccgcgctatcgcccttagcgtggtcatcgccgccggggccttgctgttaatcatgcccccggttatcggggtgaccggcacgctgagtctgctgacggcgctgattgcggcctttggcgtcgggtggggattcactcgcggacaatcctggctttatcgctcacccctggcggcgacgcgctgggcctttctgctgtcagcggccggctggctgctggcgctggtggcctggtatggcgggcaggactggccggcactgctgccgggcgtggcgtgcggtggggcgggagcggctgtcgcctggcgcattgcggcgggtaggacggcgctgccggggatgcgggtcagcggcgccacggtgctgagcgtagctatcgccatcgcggcgacgctgctgacctggcatactgcgggaggaggacgccatggcgtctgctttgccttcgccgtgctgcttgactgggcgctgctcggcgcgctgatggtgcggatccgccagcaggagagtgcggcctgataccagacgcggtctggtccaggatcggcgaatcaagcgagacagggtaagttgtcccgcccggcgttaaatatcttctacactgttacaggcatcacattcctgtgcggtcggcactcctgccggccgccgtcggcgttcagcccaggcacgggcctgcgggctggttatcctgaaagaggagtctgtaatatggcatttgtcaccacccaagacggcgtcaacatttactttaaagactggggaccaaaggaagctcagccgattgtctttcatcacggctggccgttaagcgctgacgactgggataaccagatgttatttttccttgccgaagggttccgggtcatcgctatcgatcgtcggggtcatggccgctccgatcaggttagcgaggggcacgatatggaccattacgcggcggacgtttcggcggtggtggaacatctggatctgcacaatgcggtccacgtcgggcactccaccggcggcggccaggtcgcacgctacgtcgcccgctatggtcagccgcaggggcgggtggcgaaggcggtgttaattagcgccgtcccgccgctaatggtgaaaaccgagcagaatccgggcgggacgccgatcgaggtgtttgacggtttccgcaaagcgctggcggcgaaccgcgcccagttctatctcgacgtcgcctctggcccgttctatggcttcaatcgtgatggagcagagatatcccaggggacgatccagaactggtggcgacaggggatgatcggcagcgccaaagcccattatgaaggcattaaggcgttttcagagaccgaccagacggaagaccttaagtcgatcactttgccggtgctggtgatgcagggagatgacgaccaggtggtcccctataaaaatgcggccatcctgcaggacaagctgctgccgaacagccagctgaaaatttatcctggcttcccgcacgggatgcatacctcccacgccgatactatcaacgccgatctgctggcgtttatccgcgcctgatctgccctctttgccgggcagagtgccgttaatggcattccgccagcgccctgggcgccagtcgcctggggcgcgccggttgacgtgcagaggaaatctgcttaactcatggggtacctgacgactattttcccctcgcaggataaaacgccgggtttctctgcggaaacccggcggaattctgcgcaagagacaagtgagagacaatgaaattagccggacttcatcccgacgagcagcgtcgcctgcaatcgctacgctcttccgggctgttgaatagcggaaaagaagaacgcttcgatcgcctgaccaggcttgcccgttcgctgtataacctgccggtggcgtccatcagtctggtgggggaagatctcctgcatatcaagtcctgtgccggtctcgatgtggacacggtgccgagagatatttcattttgcgcccataccattctgcaaaccgacccgcttatcgtcaacgacatgcagcaggacgagcgctttcacgataacccgctggtcattgaggcgccgtttatccgcttttacgccgggtatccggtgcaactgccggatggcgcgaccgtcgggtcgttctgcctgatggatcaccagccgcgatcgttttccgcccatgaaatgcagatcttaagcgatctggcggcgatcgtggaggatgagttcaaggtgctggatgcggcaacctaggatgagctgacgggactgtttaatcgccggggattcctcaccctggcagagtatgccctgctgacggcccagcgccgccatgagccggtgagcctggcgtttgtcgacctcgatcgcttcaagcacatcaatgatacctgggggcatgaagagggcgatcgcgcgctgatcgccatcgccgacttgatgaaagcggccttccgcgagtccgatatcctcgcgaggcagggtggggacgaatttatcattctgttcgccaataccagccgccacgatgccgcgacggcgatggagacgctcagccacaacgtggcgcgtttcaaccagcaggcggccaatccctggcagctggcgttctcctggggctgcgtcgaatatgatcccgccagccatcccagtctcaacgcgctggtggccaccgctgaccgcctgatgtaccaggcgaagcagaagcagggacgcgagcgccgttaatcctttgcggcggtggcactcaacaggtactgctgcgcctgctgccgcttctgcgcatagctgctgagcagcgcctgctgcgatttcccttcgttatcgtaaaacaggccgccttcgtcggcgataaagcgataatgctgttccagctggtttatcacccagtcaatgcgttgcagggtgagtaaggtacaggactgaccatgcaggtcgtcttcaatatccagcacatgtgagcgaaaggcctctacggcaaacagccggctcagcgcggcagggtccgccagcgctgactcccagcgcgccgtcaactgctgaaagtgagccagcaccagcgggtcagcgcgccgggcgcgaagccagaccagcttccggcggtagctttcgaccgccagccgcttcatctcgcgatattgcgccagctgctgttcggcgtcagggatccgggtcatcagccagctaaaaaagaagcgagtctcaaaacgttcgacaaagtggaacagcgggtcggccagaccattgctgttgaattctctcagcgggtcgaagggatacatatagccaaaatcgaacagccacagctgctcctgccggtccaccagcagattcccgctacagagatcccactccatcagcccctgctcttcgcaggcttccagagtagtaaatagctgggcgatcagcgacggggttaactggtgtatcggctcgccctcgatccagggggagagcaggatgccgaggcgataatcggcatacagcgttgggacgatgtgggtgaagcgcggcgtggtgaccgggtcatccttcagctgttgcaatgcttgccgacgctgtacctcatttaaaaacgacagctggccgttgaggttggcaacgccggcgacggcgcgacgtttctttaaattgtactccttgccggcgatgcgcagacgataaacctcgccggtcaggcctgagccgtatacctgcaccacatagggggaatcggggcccagtgcggcgagggtctccggcggcagcgggcagtggctgacgttgccgacgataagaggttctccgctgcgatcgaacgcctgctgttgctgttgtctgaggttcatggtgcctccgggtataacgttagacagagtggataatccacgctatctcacccgcaaacggtagtgaattcatcctactggcaggcgctttttcaggctgagctggggtgcgttcacggaggacacgcggggcgtagggaggcggtagggaaaggcaagcgtctggaacgcatacctgacgtcgttgtcaacgaggtgcttgccaggctggatgcgatgctgagttaacgtcagcgacgcaaaaaagcaaaaagcctgctcgaaagcaggcttcttaaatttggctcctctgactggactcgaaccagtgacatacggattaacagtccgccgttctaccgactgaactacagaggaatcgtgtggagtcgtatcttagcggcgaaaaaacttttgtcaaacatcaattcgcctgttcaggtgcaactgccgcttacatcgacaatttgttgtcatttccgacaattattacggaaaatactttgcaggatatccatttctcaatcatcatttgaaatgttgtttcaacatttctcactaaggtctctcttgaacgtcacctccgccgtacgccaggccgtcgaacggacatcctggtttaaaaaacgtcagcgttatcgtgtgctgtactggcgcgaaatcagccctctcgctgtgcccattctgctggaaaatgcctgtgtgctgctgatgggggtgttgagcaccttccttgtcagctggctgggaaaagaggccatggccggggtggggctggccgatagctttaacatggtcatcatgtccttctttgccgccatcgatctgggcaccacggtggtggtggcctttagcctcggcaagcgcgatcggcggcgggcgagggcggccgcgcgccagtcgctggccattatgacgctgttttccattttgctggcgggggtgatccatgcctttggccaggagattattgattttgtcgccggcgatgccaccgcccaggtcaaggacctggcgctgacctatctggaactgacggcgctgagctacccggcggcggcgattgcgctgatcggcagcggggcgctgcgcggcgccggcaccaccaaaatcccgctgctgattaacggcgggatgaacatcctcaatatcttaatcagcagcgtgctcatctacggcatcttctcctggccggggctggggtttgtcggcgccgggcttgggctgaccattgcccgctatattggcgcgatagccacgatctgggtgctgatggtgggcctcaatccggcgctgcggctgtcgctgaggggctacttcaaaccctttaacttcgccattatctgggaggtgatggggatcggcattccggccagtatcgaatctgtcctgttcaatggcggcaagctgctgacccagatgtttgtcgccgggatgggcaccaacgttatcgccggcaactttatcgccttttcggtggcctcgctaattaacctgccgggcaacgccctcggctctgcctcgacgatcattaccggcaagcggctgggaaaagggcagattggtcaggctgaattccaggcctggcacgtattttggctgtcgacgatcattctgacgctgatcgcctggggcagcgctcccttcgccggctttatcgcctcgttctacacccatgaagaagatgtaaaagaagtggttaaacagctgctgtggctcaacgccctgtttatgccgatctggtcgctgtcgtggactttaccctgcgcttttaaaggcgcccgtgacgtacgctacaccatgtgggtgtcgatgctcggcatgtggggctgccgggtagtggcgggctataccctgggcatcgtgctggggatgggggtgattggcgtctggttagggatggtgctcgactgggcggtgcgcggcgtgctgttttatttccgcatggtgagcggccgctggctgtggaaatatccgcgcgtgaaggcttcatcggaggaaagctgagtcgtttgcaaggctaaacgccattttttgcgcaaagtgaagaataattcggcaaacgattcattttattgaaaacaggctttgacagcgccgggcgtcatcgataatatgcgccccgttcacacgattcctctgtagttcagtcggtagaacggcggactgttaatccgtatgtcactggttcgagtccagtcagaggagccaaatttaagaagcctgctttcgagcaggctttttgcttttctgtctaccacctttcttccgtggacaaacaccgccgggtcgtttgtttcgcttatccggacgctgacgctccctggcgggtaacgtcagcgtttatctcacgattcccacgtcatcgacgattaacggaacggcggctcgttgaaggtgcgcagcttacgcgagtgcatgtgatctccctcggcgcgcagcaggtcaatcgcccggatgcctatctgcagatgctcggagatagcgccctcgtaaaagcggttagcctggccggggagcttgatttcaccgtgcagcggcttgtccgagacgcagagcagcgtgccgtaggggacgcggaagcgatagccctgggcggcgatggtcgcgctctccatatcgatagctaccgcgcggctgagattaaagcgcagcgccgaagcggaatagcgcagctcccagttacggtcgtcggtggtgaccaccgtcccggtacgcagccgctgcttaacctcttcgccgggcatcccgctcacctgcttggtggcgtcgtagagggcgcgctgcacttcggcaatgctggggatcggaatatctggcggcagcaccgcatccagtacatgatcgtcacgcagataggcgtgggccagcacatagtcgccgatggcctggctttcgcgcaggccgccgcagtggccgatcattaaccagacgtccggccgcagtaccgcgagatgatcgcagatggttttggcgttggccgggccgacgccaatgttaatcagggtgatccctttgccgtcgtgggtgatcagatgccaggccggcatctggtgcttcttccacgccagatcggaaatggcctgttccggcgcttcggtctcggcggtgatccagatcccgccggcgcaggagagagcgatataggggctgtcgggatcgaggatctggctgcagccccagctgacgaactcatccacgtagcgggtatagttggtgaacagcacgtagggctggaagtgttccgccggcgtgccggtgtagtgtcgcagacgcgccagcgaaaaatcgacgcggcgggcgtcaaagggcgacagcggatagaactcggtgggatggaacaggccatccgcggtctcatcgccaatttgtgacagctcggtggtagggaaatagcgcgtcagaccggcgctcatcgagcggtcgagtgtcagggtggaaccatctatcacgtaaggataggggatctcatgctgcgacagctcgacgctgatatgcgcgccatagtcctgatacagcagggtcagctgttccagcaaatagttgcggaacagtttcggattcgtaatggtggtggtatagcaaccggcatgggtgaaacgtccccaggcgcgcgttttgagggctttatgatcggcgccgtcccaggagaccgacagctgcggatagacaaaaagaccttccgcgcgggcttcggtatcggggagcgtattatggtcgatatagtcgccgatggctttgcgtaacgccgtgaccgaggcttcatagcgcgcttccagctcggcaagcgcttgttccggggtcagactggcggccttgatattcatgattcgctccttgtttcaggtctgctgacattcccgatagtatgtcacagcgggaaaagggcgaaggagaatttatctgtcaaatgcgacaatactcagaccataaccagtaaagggagcgggctcgtgttatttgccggcgtttgtccaacgctcgctgctataatgagtggcgttgcggatcttcaaagtttgcgtcggattattattcagacaatagcgcgcatcggccagcggagtgagtttatccccttcccgcaggcggaggcgacaggcttcaatctctgcgatcatctccagcgcaccgctctgaagcacgacgcggcagaggctggccgaagcgttgtcctgtactttttttacccaccactccatctgttttttatcctctcatagcgacatgtgcgtcgataattcatgtttcttaaaaatctgacaataagattatccccttggtttatgcagtgtttaaaaatacgcaaccgattgttgatctgtgcgctaggtttttttatgccgggggggaatgatctgccaggtttaatttgcaggaagcgatgactatgctgaaaagcagaccgtgagaatagcctgtcaggaagagggctgataagtccggctacgcaataaatataagagagagcgtcatgaagcatctatttcgacactggcgaacgtcgggcgccgttatcggctcactgctgaaaaaagggagcattgcggtactggcgctgctggtggtctttctcgccgggcggatctatgagtcccagcgcggcccggccctgcatcgctggcatacctggagtggcaacgagatgtcggccgaagagatcgaccaggcgacctttgcccagtatctggcgcgggagaagacgattttcgccgatctccagcgtgaggtgacagaggctttgccggaggaagataaaaccccggtcaaccgcttttatcgtcacagccgggtctggccggggcagtttcagcaggactggaaccgttcttttgtgttgatgccgctgggcaagccgcgcggcagcgtggtgctcctccatggcctgaccgattcgccctacagcgtgcgctatctggcgcaactctggcagcagcggggttatgtggcggtggtgccgcgtttgccgggacacggcaccgcgccgggggcgttaacggcggttgactgggagacctggctggcggcgacgcgtctggcggtacgcgaagcgacccgccttgccggggcggacgtgccgctgcatctggtcggctactctaacggcggcgcgctggcgctcaagtatgcccttgatagcctggaggatagccacctgcgtcagccgcagcagattattctgctgtcgccgatgatcggcgtgaccgcgtttgcccgtttcgccggcctcgccgggctaccgtccgtcttcccggcgttcgcccgcgcggcctggctgaacgtggcgcctgagtttaatccgttcaagtacaactcctttccggtcaaggcggcgagacaatcgtggttattgagccaggcgctgcagcagcagattatccgcgcggcccggcagggcgagctgaaagcgctgccgccgatcctcacctttcagtcggtgatggattccacggtcagcacccgcgcggtggtggagtccctgtatcgctatctgccggataacggcagcgagctggtggtgttcgatattaaccaggcggcggatctccgggtcctgtttcgccctgcgctctatgcggcggtgaatacgctgctgcccccggcgccgcgggcctataccaccacggtggtgaccaacgcgacggcgcacacgctgcagaccgtcgcccggaccacgctggcccaggaacgggaagagcatcgttatcctttacacctggcctggccggcggatatgtactctttgtcgcatgtggcggtgccgtttcccctgggcgactcgctgtatggtcgcgagccggacgagaagaaccgctacggcattagcctgggcaccatttcactgcgcggagagaccgggacgctgagcgtggggctggagacgttaatgcgcgtcacctccaatccattctttccatggatgatgacgcgcgtcgatgagcgcatcgcctgcggcgaacaggcggcggtgacggcctgcctgaaagcgcaggccagagcagaggcgttaaaacaggatcaggtgcagaacggtacgcagcaggatgccgacgatcgccgcgggagccacgaagcggaacaggcggacaaaccgtgagctgatgccaagaaaaatgccgataccgggaagatcaaaggtctggatcaatagacctgccgaggcgttgacctggtccacggtgactttgccctgctggatcagctcggaaatgacgccaaagtaggcggtgcccccggcaacgcacttcaccagcgccggcagcacaaagttctgggggatgtgcagccagctgagaagcggcttcagcagctgctgcagcaggtcgatagccccggcgccctgcagcagcccgacgatggttaacgacaggatcagcattggcaccgcgccgagcgccaggcggatggcgtcggagccggcgctattaatcacggccagaattccctggctgttctgctcggcattcggcagcgcttccgcgcgggggttctcggcgaccgataagcgccgtccggtgacgtgccaggcgacggcggccgcgcacaggccgccgaccaccgagataacgatcgaggccagccagtgcagaccaaaaggggtaagaggatagaagacgttgccttgccccatggcgaacaccatggccagcgtggcggccatttgtcggtccgagacgccgcgtttatccataatcgacagcgtggcgagcggggcggcaaagctgacaaagttaatctggatcagggcgaaggcgctcatcccggttaagccgaagggcttcagcagcggggccacccagcgaacaatcacatcgaggataccgcggacctcaaggtatttcatgatgatcagcatgatcaccatgatcggcaacagcgtatacagcgcgacgtcaacggacgacttgcccgccgccataatgatgcttatgacatccatttactttttttaccactcgcagagctattcgttcgcgtcatcataatcccgtggggaaggaaatgatatgccttgatccctctcgggatccggcgccgcacgggcgccgggagaagaggattactggccgatattgaccagcgtccgaccatgaatattattgctgaggaaatctgcggcatacgctggcgcctgctccagcgtgatttcagtggccgcctgctggtagtagctctccggcagaagctgggccagacgctgccagacggcgtcgcgttcagcggtcggcaccatcaccgaatccaccccctgcagacgcacattgcgcaaaataaacggcatcacggtggtcggcagatcgaagcccccggccagaccgcaggcggcgacgcagccgcgatattgcgtttgcgccagcactttggccaacactgggccgccaacggtatccaccgcgcccgcccacagctgtttctccagcggacgggtctccgcgaagtcgctgcgcggcaggatcgtatcggcgcccagctggcgaaggtaatcgtgtgtcgattcccggcccgatacggccgtcacccggtagccaagggctttcagcaacaccacggcggtgctgccgaccccgccgctggcgccggtgaccaggatatccccgctatcaggggtgacacccgcactaacgagagcatcaacgcatagcatcgcggtaaagccggcggtgccaatgatcattgcctggcgcgcgctgagcgtctccggcagagcaaccagccagtcgcctttaacgcaggcttcggtggccaggccaccccagtggttttcgcccacgccccagccggtgaggatcacggcctggccggtaacaaagcgcggatcgcggctttctttcacctgaccggcaaaatcaatgcccggcaccatcggaaactgacggataattttgcctttgccggtgagcgccagagcgtctttataattgagactcgaccagtcgatggcgacccggacgtcgccttcggcaagagcgggcaggtcgatatctttgacagtggcgacggtgcggttgtcgatctggtccagaactaatgctttcatgacagagtattcctcgtcggaagggggttatcggcgctagcgccgtcctgtgcaggtgtttttgttgtcatactgtgcgcaaaaaaatcccagtactggttaagcggtgcggcagactggaccagcctggcgcgcatcaccgcgccttcccagccgatccagaacacctgggccagcgcctgcggtgaggcgtcgctggcgatggccccggctgcctgcgcttcgcgcaggcagcgcgccacgcgcgactcccatgccgccaggatagccatcaaccgttggggaaacgtctcgggtaacaacggggcttcctgcagcaggttgcccaccaggcagccgcggcgaaactggaatttctccattccctgaccggcatgacgcacaaaggccgccattcgttccagcggcggcacggcgtcgtccagcaggaatttatctaatttatgcgcaaagaagtcgccataggcggcaagcacggcgaggccaaaagcctctttgcttttaaagcaatgataaaacgacccctttggcacggcgatattcttgatcaccgcatcaatacccgccgcgagatagcccgtttcggtcagcacttcaaggcctgagcgaatcagcgcctgacgcgtatcgtcaaactggcgatcgaccttgggtggacggccgcggcggggcttcaggacggtggaggtattgggattcatgatttagaccgtgtggtttaattgtttgtcagggtacgcccaattcagggggagggcaagcattgcgcgtagcgtaaggctggctgtccaatcatcctgaaatgggggggcgttaagaattatttatcgcaaatacgtggttcgcactgccggcgggggcacgaaatataactctgccgggtatattagactggtcattaatatccatattcacaatgcataatacgaattaataatattgggaatatataaacagcggagggctggagcggttgagtggttttgtccatgtgaagaggctaatttgcgaagtccccggtcgacagtcctgtgaggacttctccccggaatgccggccggggatgatttgcagacgatagcggattgacaaacgcggcttgataaaagacattgtcacccctgatccggcaccggttgccacctcagtttaaatattatcgccggcagacaatgacgtctgtcttaaattatcggtgactgggtaaataatctgttaccgaaacaacacctgcgaaaaaggattaacagtctgatgtacagaatgaatattgccgtcagaggaggggatgaatgtcgctaattgctatcgtgctggtctttatcatggccatcgtggtgaccgtgttcctgtcccatcttctgcccgttaaagtgccgctaccgctgatccaaatcgccgcgggcgccgcgctggccgccagtggctttcaggtcgattttgacccgcatatttttttactgctgtttatcccgccgctgctgttcctcgatggctggcgcatccccaaagacgcttttttccgcgatatgaagccgattttatcgctggcgataggcctggtgatggtgactattctcggtattggcctgtttattcactggctgatcccggctatcaccgtggcggcagggttcgccctcgcggctattctgtcgcctaccgatccggtggcggtatcggcaatgaccgccagctcgccgcttccctcaaggatggcgcatattcttgaaggggagtcgctgttaaacgatgcttcagggctcgtcgcctttaatttcgccatcgccgcggtgctgaccggcagcttctccccgggagacgcggtggtgaaatttttcctgatggccttcgggggcatcctcagtggcctcgtggtggtgtgggtcaccggcaaatgtaataactttctggttcggcgcacccgcgaggagccagccatccagatcctgatcagcctgcttatccctttcgccgcctatctgctggccgaggcgttccatgtctcgggcattcttgccgccgtcgccgccggcattgcgatgcattatgagcagctgtcggggccccggcttccggcgacgcgcatgaaaagcagcgcggtatggtccatgctgcagaccaccctcaacgggatgatctttctgatgctgggcgagcagctgccgcgcatgctcaggacgctgccggcggtagccagccaggccggcgtctcttcgccctggtatctgctgctgtacgccgtggccatcaccctggcgcttggtctgatgcgcttcgcctgggtatggctgtcgatgaagctgacaatttttcgccgcaaacgtcggggcaaggccatcaccgtccgtccacgcttcagtatcctcgccgtcatggcgctggcgggagtgaagggctctgtgaccctcgccggtattctgacgctgccggtggtgctggcagatggttcgccgttcccgggccgtgaactactgatctttctttcgatggcggtgatcctgatgtcgctggtggtggcggctatcggtctgccgtttatgactcgttatcttgccgatgatcttccgcatgacaccggtaaggatgacattggcgccgtgatgaccgaggtggccattaaccgtcttaacgcgctactggacgagccggtggaggatcccagtgagcaggccctgcgggccgatgccggcaatatgctgctcgagacctatcagcggcggcttcactataacgacaatgacgaggggcaggatgtcgggctggagctggctaagcgcgccaggctggagaaatatatgcaacgagaggtcattatcgcccagcgtcaggagctgttccggctgcgccgcgcccataacatcagcgatatcactttttatgaggtgctgcgggagatagatctgaaggaagagagtttacgctaaagccgcaaccgccggagggtggccattcgccttccggcagaaataccggcgctgaaaagcaaaaagcctgctcgaaagcaggcttttttaaatttggctcctctgactggactcgaaccagtgacatacggattaacagtccgccgttctaccgactgaactacagaggaatcgtgtgaacggggcgcatattaacgatgccatccggccttgtcaaagcctgattcaaagaattgcgttcgactgctgacaatttcagcaatcgccacccatgcgctgtttttttcaccatattgcaccgttgtagtgcgaaggtacccctaatggggcataccacaatctgcttaccgggcaaataaaaaccgaattgctatcactatcccttataacactgcctgcggcgggcgacagccgaggaaatgcaaagctggcaagcaaattgcaaaagccagtgcatcatactcccagcgttgacgctggcgttccttacaggaggcaaaatgaacttaagacgactgaaatattttgtgaaaatcgtcgatatcggcagtctgacccaggccgctgaagtcttgcatatcgcccaaccggccctcagccaacaggtcgcgaccctggaaggtgaaatggaccagcagttgctgatacgcaccaagcgaggggtcacgccaacggaagccggtaaaattctctacacccatgcgcgcactatcctgcgccagtgcgagcaggcgcagctggcggtcaataacgtcggccagacgctgcgtggtcaggtgtcgatcggcctggcgccgggcaccgcggcctccgccattaccatgccgttgctgcaaacggtgcgcaatgagttgcccgaggtgatggtctatctgcaggagagcagcggcacagcgctgaatgacaagctgctggcgggccagctggatatggcggtgctctatgagcgttcgccggtggcaggcatcgtcagccagccgctgctgaaagaagacctttacctggtcggcacccgcgactgcccggggcagagtgtggatctcacggcggtggcggagatgaacctgttcctgccgcgcgattacagcgcagtgcgggcgcgggtcaccgaggcattcaccctgcgtcgtctgtcggcgaaaattatcggcgagatcgaatccattaccaccctgaccgcggccatcgccagcggcatgggggcgacggtgttaccggaatccgctgcccgttccctgtgcggggcggcgaacggctggatggcgcggatcagcacgccttcaatgagcctgtcgctgtcgctgaacatgtcggctcgcggcagtctgtcgccgcaggcgcaggcggtgaaagagatcctgctgtctctggtgagccgcccatcgctggaaaaccgtgaactgcagctggtcagttagggtatattctcttaaggaataagttgctggtttttattatttgttacctgggacaacagactttaacaatagcagatacgttaagtccattggcccggaggaaagggtgaacttccagcagctgaaaattatccgtgaggcggcccgtcaggattacaacctgacggaagtcgcgaatatgctctatacctcgcagtcaggcgtcagtcgccatatccgggaactggaagaggagctggggattgagatctttatccgccgcggcaaacgcctgttaggcatgaccgagccgggtaaagcgctgttatcgattgccgagcggatcctcaatgaagccagtaacgttcggcggctggcggatctcttcactaacgatgcgtcaggcgtcttaactatcgccaccacccatactcaggcgcgctacagcctgccgccggtcattaaagctttccgcgagctgttctcagatgttcgcgtcgagctggtgcagggtaccccgcaggaaatcgaagcgctgctgcataacggcggagcggatatcggcatcgccagcgagcgcctgagcaacgatccgacgctggcggctttcccctggttccgctggcatcacagcctgctggtgccgaaggatcatcctttgacgcaggtttctcccctgacgctggaggcgatcgcccgctggccgttaatcacctaccgccaggggatcactggccgttcgcgcattgatgaggcgttcaaccgcaaggggttgatgccggatatcgtgctgagcgcgcaggattccgatgtgatcaagacctacgtggagctggggctgggcgtcgggctggtcgccgagcagtccggtgatgcccgggaagcggacacctttacgcgtcttgatacccgccatctgttcgatgccaataccgtgtggttgggactgaagcggggccagctgcagcggaattacgtttggcgctttatcgaattgtgcaatgccggactgtcgctggatgagattaagcgtcaggcgatggagccggaagaggccgcaatcgactatcagatttaaggaaatgctggccagcgggtcggggagtggaaataacgctataattcacacacgtgagtcgcgactgaggaagggaaaatgacgatgcggcgtgtgaaattactctgtacggcgctgatgctgcttgccagccacggcgcgctggccgtcagctatccgctgccgccggaggggagccgtttggtgggcagcgcatttaccattgccgttccggacaataacacccagccgctggaaagttttgccgcccagtacggccaggggttaagcaatatgctggaagccaaccccggggtcgatgtctatttaccacgctccggttcgacgctgaccattccgcaacagctgatcctgcctgacaccgtgcgggaggggatcgtcatcaacgtcgccgagatgcgtctctattattacccgccgctgggcaacagcgtcgaagtcctgccaatcggcattggccaggccggacgcgaaaccccgcgtaactgggtgacggcagtagagcgtaagcaggaaggccccacctgggtgccaaccgccaatacccgccgcgagtatgcgaaagagggcaaaaccctgccggcgctggtgccccccgggcccgataatccgatggggctgtatgcgatctacatcggcaggctctacgccatccacggcaccaatgccaactttggtatcgggctgcgcgtcagccagggatgcatccgcctgcgcaatgacgatattaaattcctgtttgataacgtgccggttgggacgcgggttcagctgatcgatcagccggtgaagtacagcgtggagccggacggcagtcactggctggaggtgcacgagccgctgtcgcgcaaccgcgcggagtttgaatccgacagaaaagtccccttgccgatgacctcggcgctgcgcgactttacccaggggccgggagtgagccctgcccaggtcgagcagaccctgcagcgccgctccggcatgccggtgaatatcagcgccacagcggcgcagggaagtttgtagcgggtcgtttagtctgattaacggctattgtaagaaggctcttttgctgtcgatgcattcaacgttgttgggaataaggatcgggaaaccgatccttaacttatcagcagtggcggtgatggcgttttaatgagggcgccaggagatgctcaggaggggatgataaagtctgcaaatatatctatggacttaatattgttactgaggatcttttttttggctgccattgtccatgaaagcgaagatcccctttatgatagccattatccagaatataagacggatgagttctgctgaatccctattgtcaaaacacgcctgaccacagtcactaccgctgaaccccatcgtcgttgataagcgaatcagggagctgggatgtcgttacttattgttggtaatggggacatgctgctgcatcaattcaacgatccagtcaataaaaacgcgcagcttggcgttgacatggcggttcggtggaaacgccaggtacagaggcattgggctaatccgccattgtgtaaataatggaatcaaagcgccaacggcctgatgcgctgccgccatatagttgggcagcgcaatcacgcctaagccaactaacccagcttcgaggtaagcattgccatcatccacggcaagtacgtagttgcccgtgatttcaatacgttcattctcactgcacagtaccaaaggatcaatcttactggtgcgcgaggacaagaatcccactatgcaatggtcagtattttgcagctcgcgcgggtgtgcgggagcgccaaggcgttccacatagctgggggcgacgtagacgccgatttgcaaatcgccgacatggcgtgcgattagggactggtcggtgatttgaccaccgcgcagaacgcaatccacgttgtcgccgatcagatccacttcccggtcgctcacacccatgtcgatctggatatcagggtagcgggcgtggaaagccggtagcgccggcaccagaataagacgggccagcggactcggtacatccacccgtagccgtcccctgggcgtcatcgccgcactggacaggctgttttcagcatcctccatgtccgccagcagacgaatgacgcgttcgtagtagaccgcgccatcgggagtcacaccgagcttgcgggtggtgcgatggagcaatctgacgcgcaggcgcgattccagctgctgaatgagttgcgtcaccgtagttttgctcatatgaagcgtttgggcagccttcgtgaagctccctgcctctaccacccgagcaaaggcgcgcattgcatcgaaacgatccatttcttatcctgtctttcatcgattgtttggatattacaaacaatgagggacaaagtcgcttgtttatccgcccgatctcgtcgttgtacagtgtctttacattcaccgggctgatttcgccccagcataaaggtacaaacatgacagcacgcgaagccgtttttcccttcggtcgtcaggcgctctatgagcgcaatcgttattcaccggccatcaaatccaatggtttcttgtttgtttctgggcaggtgggtagccacgaggatggttcgcctgagcacgatctgaaagcacaggtcaggctggcgttcaaaaatcttaatgctgtgctcgcagcggcgggctgcacgtttgaggacgtggttgatgttaccctctttgtcgtcgatcctgagtcaaatctcgacgctatctggagtatcctgccagaatattggggagaagcgccttaccctacgctgaccgggatcggcgtgacgtggctttatggatttaagttcgagattaaggttattgccaggctaccctaagcgttacgggtctttccgccagtggaaaatgcatttgggcagcccgcgctgtctgtaaaggtaactgccggatcgggatcgtctgctacgcagcggcagacccagcggttaccgccggatcgaaagtctgtagccataaggttgggagcagcatcgctgcttttcacctgcggggatcacatacggaaccttggacggtacctacggtacgatgctgcttatacccgctggcggagagatgtcagaagcggcggtgttgccgatcttttttggaaccgcgcatgattgccttacacccaggtatggtccggcacggttaaaccgcctttatttaagcctttgcgggagcgtggggctcacggccgttcagcttgcctcatagcaagaaaatagcacctacaccaggataagattgcatgcttggggagcggagaggatcacggaaagcaaaaatcccgctcaggtttccctgagcgggatttttaaatttggctcctctgactggactcgaaccagtgacatacggattaacagtccgccgttctaccgactgaactacagaggaatcgtgtgaacgaggcgcatactactggcctcgcatttttgtgtcaacactaaaattaacctgctgattcaaatggctaaatttagctcaacacgttgttttagtgaacaatgcgccgatcgccttcgtcctgcaggccattctcacgtctacgcgccagcggatcctggcggtaaaagtggcaaaaacgctgccacagggccgggaagcgaggcgcgaacagttcaggcgcactgaaaaaatattccgagaggacagcaaagcactctgcgggatcggtggcggcataggcgtcaatactggcggcgctttcgccgaccagatctatctcatcctgaatgttgttcatcgcggcgtggagatcgtgctcccagccggcaacttcacgcaacgggataagcggcacgccgctggcccggtcgccgttccgcgtatcaagcttatgcgccacttcatgcaccacaaggttaaagcctgacgcatcaaaagagtcttgaatatccagccagttcagcactacaggaccctgttgccagctttgtcccgactgtaccacccgctggttgtggaccagaccaatatcatcctcccattcatcatcgacgatgaaaggggcagggtagatcagcacttcatgaaagccatccagccactcaatgcccagctcaagcaccggcagacaaaagagcatagcaatgcgcgcctgatgcagcggggtcagctccagcccctgcaatgccaccagccgcttttgctgtaaaaaacgggcagccatctgcgtgagcttgtgctgctcagtggacgaaagatgggctaaaaccggaatggcaagcgcttgctcccagggcatctctgcgttgccggactcatcatctgctttccagggccatttaaacatcatattgctcgcaaagtcgtcacttgaacacaattaccgaaacgggagctattaaaatgccaaagatcctggcattatagcaaccatcacagcggagagatgccggagcggctgaacggaccggtctcgaaaaccggagtaggggcaactctaccgggggttcaaatccccctctctccgccacttttcttgctctaaccttcccttcaataacaccgttagcttcaggtataacgcctgcgctggggtatcaccatcatcatcgtcctggtttcagcgtagagtcgcggtagcgcgctttatccttttggcaccttatcgccgcttttagcccgaacgagcttaaacgcatcataaagagggaaggtacgcctggaaagcggcaatgtcgaaaagagtgatctcaacggagcgggaacataaaaaagcccgctgaacgcgggctttgacggggatcagaactgatagaccaggccgagggcgacgatatcatcggtcgcgataccgctgtttttgtagaagcggtcgtcttcatccagcaggttgattttataatccacataggtggacatatttttgttgaagtagtaggtcatgcccacgtcgacatacttgaccagatccttgtcgccgtagcgagaataggcgtagagatctttacccttcgactgcagataggccacggacggacgcagcggtaaattaaagtcgtcgaactgatactgcgcgaccacttcgaagttctgcgttttgttggcaattccgccaaaactatcgttgccatagaaggtcatgttgcgggtctcagcatacatggcggccagatagatgttattggcgtcatatttcgcgccgacggtccaggcatcggctttatcgccgttggcataacgctggctgctacgcgcggccgccagctggttatgggtacggtcagaagacgaatacgctgccccgaagctgatgcccatatcgagatcatagtagctggagataccaaaaccgtcgccattttcccgcgccagcttacgtttcccaccgttattagtgccttcgccagaaccggcgttttcattattaccctgatactgcagggcgaaatgcaggccgtcgacgaggccgaagaaatcgctgttacggtaggtggccacgccgttagtacggccggtcatgtaaacgtcggtctgggtgtaggtatcgccgccgaattccggcagcatatcggtccaggattcaatgtcgtagaccacgccgtagttccggccatagtccagcgacccgcagtcggcaaacttcaggccggcaaagccgagacgggtccaggagttcgcgccttctttttcgctggtgttcgcctgaatgttgtattcccactgaccgtagccggttaactcggaagtaatctgcgtttcgcctttcagaccaaagcgaacataggtctggtcgccgtcctctgaagcgtcgtcagagaagtaatgcaggccgtcaactttcccgtagaggtccagtttattaccgtttttgttatagatttcggcggcattagcggcgctagccattaataatgccggaaccatgagtgccagtacttttcttttcattatatattcccttttaataataatttctatgaattatgacaatccctccggaatgacgatccgatactaacgactaagttcatctttatttaaaataaaatatgtaaataaataatgttaaacatttcaaaatatttctaagtggttctttatattaaattttgatgtttgtgcaaaattcattattttcttatatagcaatgggttattgtatctttggttggttgttgttaattttatgaaataaaatgaacaaataacaatcaagcacattattcattatggaaatttattttgtgtgaatgtaaatatccagggaattatcaacccagcttgcgataattaaggaatgaatagctttaagcgtacgggagataataaggacatctcttcagcctgtgcgcattggcagcataagtcgcgagaaggcgcagaagacgaagatgtaactgctgcctgtgacgcaggttagcggtataatgtgatgcgtgtcacgttttgagtgacaatagtctgttgtgtcacggagaggaatgagatggaagagcaggcaaaacgcagcccgggagggaaacttgcgctctgggcgttgtatgctttttgcggatattgtgtctgggtcattgtgcgttactggtgggtagtgggaaaaattcacagcgttcccggcgccagcgtggagggtgattttggaacaacggccgggaaatggcttggcgccctgttgggtatgctggtcctcggcggcattggctctattctcggcgcggtcgtctggtatacgcgtccatcccgcggcgagcaggatcatcagcgctaaaattgctatgctcgaggctgaccctcagataaaggaaagcctatggacctggttgactggcagcaacgatttgagcgctggatactgacgcaccatgcgcaggatgacgccgcacacgatctgtcccattttcgtcgcgtctgggcgaccgccactcagctggccgcgggggaggaagtcgaccggctggtactcctcacggcctgctattttcatgacatcgtcagcttgccaaaaaatcatccggagcgaagtcgatcctcgatgatggccgccgagaaaaccctcgccattctgcagtcggcctttgctgattttcctgcggatcgttacccggcggtcagccatgccatcgaggcgcacagcttcagcgcggcgatcccaccgcgcacgctggaggcgaaaatagttcaggatgccgatcgactcgagtcgctgggagccattggtctggcgagggtcttcgctgtcgccggcgctctgaataccatcttgtttgatgccgaagatccttttgctgatcggcgggcgctggatgaccgcaaatatgccctcgaccatttccagtgcaaacttctgcgcctgccggaaaccatgcaaactgacaaggggaaagcgatggcgcagcataatgcccgttttctcgtcgaatttatggctaagctcagcgcggagctgcagggggagccgctggcgctggatgaagcggttttgcgccgctttgcaccgcaggcgtcaaccgaccggtgatttatggtactctctgccaaaatcgtccgcgttggttgaggatatgccgcaaaagttaagcaaggaacacaggtcgttgtcgttggctgaacaggccggggaagacgctgaggcgctgctgcgtcagctgatgacgatctacgatgtaaaaacgctggttgccgaactggtgagcgtcggcgaacagcactggagcgcggcgatcctcaagcgcgtggtggcgcttggccgcgtggcggagcgtttgcgcccgcaggaagttgctcatctggcgacgctcctgccttcgccgccggcccatcatccgcactatgggttccgttttatcgatctgtttgccggtattggcgggatccgcagtggttttgaagccatcggcgggcagtgcgttttcaccagcgagtggaacaagcacgcggtacgcacctataaggccaactggtactgtgatccgcagcagcaccgttttaatgaagatatccgcgatattaccctcagccaacgctctgacgttagcgacgaggaggcggcgcggcatattcgtgaatctatccctcagcatgatgtgctgctggctggcttcccctgccagcctttctcgcttgccggcgtctctaagaaaaatgcgatgggccgtgcgcatggctttgcctgcgaaacccagggaacgctgttttttgacgtggtgagaattatcgcggctcgtcagccagcgatttttgtgctggagaatgtcaaaaacctcaaaagccacgatcaggggcgcaccttccgtatcatcatgcagacgctggatgagctgggatatgaagtagctgacgcggggcataccgggccggatgacccgaaggtgattgacgggcgccatttcttgcctcagcaccgggagcgcatcgtgctggtgggtttccgtcgcgatctgcagctgcatgctggatttacgctgcgcgacatcgcggcgcagtacccggcagtgcggccaacatttggcgagctgctggagccgacggtcgatgcgaaatttattcttacgccggtgctgtggaaatatctttatcgttatgcccgcaagcatcaggcgcggggcaatggctttggttatggcctggttgaccccgccaatccccacagcgtggcccggacgctttctgcccgctactataaagatggtgccgaaattctcgtcgatcgcggctgggaccggccgctcggtgagaagcattttgacgatccgctgaatcaacagcggcggcctcgccggttgacgccgcgcgaatgcgcccggctgatgggctttgaatccccgcagggggcgcgttttcgcatcccggtatcggatacgcaggcctatcgtcagtttggcaactcggtggtggttccggtcttcgccgcggtggcgaaactcctggcgccgcgcatcgctcaggcggtggcgcgccgcgaagcggatgataatgatggcggatgttcacgataaagcgacgcgcagtaaaaatatgcgggcgatcgccacgcgcgatacggcgatcgaaaagcggatagcggcgctgctgaccggggcgggattcacctttgtcgcccaggatcgcgcgctgccgggacgccccgatttcgccttacccgactaccgctgcgttatctttactcacggctgtttctggcatcaccatgactgttatctgtttaaggtgccggccacccgcacggcattctggctggacaaaatcgccggtaacgtggcgcgcgacgcccgcgaccggcaaaagctggccgaagagggctggcgggtattaatcatctgggaatgcgccctgcgcgggcgcctcaggctgagtgatgcggcgctcacccaacgtctggaagagtggatctgcggcgccggacacgacgcgcagatcgatacgcaggggatccgcgaactgacgactacttcgacgccttacaaggagtagcctcgctgcggacggggaagagatatttccccagcgtcaccagcactacggcgaaaataatcaccgccagcgccagccactcaatgagcgacaggctctcgccgccgaacccagtaccgaggagcaccgcgaccaccggattaacataggcgtagctggtggcgaccgccggggtgacattgcggattaaaaacatgtaggcgttaatggcgatcagcgagccaaagatggccagataggccagggcggcgatcccggaccaggaagggacgcgggttaaggtttcaccgctcagccatgaggccgccagcaggacgatcccggcggcgagcatctcgattgcccccgccatcatgccggtcggcaatacgattcgcgaaccgtaaaccgagccgaaggcccagcttagggaaccaatcaggatcagcagtgcgccccaggggttgccgttcaggttgcctccgctgttgagcatcacgatacccgcaaggccaatggcaatgcccagccactccagtttacgggtggcgatgccgaaaaagcggctgaagcataaggtgaacagcggtacggtggcgaccatcaccgccgcgatgccggaggggacgtgctgatgttcagccagcgtcacgaagccgttgccaaccgcaagcagcaacacgccgatcagcgcagcgttaagcagcggacgacgcgccggtagcttatggccggtggccagtagccaccccagcaacagcacgccggcagcgagaaaacgaatgccggccatcattagcggcggccagctggcgaccccgacggcgatagcgaaataggtagagccccagatgatatacagcgcaaacagcgccccgatgagcggtaaaagctgacgggtagacatacttcctcacgacggtgcagagatagaaaggggacatatagtaaacgtgaaaactatcgtgctggcgagtggttaatttgcgtcaggttgttaaatttatattgactaattgtaccttgggcaccggccgttttttaacgcatactcgagggagacattgatgaaaagagaaggaaaatcattttggcaggaagtagtcttttaacattacttgatgatatcgccacgctgctggacgatatttccgtgatgggcaaggtagcggcgaaaaaaacggcgggggtgctgggcgacgatttgtctctcaatgcccaacaggttaccggcgtgcgggcgaatcgcgagttgcccgtggtctggggagtggcgaaagggtcgttcgttaacaaagtgatcctcgtgccactggctttgttgatcagcgccttcatcccctgggcgattacgccattgttgatgctgggcggcgcgtttctctgtttcgaaggggtggagaaggtactgcacagtctggaagcgcggaaacacaaagaggatcctgaacggcggcagcagcgtctcgccgcgctggcggagcgcgatccgctggcctttgagcgtgacaaagtaaaaggcgcgattcgcaccgattttattttgtccgcggaaattgtcgccattaccctcggcatcgtggcggaagctccgctgcttaaccaaatccttattctttcggggattgcgattctggtcactatcggggtgtatggcctggtgggggtgatcgtcaagctggacgacatgggttactggctggcggaaaaacgtagtgcgctggcgcagtggctgggtaaagggctcctggccgtcgctccccgcctgatgaaggtgttgtccatcgtcgggacgctggccatgttcctcgtcggcggggggatagtcgttcacggtattgcgccgctgcatcatgccatcgagcactggagcgcggggttgggtggggtgatggcctccacgctgccggtcgtcgccaacctggtgctgggttttatcatcggcgcggtggtgctggcgggcgttaaggcggtgagcagcctgcgtggcgctggaaagtagcatggcgaaacgcagcgtaacggcgccgcgtgttctaccctgaaaacgccccgggtatcgacagagaccggggcgctgacgccgcgaggtttgcgcaacgtactgcgagagaaagatggataagccactgcggttgaagttaaaaaagtgctaccacctggctcgcccggcgcatgtggttaacgcttgttttatcgcagtgctgtttttctccacgctgctgatctggcgtgaaatcaatgtcctggaagaggcctacgtggccaaccagcgtaacaatctggctaacgtcgctcaagaaatggatgggctgttgcagttcaacatcgacagaatgatgttttttcgccatgggatgcaggcggcgctcgaacagccgctcgatatcgatgtattgcgtaaggccagccaacgctatctgagccagcgccatcagcaggcctggcgggtggcgctaccgaatcggcgtacgctgccggtgtttggcatctcgggcagcgtcgctggcgacaaccctatcctgctggtggacgatccgctggcggctgatgaactaatggcgacgctcgagctgggctatctgctaaatctgacgcagcacgatcgcgatttcgccgagcggatgcagtatatctctcgtagcggcttttttacctcgaccctgccgctgcgggatgagtcgcaggtgataacgcactattcccaagccctcagcgctccgtggtttacccgccagacccaacgaaataatccggggcgaggcgttatctggcaaacctttcctgacgatgacccgcagctggaagagcaggtggtcaccgcttcgataccgttggattttgccggttactggcgcggcgtgctggcgatggatttctcagtcagtgaaatcaaagcgtttttggttagcgccatgcaggggggacaagagggagagtaccaactttatgatagccatttgaacctgctggcttcttccgcgccggggaatgtcctgaccctgctgtcgccgcgcgagcaggagctgctgagccgcgcgtttgtccatgataaccagggagggctgcgtctgctgacgcgctatatcagctgggccaaactgcgcaattttgacggcgtgctgctgcggatccacactctgcgggaaggcgtccgcgggaactttggcaccatcaccatcgccctgaccctgatgtgggtcctcttcaccttgatgctgttgctctcctggctagtgatccgccgcatggtccgcaacatgagcgttctgcaaacctctctggagtggcaggcatggcacgatgccttgactcgcctgctcaatcgcggggctctgtttgaacaggcgatggcggtagccagcgactgccagcgcagcggacggccgctggcggtgatccagctcgatctggatcattttaagcacatcaacgatcgctatggtcatcaggcgggggacagggtgctgtcgatggtggccagtacgctgtccagcgcggttcggcagggcgatctgctgggcagagtgggcggagaagagttttgtatcgtgatgccgaataccaccctgcaggaagcggcggcggtggcggagcgattgcgccagcgtatccagggacgggaagtctttttgcataacaacgtgacgctgcgggttagcgcctcgttaggggtgagcgccagcgaagagtggggggagtatcagtttgaagcgctgcagtcggtggccgatgggcgactctatctggccaagcaaaatgggcgtaaccaggtctgttttcgcagcgcagcgtgagtaaaacgtttcgatgccgattggcaaaatgagaattatcttaaagtgatcgcaggcgatcgcgctatcgaatgaaaccggtttgcggctaagccttctcacatcagccttgcagcccgataagtcatcaagcgccaacattctcaatattttgcgtcatgaatatctcttgtcatgcaaaataattgaggataatgtttcaacgcatcggatttcccggtgtaacgaattttcaagtgcttcttgcattagcaagtttgatcccgactcctgcgagtcgggatttttttcgcctgccgctaacggttggcttcactggcgctgaaatcgtgaatatcgagttcgaatgcctccgccagctcacgccaggtatgtgacccgcggccatcgatgctggcgcgctgcgggtcgtccagcatgcgatggacttcgctttcgctgatctcattaattgccgccagcagggcatctacgttgacgtcaaggtcgtccccggtctggcctgttaattggtgcttcatcattacccccctcgctgagcgttgctcaagcctctctaagtatagtcggtctaaaaaagcgccagtcacgtgccgcgacgctgcgagttgcgtggttttgttctacactggctgaaaatatagaggagatgattatgcaggtgaacgatcgtgtcacggtgaagaccgacggtggcccacgtcgatcgggggtagtgctggcgattgagtcgtttagtgaaggaacgatgtatctggtttcactggaagactatcctctggggatctggttttttaatgaaataggccacccggatgggattttcgtggaaaaagaggtctcgtaaaactgaactggcgggagcgccgccagtttgtttcagcgcatatttacctgaataccggaggtgatgttttcggtcagccgaacgatatgataaatcacctgcttattatgcgtttgtattttctttttaatattgcctttatgcgacgataccgtcttcgctttgatgttcatttgcgttgagatttgcgaagtaccatgcccggccatccacatttgcagcatatttgattctgttttactcagtgacaatgtcggtaaagttaactgccctacactggtgtttttgtatttaagataattaaccagaataacatcaaggtcttttggggttatcgattttgaactgattagcagattcttccgtacccgcaaatagcggtcaaaatggatgttcgccagcgacataaagataacaaacagcgtcgccgggttttgcgtaatgatctggcgaataatgccattactttcatcatcatgcacgaaacagtcttcattcagaaacaccaccgccgggcaacacgacgtacagtgtttctgcagatccgcagcactgttgacctcaacgatttcctgttttttaattccccgactggtcagatatcccgtcaatcccaaccgggtatagctgcacaaatccataatcatcgttgacatgacccatcctcaatcaacacgtaacgatatacacttcgcactggctgtgcgaagcagtccttgcgggcgataataatagtaggtttagaaagaacccattagctccattaaactattccgcatctatgcatataatttgccaggaaaactcttaaagtaaagtcaagaaccggtagtgtgaccgaattaaaaacaaaaagtgcccatagatgctatggttacgcgcccagtattcttttactttcagaatttccttacttcaaatgaaacccacgttagcggttgctggcttgctcgcttatccctttgcggtgggggtggaaggcttaacgctttaatgccacaatacttttttatcggcttgtgggatgaatgatgaaaaagttattttttgctggcatggtggtggcgctggccggttgcgtacaggttgatcgttatgaggacgtcgttaaagcgccggcgccggctggccttgcaggtttctggcaaacgaaagggccgcagagcgcgatgatgagtcctgacgccattgccagcctgattgtcaccaaagaaggggacaccttcgactgccgccagtggcagcgcgtgattgcgcagccggggaaactgatgaatcgtgacagtgagatctacaacgtgaccgcttccctggacatctatcctgtcgagcgcgagggcaacacgatctcctacgatcggatgacgttgtcccgtgttgaacgtctcactccggagtgcgagaaggcgtgggccaaagcgcgagcgacggggcccgtcagcgcgccggcctccacgcgctgagattttggcgggccatagctggcccgcccgacgtcagaggactacaatacctcctctaacacccacacgctcacgctccccccgttacatgtaaaggtcgcgcagccttcgccatcggtttcgacaatctcttcccggttaccgagaaaatcccgccagcgtttgttgccatagttttcgcccagcgtcagcgccttttcgccctcatcgccattggacatgatcaccacgcagcctggatcgtcgtcagtaccgctacgactaaaggcgatgcagttaggatgatcgaaccaaagggtttgcacgccatgggcaaaacgctgacgggcgtcgatcagctcgtggagttgttcgataacgggcatctcaatggcataggtctctccgtcgccgccggtatcctcataggaagcgccgaagagatcggcataaaagaccgagggcacgccattctcccgcagcaggatcagcgcataggcgaggggcttgaaccagggttcaaccggcgcctcaagggcctgcagcggctgcgtatcatgattggtgaccagagtgacggcatggaaagggtcggcttcgaccagcgtcccgctgaaaatctggctcatgtcataatcgcggccctggcgcgacgcttcatgaaatttcatctgcagtggggcatcaaacagcatcgttttgccctcgaccaggtcgatatactgctggagcttctccacttcatgggaccagtattccgctacaataaacagcggctgcggggccacctcctgaacatgctcgatccacgctttataaaaccaggcggggatatgcttgaccgcgtcaagacgaaaaccgtcgcagccggtctgctccattacccagcgcgcccagtatttgatctcctcggtcactgcatgattgcggaaatcgatattggcgcccatcagatagtcaaagttgccgagctcatcatcgacctgttcattccagccttcgccggtgtaatcgttgacgattttaaacacaccgtcttccgtcgggttctcgatgtggtcaatgccgctaaaacatttgtagtcccagacaaactgcgaatactgtccggcgcgcaccgggaaggtgtagcgcgtccatgcctcgcactcaatgatctcctcgtcaatttgcgtacgatcctgctcatcgacgcgctgaacgcgcagagcctctttttcatcagcgcccattttatggtttaccactacatccagcagcacggcgatattgtgctccttcagggcgttgatcgccgccagcaactgcgctttgtcgccatattttgtggcgacagaccctttttgatcaaactcgccgaggtcaaagagatcgtaggtatcatagccgacggagtaaccgcccgaggcgcctttgtaggcgggtggcaaccagaccatattgatgccgatttcattcaggctgggcgccagcgcttcgacctcaggccacagctcgccgccggtggggtagtaccagtgaaaacattgcaataaggtggggtttttcatcttccatgctccagacgtcaacaggctgacctttgcagtatgggagatatccagcaaaaagggtgaggaaagccctgattttcgctataccctaaagcggatcatatataataaatttgcataagatgtagcgtaacgatgttggtgtcagggcgttaagcgccttacactacaggaaaatcctaaccttcggggtatctatgaaattagcacttctgggtcgtcaggcgatgatgggcgcgatggccgttgttttgatggctggcgtcagcgtgagaacttttgcggcggaaaacctgctcaatcagattaaagagcgcggcaccctacgcgtgggcctcgaaggcacctaccctccctttagtttccagggggatgacggcaagctgaccgggtttgaagtggaattcgctaacgaactggcgaaacatcttggcgtgaaggccgatctcaaaccgaccaagtgggacggtatgctggcctcgctggactccaagcgtatcgacgtggtgattaaccaggtcactatctctgacgaacgtaagaagaaatacgatttctccaccccatataccgtctccggcgtgcaggcgctggtgaagaagggtaacgaaggcgtgattaaaaccgcggcggatctgaaaggcaagaaagtgggcgtcggactgggcactaactatgaagagtggctgcgtcagaatgtccagggcgtggacgtccgtacctatgatgacgatcccaccaaataccaggatctgcgtgtaggccgtattgacgccattctggtagaccgtctggcggcgttggatctggtgaagaaaaccaacaatacgctggcggtaaccggcgaagccttctctcgtcaggaagctggcgttgcgctgcgtaaaggcaacgacgacctgctgaaaacggtagatggcgcgattgcagacatgcagaaagatggcagcctgaaggcgctgtccgagaaatggtttggcgctgacgtgacgaaataacggacagcggtgaaaaaaggcgctcctggaagcgcctttttttatttagcgcgtaactgtgtgcataatgaagcataactgagtcaggaggggccatgtcactgcaaaacttaacccgctttccgcgcctggaattgatcggcgcgccgacgccgctggagtatctcccgcgtctgtccgatcaccttgggcgcgaaatttttattaaacgtgatgatacgacgccgctggcgatggggggcaacaaactgcgtaagctggagtttctcgccgccgatgcgctgcgcgagggcgcggataccttaatcaccgccggcgcgatccagtctaaccatgtgcgtcagacggcggcagtcgctgcgaaactgggactgcattgcgtggcgctactggaaaatcccatcggcacccgggcggagaactatctgagcaatggcaaccgtctgctgctggatctctttaacacccaggttgagatgtgtgatgccctgaccgatccctccgcccagctcgatgagctggcgacccgcattgaggcgcaggggtatcgtccgtatgttattccggtcggcggctccaatgccctcggcgcgttaggctatgtggaaagcgcactggaaatcagccagcagtgcgaagacgcggtggcgatctcgtcagtcgtggtcgcctccggcagcgccggcacccatgccggattggcggtcggccttgaacagctgatgccgcaggcggaactgattggggtgaccgtgtcgcgctcggtcgctgaccagttgccgaaagtggaggcgctgcagcaggccgtggccaacagtctcgagctacagtcgaaggctgaaattatactgtgggatgactactttgccccaggatacggtacgccaaacgaagatgggatggccgccgtgaagctgctggcgcagctggaaggtattttgctcgacccggtctataccggcaaagcgatggccgggcttatcgacggcatcacgcagaagcgctttaaggatgaagggccgatactgttcgtccacaccggcggagcgccggcgctgtttgcctatcatcctcacctctaatacagaaacgacagcatgcaagaaagtatccaactggtcattgattccgccccttttctgctgaaaggggccgtctttacgctgcagctgagcattggcgggatgtttttcggcctggtgctgggctttatcctggcgctgatgcgcatgtcgccagtctggccggtaaaatggctggcgcgcatgtatatctccattttccgcggcacgccgcttatcgcccagctgtttatgatctactacggcttgccgcagttcggcattgagcttgacccgatcccggcggcgatgatcggcctgtcgttgaatactgcggcctatgcggcggaaacgctgcgcgcggccatcgcctcgattgataaagggcaatgggaagcggcggccagtatcggtatgacgccctggcagacgatgcgtcgggccattttaccccaggcggcgcgggtcgctttgccgccgctgtcgaacagttttatcagcctggtaaaagatacctcgctggcggcaacgatccaggtgccggagctgtttcgtcaggcgcagctaatcacctcgcgaaccctggaggtcttcaccatgtatctggcggcctccctgatctactgggtaatggcgacagtgctctcctcgctgcagaattattttgaaaaccagctgaaccgccaggagcgtgatccgaaatgagtgcgatagaagtgaaaagcctggtaaaaaaattccatggccagacggtgctccatggtatcgacctggaggtacagaaaggggaagtggtggcgatcatcggccccagcggctcgggcaaaaccaccctgctgcgtagcatcaacctgctggagcaaccggagagcggcactatccgcgtcggcgatgtgacgatcgacgccggtcgcagcctcgggccgcagaaagggctcattcgccagctgcgccagcacgtcggctttgtcttccagaactttaatctgtttccccaccgtacggtgctggagaacattattgaagggccggtcatcgtaaaaggtgaagataagcaggagtccatggcgcgggcgcgcgaactgctggcgaaggtggggctcagcggaaaagagaatagctatccgcgccgtctctccggcgggcagcagcagcgagtggctattgcccgcgcgctggctatgcgtccggacgtgatcctgtttgatgaacccacctcggctctcgatcctgagctggtgggggaggtgctcaacaccatccgtcagctggcgcaggaaaaacgcaccatggtgatcgtgacccatgaaatgagtttcgcccgcgacgttgccgatcgggcgatatttatggatcagggacgcattgtcgaacaaggcgaggcaaaagcgttgttcgcttcgccccagcagccgcgtacccgtcagttccttgaaaaattcctgatgcagtaaagcatgggctggcgcggcggctcagcttcgcgggagccgccgcgtttagcccactctcgcggcggggtaacgcccccgcgacacgtctttgcgctattgactcccacggccgtatacaccgcttcccatcgcccttggcagggtgtagaacatgatgggagaaaaacgctatgtttctgtgcggcgagcgggaaaatggcaagccttcagactaataaatgcgacagctacgatattttatacatataaataagatttatgtgttagttttctgtatttataataatgattatcaatcaggagttatttgcacagctatgagggacaatgattttttcagctggcggcgggatatgctgcaccaatttcagtccatggccaccggcgaggaggtttataatctcctgcaacgtgaaaccgaagcgctggaatatgattactacacgctttgtgtgcgccacccggtgcctttcacccgcccccgcgttacgttccagtcgacttacccccgcgcatggatgtcgcactatcaggcagaaaattatttcgcgatagatcctgtgttacggccggagaattttatgcgtggccatctgccatggaacgacagcctgtttcgtgatgcgccggcactgtgggacggggcgcgtgaccatggtctgcaaaagggcgtgacgcagtgcctgacgttgccaaaccatgctcagggatttctctctgtctccgcgaacaatcgtctgccgggcggttaccctgaagatgagcttgagctgcgtctgcgaacgctgactgaactaagcttgctgacgctgctgcgtctggaagatgagatggtgatgccgccggagatgaagttcagccgccgcgaactggaaatcctcaaatggacggcggaaggaaagacttcggcggaggtggcgatgattctctcgatttcggaaaatacggtgaatttccatcagaagaatatgcagcggaaatttaatgcgccgaataaaacgcaaattgcctgctacgccgtggcgactgggctaatctgaatgcgcctgccgttctgcgtgtcagacgtgataccggctgtcagtgatactttcagccggcacaggattactgccgataggcttgtttaatctgcttaacggtgctggagaatacggcggcctgagcctcatcttccatctgtgaaatctgcttttccattttaataatcacgcgccccgcatccgcctggcccatcgcctgcagcatcagcgtaatcatcgctttcaggcaggagacttcctgcgccagttcctgcttattttctgcagtggaaaaatctggtgtgctcatcgatatcctcgtttactcgctgcgctattgcgctctagtcaatgtgaaggccgcgcagtataccacaagcgacagaaaaaaaaggtgtgcttaatttctgttctctcatctgagctgtgaatgttttgatgcttcggataatacgtaatagccgtcggcaagccaataatttcccccatctatttagctcgttaataattgttacatattttgcttcgtatttatgcgctacgtaatctgttgtgttttttgtgccttctgtatgagtattgttaaaaaataagagccgggcaactgactgttctcaatgactttccacttagtgtgcacagacattgccataaatgagagccaaatcgaggcgagggcatttttttgccttttaaaatagcaataaaacccggtaatatgtgggagataaagtatcagtagcgttatccctcattctggagattattcctttgatcaacgttcttcttgttgatgaccacgaactggtgcgcgcagggatacgacgcattctggaagatataaaagggattaaagtcgctggcgaagcctgctgcggcgaggacgccgtcaagtggtgccgggctaattccgcagatgtcgtcctgatggacatgaacatgcctgggatcggtggtcttgaagcgacgcgcaaaatcgcgcgctccgtggcgggcaccaaagtgatcatgttgaccgtgcataccgagaatcctttacctgccaaggtcatgcaggcgggcgcggcaggctatctcagtaaaggcgccgcgccgcaggaagtggtgaatgccatccgctgcgtcgcgtccgggcagcgctatattgcctccgatattgcccagcaaatggcgttaagtcagattgaacccgaaaagacagaatcgccgtttgccagtttgtctgaacgcgaattgcagattatgctgatgatcaccaaaggtcagaaggtgaatgagatctcagagcagctaaatctgagtcctaaaacggttaacagctaccgctatcggatgttcagtaaattaaacattcatggcgatgtcgagctgacccacctggcaattcgccatggcctgtgtaatgcggagtcgttagcaagccagtgagtgatgtttttgacgcaaaagctttcctgaaaacggtgaccagccagcccggtgtgtatcggatgtatgatgctggcggaaccgtcatctatgttggcaaagccaaagatctgaaaaagcggctcagtagctacttccgcagcaaccttgcgtcgcgtaaaacggaagcgctggtagcgctgatcgcgcaaatcgacgtgaccgtcacccacaccgagacggaagcgctgctgcttgagcacaactatattaagctgtaccagccacgttacaacgtgctgttacgcgacgataaatcgtatccttttatttttctcagcggcgatactcatccgcgtctggcgatgcatcgcggcgccaaacatgcgaagggcgaatattttggtccttttcccaacggctatgccgtgcgcgagaccctggcgctgctgcagaaaatctttcccatccgtcagtgtgaaaacagcgtctaccgcaatcgctcccgcccctgtctgcagtatcagattggtcgctgcctggggccgtgcgtggccgggctggtcagcgaagaagagtatgctcagcaggtagagtatgtgcggctgtttctcgccggcaaggatgaccaggtgctgacccagctcatcgcgcggatggagaaggcgagccagaacctggagttcgaagaggccgcgcgcatccgcgaccagattcaggccgtccgccgcgtgacggagaaacagtttgtctccaacaccggtgacgacctcgacgtgatcggcgtcgccttcgatgccggcatggcctgcgtgcatgtgctgtttatccgtcagggcaaagtgctgggcagccgaagctacttcccgaaagtgccgggcggcaccgagctgggagaggtcgtggagacctttgtcggccagttctacctgcagggcagccaaatgcgcacgctgccgggggagattttgctcgactttaaccttggggataagacgctgctggccgactcgctgtcggagctggcgggtcgtcgaatcaatgtgcagactaagccgcgcggcgacagagcgcgttatcttaagctggcgcggaccaacgccgcgacagcgttaacgaccaaattgtctcagcaatcgaccattcatcagcgtttgcaggcgctggccagcgtactggagctgccggccgtcaagcgaatggagtgttttgacatcagccacaccatgggcgaacagaccgtagcatcctgtgtggtgtttgatagcaatggcccactgcgcgcggagtatcggcgctacaacatcaccggcattacccctggcgatgactatgcggcgatgaatcaggtcctgcgccgtcgctatggtaaagcgattgatgacaacaagatcccggatgtgatcctgatagacggcggcaagggacagctggcccaggcgaaagccgtgtttgctgaactggacgtcccctgggataaacatcatccgctgctgctgggcgtggcgaaaggtagcgatcgaaaagcgggtctggaaacgttattctttgagccggaaggggaagggtttagcctgccgccggattcgccggccctgcatgtgatccagcatattcgcgatgaatcgcacgatcatgcgatctccgggcatcgcaaaaaacgggcgaaagtgaagagcaccagctcgcttgagactatcgagggggtggggccgaagcgtcgtcagatgctgctgaagtatatgggtgggctgcaggggctacagcaggccagcgtcgaagaaattgctaaagtaccgggcatctctcacgctctggcagaaaagatcttctactcgttgaaacattaggggctctgtagcaacatagggctaatttttacttacaacagatagttacccgtcactatgcaatttaatatccctacgttgcttactctgtttcgcgtcatcctgatcccgttttttgtgctggcgttttatctgccctttagctgggcgccgtttgcctgcgcgctgatcttctttgttgccgcggtaaccgactggtttgatggtttcctcgctcgtcgctggaatcagagcacccgttttggcgccttcctcgacccggttgccgataaagtcatggtggctatcgccatggtgctggttgccgaacactatcacacctggtgggtcacgctaccggcggcgaccatgattgcccgtgagatcattatctccgcgctgcgtgagtggatggcggagctggggaaacgcagcagcgtggcggtctcatggattggcaaagtgaaaacgaccgcccagatgaccgccctggtatggatgctgtggcgtccttatccgtgggtggagtgggccgggatcgcgcttttcctcgtggcggcggtgctgacgctgtggtcgatgctgcagtatttgaacgcggcgcgcggcgatttgcttgatcagtgatcgtttcgccgttattttcagcaaacgatacaaagttgcgaaaaataccgttgactcaccgcgagagataagtagaatgcaacgcatcgaacggcggcacagtcttccagacgataacaaaatcaagtgattagcaaataacttgatgatgcgggaatagctcagttggtagagcacgaccttgccaaggtcggggtcgcgagttcgagtctcgtttcccgctccagattaacagcatcggcagttgcgggtgcttcagtattaaaggcgcgttagcaaagcggttatgtagcggattgcaaatccgtctagtccggttcgactccggaacgcgcctccactttatatcccgagcccggatggtggaatcggtagacacaagggatttaaaatccctcggcgttcgcgctgtgcgggttcaagtcccgctccgggtaccattgggaaatacagaataatcaaagcaataagcagtgtcgtgaaaccacctacgggtggtttttttgtttctgtactttcgctttctgatacctttcccgccagcctgacgccacggcgtttttcggttaactcttgccttacagtcaatttctcatttgtcccaggacaaaacgatcgcgccttgctactatcaaacggactctcagcccagcctgccggaggcatcatgttcactggactttgcgcatttcctttgacacctttgcatcagcaaaattttgatgaaaaagcgtttattcgtattctcgcccgtcttaccgatgccggagtcgactctctgggcatcttaggttcaaccggtagctacgcttatctcagccgtgagcagcgcagacgagtggtgcaggtggcgaaggcgcatgcggggtcgatcccgatgatggtcggcgtcggcgccattgcgactaacgaggtgctacgcctggtggaggatgctcaggaggcaggggcggatgcgttattactgccgatgatgtcctatcagccgctttccgcggaggagatctttgccttttacgaagaggtctgtcggcatgtctcggtgccggtttgcctgtatgacaatccccgcactacccacgtaatgctggcggatgagctgcaggggcgcatcgccgccttgccggccattgcctcgattaaaattcccggcctgcccgcgccacaggcgagcgaacgtgtagcggccctgcgtcagcatcttccctctcgcgttacgcttggcgttagcggcgatgcgtgggccactgccgggttgcaggccggctgcgaagcctggtattcggtctgcggcggactctttccccgcttctcactggcgctggtaagagcgatacgtagcggcgatgtggcgcagactgcggcactgaatgagcagctggcccccctatggcgatgctttgatcgctatggtggtagcctgcgagtgatagccagcgccgcagcgatgctcggactctgcgatccagactcgcttccccgtcctttgctttcgttaggggaggaggcctgtcgtgaggtggcgtcggcgctgcgcggcctggcctgatcgcgtatcgttgacaccggcgcaataggtatcgccgggtggctttctgtcggcaattcggctactgtaggcccgatttttgccatgcgagcctgtgaatgaataccggacctttgaacgaaaacgaactggaatggctggatgacactctggcgaaatacgccgccgaaggcgccattctggatgtctctgaactggatggcctgctgacggcgatcctctctgcgccgaccgacatcgaacccgctcagtggctgctggcgatttggggcggggcggataatgtcccgcgctgggccaacgatcgcgagcgcgatcgctttgtcaatctgacgctgcagcatatgagcgatatcgccgaacggctggagtcttatcccgatcagttcgaaccgctgttcggcacccgcgaagcggaaggtcaggagctgaccatagttgaggagtggtgctttggctatctgcgcggcgtggcgctgagcgactggtcgacgttgcccgctgaactccagccggagctggacgctatcgcgctccacggcagcgaagaacagtttagcgcgctggataatctgacggcggatgaatttatcgccagcatcgagcgtatcacgccggcggcgctggcgctttaccagtactggatagcgaatccgcagccggtggaggccccgcagccaataagaaatgaagcgaaagtcggacgcaacgatccctgcccatgcggcagcggtaaaaagtataagcagtgttgcttagcgaaatgaacaaggggccagcaggccccttttttatcccaccgcgggcaacaacccggcagcgatgctgaactgaatagccacgatgccgatcccgcacagcagaaccagccatagcgtcggtgcgccgccggcgacccgccaggtagcctgcggatgctctcggcgactcttcatgaccagcagggccggcattatcagcgccagcacggctaatgccaccccggcgtagccgagggccatgacgaaaccgcggggatagaacagggcgaacgccagcggcggcaggaaggtgattatcccgctctgcagacgcccgccgacgctgtttttacgctgaaacatatccgccagataatcaaacaggccgagcgagacgccgaggaatgacgtcgccagcgcaaggtcggcaaacaggtgaacggccagctccacatgcggtgacgccaccacttcgcggatcgcctccagcaggccgttcagaccagcgttatttgccagcagggcggtaaaggccggggcgtcgatactgcccagcgtcgccagctgccagaaaatataggccaccagcggaataaagctgccgatgataaatacccggcgcaatttgcgaatatccccccccagatagctgacgatgctcgggacgctgccgtgaaaaccaaaggaggtgaaaatcaccggaatggccgacagggccaggccttgctcaaccggcagcgtcagcaggttcacctgatgaatgtgcggcatcagcagggccagcataatcaccaggaagacgattttggcgctaaacaggaagcgattgaacaaatccaccagcgcggtgccaatgcacactaccgccccgccgaggagggtgaagatcagtacgcctgcggccggcggtagctgccagtccagccactggttgaggctggaagcgagtaattcaccggcgccactgatataggctgccgtgagggcgtacagcagaaacagcatgcagaatccggtaacccactgcccataacggcccagatagcgcgccgccagagaaccgagccccatatcggcagggacatgctggtagacttccagcagcaaaagggcggtatagcacatcaatgcccacaaggtgaaaagtaaacccaacgtgacggtaaagccgacgcctgcggcggccaatggcattgccaacattcctgcaccgatggtggtgccagctacgattaaaatactgcccagagtgcggtttttcacgcttttcgctatccctacagcaaataacaataaattatgccgcgcagagtaggggatattacggctttcgtcaaatcgggattacaagttgtgtaatgaaatgtttacataataagagggcgaaagcctgcgctggcgcaaggcgcgggttgacggtctggcctaagctggcggtttttgcaggaggggttatgtcttctattcatggtcatgaagttttacagatgatgctcgcctcgggtgaatcctggacggtcgcctcgctggaggccgccattcgccgccgctttggcgaagaggcgcggtttcacacctgttcagcagagaatctaagcgccgcacagctggtggcgtttttagagaaaaaaggcaaatttattgccagagaggaaggttttactaccgcagaaaataagatctgccgacattaagagggccgcgacacggactgtcgcggcgcgggggattaattctgcgcgtcgagggtagccagctctttatcgataaagtacagaccttcgccgctttttccagcgagggtcagtttatcgatcaccgatttaaataatttctcttcttcatgctgttcagcaacataccactgcaggaaattaaaggtcgggtaatcctggctggtcatggccgcgtgcgccagttcatttattttttgcgtgttcagctgctcatgctcgtaggtctggcggaacagctcgtcgagtgaggcatattcggcaaacggggaggcgatagcgttgatccgcggcaggctgccggtgtcggttagatagtcgaacaggcgctgcatatgggtcatctcttcctgagcatggcgacgcaggaaggccgcggcgccttcaaaactgtggtaactgcaccaggcgctcatctgctgataaagaagagaagaatagagttcaagattcatctgttcattgagtttgtcaatcatgtccgttttcagcatcgttgcactcctggaattaaataatagatgttattggctgccactataatttgttatttaattatttgcaaaaagtaaatttaaaaatgttttatttaaaatgctaatgggaataacacgcattggcagtttaataataaatgagaatgcttttaatttattattcattattgcctgggcggtcagggttttgtcgccggcgggtggtaagggaggacgaagcggatacgccagcatgcagagggctgaggtcaacagacaaagggagcctgcgaaagtgtgaagcactgcgtaaattttaaaacaacttttcataaaatttgaaagtttgttttcaaggtagtagagtgcagtcaacgccaatgacattctgcgggcaggcccgcacagcattcaggagagtaaaccatgaagattgcactgatgatggagaacagccaggcgaacaaaaacgccatcatcctcaaggagcttaacgcggttgccgacgaaaaaggattcccggtctataacgtcggcatgagcgatgagaacgatcatcatctgacctacatccatcttgggatcatggccagtattctgctgaattcgaaagcagttgacttcgtggtcaccggctgcggtaccggtcagggggcgctgatgtcgctgaacatccatccgggcgtggtctgcggctactgtatcgatccggcggatgcgttcctgtttgcccagatcaacaacggtaatgcgctgtcgctgccgtttgccaaaggcttcggctggggcgccgaactgaatgtgcggtttatctttgaaaaagcctttaccggccgcaacggcgaaggctatccgccggagcgcaaagaaccgcaggtgcgcaatgccgggatcctcaaccaggtcaaagcagcagtagtaaaagagaactacctcgataccctgcgcgccatcgatccgcagctggtgaaaaccgcagtctccggcccacgcttccagcagtgcttcttcgaaaactgccaggataaagcaatcgaagactttgttcgccagatcgtcgcttaaccgtcatcagggccagcgccgctggcccttccgtcgtttattttttcttctatttcttcttctccgacacgctgctgccggccgttttggccagatgcaggctgtcgatcatccctaccagacagatcaaggcgataaacacaaacgacaggcggaagctgatccccggtagttcagtaagatgcagccagtcgccgacctgctcgcccaggcgaatgccaatcgccccgagcgtgatccccagccctaccgccagctgcgacgcggtactgaacagcgtattggcatcactcatctgcgcggcggggacatcggcaaaggccagcgtgcttacaccggtaaactggattgagcgaaacaccccgccgagataaaggatcagcatgatggcccagaccggcgtctgcggcgtaagcagcgcgcaagccagcagcgaacagacgttcaacgcaccattgatcagcagtagccgacgaaagcccagccagcgaatgagcggtgtggtggcgggtttaatggttaaattaccgacaaacaccgccagcaccagcaggccggaatgaaaaggatccataccgaatcccacctggaacagtagggggagcagaaaaggcaccgcgctgatggaggcccggaacaacgagccgccgtacattgtcacccggaacgtcggcacctgcagggcgtcgagacgaaccataggcgccgccgcccggcggaaatgacgaatggaatataacagacagccgaagccaagcgcggcgagagccagcgtcggccagatctgcggctggcgatcgccgagccgctccatcgcggtcaccagactgaccatcgcgaccgaggtagtgataaatccgctgagatcgaaggagcgccgttccgtttcgcgaatatcagggataatgcgcagcgaaaggatgatggcggcaaggcccagcgggacattgataaagaagatccagtgccagctggcgtagcgggttataaagccgcccaaaggcgggccgataatgggggccaccagcgccggccaggtcagggtggcgatggccttgatcagctggtgtttcggcgtggtgcgtagcaccgcaaggcgaccaacggggaccatcagcgcgccgccgactccctgaaggatacgcatggcgacaaagatatgcacctcggtggagaggccgcagaagaccgaggcaagggtaaagatcgccagggcgagagtaaaaatagcccgggcgccgaagcgatcggcgatccagccgctggccgggatcaggaccgcaagggtaatcagataggcgctgatgccgatattcagttcgaccgcggtgacgccaaaatccctcgccatatcgggcagggcggtggcgatcaccgtcccgtcgagaaactccataaaaaaggcacctgccaccagcagcgccggcgctgaaaaagcacgttcatcgcgggaagagatcgcggtattcatgttgtcactgccatcaagagtgtgatcctgtgcaaagcggcaggagacgacccgccagccagtagagtagataaaaaaacctgcgacggcaggttttattatcgttaacgatttagggtactattacgctcctgaaaaaaggagtaattaatgtctcaacatcttaccgaacacgacgagctggtttccgatgtggttgcctgccagctggttatcaaacagatcctcgatgtcattgacgtcattgcgccggtggaagtgcgtgaaaaaatgaccactcagctcaaagctatcgacttcgccagccatccggcctctgccgatccggtgacccttcgcgcggtgcaaaaagcgatcgcgttgattgagctgaagtttactccacaggaagaaacgcattaataccaggcctcgccggataccggcggggccttcttctttaatgggaaacgacggtctgcgcaggcgcaggggcagcatctttgaacaatttgctgttgccccagcactcttcgtagcgatggccgaccagatcctccacgataacccgcacgtccggcgcaatatcgctaattttgccgcccgcttttatccgcgcgacttcctgcagcaccaccagatgggccttccggtccagcttcatctgcttgctgaagacgatggcggccagggctaatgcgatcaccccgacgcagaataccactgcgatagcggtcaccgcgctttccggttggctgtgcgcttttgactggaaaccgtagaagctcaggatcgcccccatcgagaacaccacaatcgagcgcagaatttttcctgagaaggtcatggcgccggcatagatcccttcccgccggcgtccggtgtagatctcatcgacatcggccaggaaggtgtaaacggtccagggtatatagtaaaccccgccggtacccaggccgaacagcacggtaatgccgaacatcagcactgtcgccaggccggacggtagatggaaaaaccacagcgaggtatacagcagaaccgcgaaaatgacgatccccagcgccaggatatagggtttgctgaagccctttttcacgcacaggccgataaacagcgccgtagagatcagctgcagaatcgagttcaggctgttcagcccggccaccatcgctggatcgtgttgtagaacgaagatcacgaaataggtgaagatggaggcaaacagccattccgcgccaaagccgcacaggtacataccaagatgtttgcggaatacgcgtagataaaaagtcgaacgcatatctttcgccagcgacagcagggtgctcagcagtccttttttcgcgctggtttccacctcttccccgcgctcacgctcccagctgcacaaccacaggcaggaaatagcgacgatcaggatcgcgccataggtcagaccggtgaggaagaaaggggtggcagaatctttgccatacagcagaatgaactggccgggaataaacgccgcgaggaagttggccagcttaccaaagatagctttatagccggtcagttttgaacgcagtgagaaatcatcggtcatctctgtcgccagcgtttcataaggcaccatgatagaggtgtagatgatctcaaacaccacataggtgctaaggtagtaccagaaactcaggccttccacccacagcagcgggtagaacatcatcagcggaataccgattagcagaaagaaacgccggcggccgaagcgcttgcccaggcgcgttttgccaaaattatccgtcagatagcccatcagcgggttgctgatagcgtcaatgatgctggcgacggagaagataaatgaggcctcgatcagcgtcaggccgcaaaaggtcgtataaaaatagagtagccatgcgccgcttatcgccagtgcgccgctccctaacagatttccgccgccgtaggctaactgatggcgtaacaagatcggtcttccctgcagcccttcagaggctgaagccgtgtatctagccataaaaaataaacctcgtgttttatatttttgaaacactgtttttatatttctttatggttcgtcaaaaagtgaccgcgctcactaatcccccttatggggtaacggtgatgagggaatgggatcgagttaaaacttttttattcttgaaaggaataataggggagaaaaaatagacggaatggattaataaaccgggcggggcagcgcagacgcgctccccctggcagagcgataaaggcttgattaatgcgctttctgcgcttctccaacgatagccatcagacgccgatcggtctgctccatcccgagaccggctttatcggcattacgaatttcctcaagcacgctttgcaatagcaggccatcctgctgctgctcttccgccaacagcgtgagaaaccgccaggtgctgtcatcgctttgcgctttggcttcctgagcgagaccgctcagcagacgactgcgctgttggtaatcgctcagggtttgggtaaacagatcttccagcgaggtgcactcagggttacaggcgtggtcgggattgacgatcggccagctgccggcttttttcaggtagtcaaatacgcgcatggtgagggtgatgctgctttgcgcgcgggtgcgcagaaacgtcgcggcgccgtcgaagcgatgtcgggcgcaccactcacttaagttcaggtaaacgttagaggcgtgaaactcaagattcatttgggtgtttagcttttgtgccattcctggaactgccataaaaaatatccttattaaccgggaaggggttactggtgcgcgtcagcggatcctgcggataactacaagataaaatagtgacacgcggcactgttgcagaataataaaactctacacattccgtataagtcgggtattttttccatttgccgacgatttaagaatactcgcttaacgaaattaagaaaactctcaagcgcggtaatttacgttttgttacaccattatttttgcaaactaccagggctgagattgtgcgccgttggcaggggctcgctggtttcagattggttataagatataagtatttgactacgagattcgtcgtagaagagaacggaataagttatttcattagtaatgtttcaggttgatgatcattatttttattttttgttgcaggcgcttttataaagaggaatatattttttctattcggaataaattacgccaaagatccgttttttcgcgatattaagcgggccatgtggctcagcggtgcgaggtgggttgccatttgagtggcgcacaggcgatcgcccgtagcagcgccgtcaatcgctgatgataacagtgctgtaacccaccgttaaacatcctctgacaacacaaggataagcctgctgatggtatagatgatcctgctatgccccggtaaaattgtatgacaattgtgtcattttttatgtcattttttgctaaatgtatgtacgcaattactgtaattccgcgatgtgataatgctctcgtatggagaaataatttccgggtattactactctaacaacggcagtggggaatgcgatttttctaatgccttgttttgatgccgattaaattgttaattccgatttttccctacatgaaagcgaattaaagctggagtttaccatgcacaaatttactaaagcgctggcggccattggtctcgctgcggttatgtcacaatcagctatggcggaaaatcttaaactgggttttctggtgaaacagccggaagagccatggtttcagactgagtggaaatttgctgataaagcaggaaaagatttaggctttgacgttattaaaattgcggttccggatggggagaaaaccctgaatgccattgatagcctggcggccagcggcgcgaagggctttgtcatctgtacccccgatcccaagctcgggtcggcgattgtcgccaaagcgcgtggctatgacatgaaggtgattaccgtcgatgaccagttcgtcaatgcgaagggcaaaccgatggagagcgtaccgctggtgatgatggcggcgagcgaaattggcgcccgtcaggggcaggaactctataaagagatgcaaaagcgcggctgggatgtcaaagacaccgccgtaatggcgatcaccgccgatgagctggataccgcgcgccgtcgcaccaccggctccatcgatgccctgaaggcggccggtttcccggacgcgcaaatctaccgcgtgccgacaaaatccaacgatatcccgggagcgttcgacgccggtaactcgatgctggtccagcatccgcaggttaaacactggctgatcgtcgggatgaacgacaacaccgtcctcggcggcgtgcgcgcgaccgaaggtcagggctttaaagctcccgatgtgattggcatcggcatcaacggcgtggatgccgtcaacgaactgtcgaaggcgcagccgaccggcttctatggttctctgctgccaagcccggatatccacggctacaaaaccagcgaaatgctctacaactgggtcaccaagggcgtcgagccgccgaagttcacggcggtgaccgatgtggtgctgattacccgcgataacttcaaagaagagctggcgaaaaaagggctgtaacagcctgattaaactggcccccgccgcggcgcgggggctgagtgcagaagagcggagtcgttatgcaacagtctaccccttatctctcatttcgcggcatcaccatgacgttccctggcgtaaaggccttgtccgatatcagttttgactgctacccgggacagatccacgcgctgatgggcgaaaatggcgcaggcaaatcgacgctgttgaaaattctcagcggcaactatatcccgaccgcgggccatctgcagatcggcggccagcagatggcattcgccaataccatggaggcgctgaatgccggcgtggcaatcatctaccaggagctgcatctgatcccggagatgaccgtcgccgaaaatatctatctcggtcagctgccgcacagaggcggcatcgtcaatcgctcgctgctcaactatgaggcccgcctgcagctggagcatctgggtctggatatcgacccggagacgccgctgaaatatctctccattggtcaatggcagatggtggagattgccaaagcgctggcgcgtaacgccaagattatcgcgttcgatgagccgaccagctcgctctccgccagagagatcgacaacctgtttcgcgtcatccgcgagttgcgggaggagggaagggtcatcatctatgtttcacaccggatggaagagatttttgccctcagcgatgccatcaccgtctttaaagatggccgctacgtttgcacctttgacgatatgccgagcgtcagccacgacgccctggtccaggcaatggtaggccgcaatctgggcgatatttatggctggaagcctcgcccctatggcgaggagcggctgcgcctggaagaggtcaaagcgccgggcgtgcgcacgccggttagtctctcggtgcgcagcggtgaaattgtcggtttgttcggactggtgggtgccgggcgcagcgaactaatgaaaggcctgtttggcggcacgcagataaccggcggtcaggtgtatatcgatggccagcccgtctccattcgcaaaccggcccaggccatccaggccgggatgatgctgtgcccggaggatcgtaaagcggaggggattattccggtgcattccgtgcgcgataacatcaatatcagcgcccggcgcaagcatattcacgctggctgcctgatcaacaacgcctgggaggcggacaacgccgatcaacatatccagtcgctgaatattaaaacgccgggcccggaacagctgattatgaacctgtcgggcggcaaccagcagaaagcgatccttggccgctggctgtcggaagagatgaaggtgatcctgcttgatgagccaacccgcggcatcgacgtcggcgccaaacatgaaatttacaatgtgatctatggcctcgccgcctccggtgtcgccgtggtgtttgcctccagcgacctgccggaagtgctgggcgtcgctgaccgcatcgtggtgatgcgcgaaggacaaatcgccggcgaactgctgcatgaagaagccaatgaacagcaggcgttaagccttgcgatgccaacagtgagccaggctgtcgcctgagtaaggagtaaatgatgtcatcagtgactacgtccggggctacccgctcaacctttagctttgcccgcatctgggatcagtttggcatgctggtggtgtttgcggtgctgtttatcggctgtgtgatttttgtgcccaactttgcttcattcgtcaatatgaaagggctggggctggcgatctcgatgtccgggatggtggcctgcggcatgctgttttgcctggcctccggcgattttgacctgtcggtggcgtcggttatcgcctgcgccggggtcaccaccgcggtggtgattaatctcagcgaaagcctgtggctggggatcgccgcaggcctgttgctgggggcgcttagtggcctggttaacggctttgtcattgcgcgccttaagatcaacgcgctgatcaccacgctggccaccatgcagattgtccgcggcctggcctatattatctccgacggcaaagcggtggggatcgaagatgaacgtttcttcaccctcggctacgccaactggtttggtttgccggcgccgatctggctgaccgtcgcctgcctggtggttttcggattattactaaacaaaaccacctttggccgtaatacgctggctattggcggcaatgaagaggcggcgcgcctggccggcgtcccggtggtgcgcaccaagattattatctttgtgctctccggtctggtatcggccgcagcggggatcattctggcgtcgcgcatgaccagcggccagccgatgacctcgattggctatgagctgattgttatttcggcctgcgtgctgggcggggtgtcgctgaagggcgggatcggcaagatctcctacgtggtggccgggatcctgatcctcggaaccgtggaaaatgcgatgaacctgctgaatatctcgccattctcacaatacgtcgtgcgcggggtgatcctgctggcggcggtgatcttcgaccgctacaaacaaaaagccaaacgtgcggcctgaattttaacccaactttttagtttacagagtaattgccgccagcgcccgtttcgctggcggtaactatcaaaaatggcgaggttggtcacactgtctatacttacatggctcacatataattaacaaccagcttcggctggccatgataaggaggaaacagggtggataaccagatatctgtaccgcctgcgctaaccggaaactacgcttttttctttgacctcgacggtactcttgccgatatccagccgcaccccgatcaggtggtgatacccgacagcacgctgcaggcgctcaatgcgctggcccagcagcaggggggcgcggtggcattgatttcagggcgctcaatggctgaacttgacgcgctaacccatccctggcggctaccgctggccggcgttcacggggccgagcgccgggatatcaatggtaaaacctacatcgtctctctgccgacagcgctgcgcgatgagatcgcggctgagctgacgtcggcgctggaagcgctcccgggatgtgagctggagagtaaagagatggctttcgcgctccactatcgccaggccccgcagcagcagagcgccgtgctggagctggcgcagcggattgttcagcgctatccgctgctggcgttacagcttggcaagtgcgtggtggagattaaaccccgcggcgtcaacaaaggggaggcgattaccgcgttcatgcaggaggcgccattcgccggccgcgaaccggtatttgtcggcgatgatttgaccgacgaggcgggattcagcgtcgttaatcaactgcagggaatgtcggtaaaagttggcgccggggaaactcaggcgcattggcggttggcggatgccgccgctgtaaggacgtggttgcaacatctggcgtatgacgcgcaaaccgaaaggagggatgaccatgagtcgtttagtcgtagtctctaaccgtatcgccttaccggacgataaaaaatcgagcgctggcggtctggccgtcggcatcctgggggcactgagagcggcggggggtctgtggtttggctggagcggcgagattggcgatgaccagcagccgctcaagcaggtctcccgcgggaatatttcatgggcgtcgttcaaccttaatgaacgggaccatgatgaatactacaaccagttctctaacgccgtgctgtggccggctttccactatcgccttgatctggtcagctttcagcgcgaagcctgggagggatatctgcgggttaacgccatgctggcggacaagcttctgccgctgattgagccagacgatacgctgtggatccatgattaccatcttctgcccttcgccagcgagctgcgcaagcgcggggtgaacaatcgcatcgggtttttcttacatattccgttcccgacgccggagatttttaacgctctgccgccgcacgctgagctgctggagcaactgtgcgattacgatctgctgggcttccagaccgaaagcgacagaaccgcttttctcgacagcattgctatgcagactcgcctatccgacctcggcgataaacgctatcaggcatggggtaaggcgttcagtaccgaggtttatccgatagggatcgatccggacgaaattacgcgcaacgctaaaggtccgctgccgccgaagctagcccagctgaagaacgagctgaaaaatgtgaagaatatcttctccgtggagcgtcttgactattcgaaagggttgccggagcgattcctcgcctacgagacgctgctcgagaagtaccctcagcaccacggcaaaatccgttatacccagatcgcgccgacctcccgcggcgatgtgcaggcctatcaggatatccgccaccagttggaaaccgcagccggacgcatcaacggacagtttggtcagcttggctggacaccgctctactatctgaaccagcattttgatcgtaagctgctgatgaaggtcttccgctactctgacgtcgggctggtgacgccgctacgcgatggtatgaaccttgtggcgaaggagtacgtcgcggcgcaggatccggataaccctggcgtactggtcctgtcgcagtttgccggggcggcgcaggagctgaccagcgccctgatcgtcaatccttacgatcgcgacgaggttgccgccgcgctggatcgcgcgctcagcatgccgctggcggaacgtatcgcccgtcattcagcgatgctggacgtgatcagagaaaatgatattcataactggcaggcgcgctttgtcgaggatctgcagcatatttcaccgcgcagcgaggagagccgtctgcgggggaagatagccaccttccctaaactggcctagttcaggaaaagggctaaccggcgttagcccttttcaagggaaaccaacaggacatcaacgccgcagctgccgacgatacttttcgccgagcaggtggcgcgtgaaaagagggaatggttgtgattgccgcagatcaccagatcaacacggtgcgagcggcagaagtccttaatatgatggcctagctcgccgcaggcgatggtcattctttctattgggtagtccgcgtggcgagcaagttcattgagaaactcccgcgtctcttcctgcatcacttcgcgcagattttccatcatcggtgcggcgaactggttatacagctccggatccgtagcgagagtgattaagctcactttcgcgttaacggggcgggctatcgacaccgcttttttaattaacacctgactctccggcgttggcgcgacggcaaccagcagatgggtataaggcatctggcctccttgagatacgcggaataaccctttcttccattctttactcctgtttccccgactgcgcaagggccgatcccgggatttgcgagcctgttcgttagtcggcgaccttccaaccagatcacatcaatgaacctgtcttttgattaaaaagaaatgctgttttataaatgagtgaagtggcgacgtcatctctttgtcattttgccaccggcgactgttccgtggcaaaagtacaaaggtaacctcctttcacagcttttagtgtagccaggtacccactcccttccggtggcaaatccggaacgattgtcggcgttcttttaaaaaaaagacacaggatcacggcgatgaaaacacgaaaaattggactggctaactatctggcctacggcgcgggcgattttctcggcgccggcacgacggcgctaaccgccgcatggctgctctacttttacacgaccttttgcggactgaccccgattgaggccacgcttatttttgctgccgcccgcgtgctggacgcggtggtaagcccgctgatgggctttctcaccgataactttggcaccacctggcttggtaagcgcttcggccgcagaaaatcctttattctgctcggcatcccctgcgtattcagctattcagcgatgtgggtcggcgagatgggcttctggtactacctggcgacctatctgctgtttgatatggtctataccatgattctggtgccctatgagacgctggtgccggagatgaccgatgactttaaacagaaaaccaaattctccggcgcgcgcatttcgatggcgcagatgtcggcgattttagcctccttcctgccggggatccttctctcctggctcggcaaagataatgccagctcgttcttctatgccagtctggtgttctcggtgctgtgcgcggtgatgctgactctggtctggtgtttcacctgggaacgaccgcgggaggcgtggtcggaagcggccctgcgggcggaagcggaaaaacaaaacttaacccttgctcagagcctcaatcgcctggtgattgagctgagttctacgctgcggataaaaattttccgccagcacctcggcatgtatctggggggctatatcgcccaggacgtcttcaatgccgtgtttacctattacgtggtctttgttctgatgcaggaagccgccgtcgcctcgaacctgctggggacgatggccatcttccagtttattgcagtaatcgccatgatcccgctgtgcattcgttttggccccgcgccgtcgtaccgcatggtggtggtcctgtttggcctgagctcactctcctacgcgctgctctattacgccggactgagcgacgtctattccttattgctgctcatctctgctgtcgccggactgggacgcggcgggataaattacgtaccgtggaatacctacacctatattgccgacgtcgacgaagcgatcaccggccagcgccgggaggggatttttgccggcatcatgactctgacccgcaaagcctcgcaggcgggggcggtgatgctggtggggatcattatgcagttgtcggggtttgtttccgggcaaaaaatacagcctgaaggggtcagccataccattctgctgatcctcagcgtcggcactctggtggtgttagcctgcggcttcctcgtctcgctgcgcttcaagctcaacctgcacacccacagcgtcctgcgcagcgagaccctcagaatgcgcgagctcggctacgctcagtcggaacagaccagtgcggaacaccgcgcggtggtcgagctgctggcggggatgccttacgactgtctgtggggcaataacaatattggctatctgaatcgtcataaacctgctgccccggcgctcattaagggcggcgctttgaattcgacatatacccgaggttaacaacatgaaagtttggccggtcaaacatagcccattattgcgtcagcctgagcgttttatcgcccgtagcgaactgcaggcgctgatccgcaacgtgacgcaaaacctggtgaatattaaggatgagagcgggcaatttttactacgcctggatgacgggcgcgtgattgataccaaaggctgggccggctgggagtggacccacggcgttgggctgtacggcatctatcagtattaccagcaaaccggcgatatcgagatgcgtgatatcatcgatcgctggtttgccgaccgcttcgccgagggagcaacgaccaaaaacgtcaatactatggccccgtttctgaccctggcttaccgctttgaagagaccggccgtatggcgtatctgccgtggctggagagctgggcggagtgggcgatgcacgagatgccgcgcaccgagcagggcggtatgcagcacatgactctggcggaggagaaccatcagcaaatgtgggatgacacgctgatgatgaccgtgttgccgttagccaaaattggcaagctgcttaaccgcccccagtatgtggaggaggcaacctaccagttcctgctccatgtgcagaacctgatggaccgggagaccgggctgtggtttcacggctggaactatgaggggcggcataactttgcccgggcgcgttgggcgcggggcaacagctggctcaccatggtgatcccggattttctggaactggtggatctccccgaggggaatgcggtacggcgctatctgattacagtcctcgacgcacagattgccgccttagcagaatgccaggacgacagcggcctgtggcataccttgctggacgacccgcactcttatcttgaggcctcggcgaccgccggctttgcctacgggattctcaaagcggtgcgcaagcgttacgtcgggcagcactacgccggggtggctgaaaaagcgattcgcgggattgtgcagaatatttcgccgcagggggagctgctgcagacctcatttggcaccgggatggggtcagatctcgacttttatcgccagatcccgcttacctcgatgccctacggtcaggcgatggcgatcctttgtctgacggagtatctacgcaagtacttctgagcagggcgccccgctggcgaggcgccgaataaaactaacccggctttcgccgggttgcttgttacatacgctcgacggtttcgataccgagggtatcgagacccagcttgagggttttcgccgtgagcagcgccagcttcagacggctgttgcgggtctcttcgctttccgcgctgaggatcgggcagtgctcgtagaagccggagaacaggcccgccagatcgtagaggtaggcgcacatcacgtgcggcgtcccttcgcgagcgaccacggagagggtctcttcaaactgcagcaggcgcgcggccagctgagcttcgcgatcttcggcgatgaccaccggcgcgtcgatcatcgcgttttcgtcgatgccggctttgcggaacacggagagcacgcgggtataggcatactgcatatacggcgcggtgttgccttcgaacgccagcatattatcccagtcgaagacgtagtcggtggtgcggtttttcgacaggtcggcatatttaaccgcgccgatacccaccactttcgccagattttccagctcgtcagccgacatatccgggttcttctcggccaccaggcgacgggcgcgctccagcgcttcgtccagcagatccgccagcttcacggtaccgccggcgcgggttttaaacggcttgccgtctttccccagcatcataccgaacatatggtgctccagcggcacggagtccggcacgtagcctgccttgcgcacgatggtccacgcctgcatcaggtgctggtgctgacgagagtcgatgtagtagagcacgcggtcggcgtgcagcgtttcatagcgatacttcgcacaggcgatatcggtggtggtatagaggtagccgccatcctttttctggatgatgacgcccatcggttcgccctccttgtttttgtactcatcaaggaagaccacggtagcgccttcgctctcaaccgccagccctttggctttcagatcggcgacgatccccggcagcatcgggttgtacaggctctcacccatcacgtcatcgcgggtcagggtgacgttcaggcgatcgtaggtgatctggttctgcgacatggtgatgtcgaccagcttacgccacatctgcaggaagtactcatcaccgccctgcagcttaaccacgtagctgcgcgcgcgctcggcgaaggcttcgtcttcgtcatagtgctttttcgcttcgcgatagaaaccttcgaggtcggccagggccatctcgccggcgttttcctgctgctgtttttccagatacgcgatcagcatcccgaactgggtgccccagtcgccgacgtggttggcgcggatcaccttatgacccaggaactccagggtacggactgaagcatcgccaatgatggtcgaacgcagatggccgacgtgcatctctttcgctacgttgggtgccgagtagtcgacgacgatagtctgcgcctgcggtttcgtgacgcccaggcgctcagattgcagcgcgcggttgacgttgtccgccagaaacgcggggtcgaggaaaatattgataaagcccggcccggcgatttcaaccttgttggcaatgccgttgaggtcaagatgagacagtacctgctctgcaagttgtcgcggcgccatacccagctttttggcgacagccatcacgccgttggcctgatagtcgccgaactgaacgtttgctgactggcggacctggggttcgcaatcggcaggggcgcctgccgcgatcagggcctggctgactttttctgagagaagagcctgaatattcaccggaataccttacgtgtaatgcgcctgcccccgagggaggcggcgccataatgtggacaaattagggcgggagtatactgcatttgtccccgtccgtcagcattgcgcgcggcgcgccggcgtgcgcaatccatcgccggtcagttgcccatcagcggggcggcggttggtccgcaggccgaaacacggtaaattaccttttcattactgacgagcattattgacgagcaaacccatggcaaactggcagcaaaatgaacaactggccgatattacggcggatctcccgcgattttccgatgcgcttgagcgcttcactgcgcgactgggactggagatcgccgggctcgacgccgaccatatctccctacgctgtcatcagaataccactgcggaacgctggcgccgcggtctggagcagtgcggcaccctgctgtcggagaatatgatcaacggccggcccatttgcttgttcaaactggcggagccggtctgcgtggcgcactggcgcttccatatcgttgagctgccgtggccgggtgaaaagcgttatccccatgaaggctgggagcatatcgaaatcgtcctgcccggcgatccggcaaccttaaatgcccgcgctctggcgctgctggccgatgacggactcagccagccggggatcgtggtcaaaaccagctcgccgaaaggggagcatgagcgcctgccgaatcctaccctggcggtgaccgacggcagcgtgacggtcaaatttcatccgtggtctattgaacaaatcgtcgccagcgagcaagccgatacgtaacagtgtgaagccgcgcggcgtctgccgcgtgaaattgtgacatgctgcaaaggttgtctggatcagggagagaggaatggcggtactggaagtgtgttgctacagcgtggcgtgcgcccgggaggctgagcgctacggcgccgatcgtattgagctctgcgccgcgccgcaggaagggggattaaccccctcttatggggtgctggtctcggcccgcgaggcgattactctcccggtgcatccgatcgttcgcccgcgcggcggcgatttctgctacaccgaggaagagttcgccgcgatgcttaacgatattcgcatggtgcgggatctgggctttcccgggctggtgaccggcgtgctggatgctgatggccaggtcgatatcccgcggatgaaaaaaataatggccgcggcggggccgctggcggtgacctttcatcgcgcgttcgatctgtgcgctgacccgcgtcaggcctggaaaacgctgggtgagctgggggtcaaacgtatcctgacttccggtcagcaatcctcggcggagaaaggtatttcattaattacggaacttattgccgcaggggatactccaatcattatggccggtgcgggagtccgcgccgcgaacctgccgctgtttctgcaggcgggggtgaaagaggtccatagctctgctggccactggttgccgtcggaaatgcgctttcgtcatccgggcgtttcgatgtcagccgatcccgatgccgatgaatacagacgctacgccgtgaatggcgcagcggtggcggagatgaaaaggattatctccgcctggagaagttaaacggttttttgctgcacatcatgtcgcccaatatgatgattgcccgtaccaggcccctgcccattaaacaggggcctttttttatctcgcttttttcgccagcgactgctgggtttccggtttggtggcaatgatcacagcccgtaatggcgccggatatccttccaccgttttgcgctgatcctgtgggtcgaggaaatcggccagcgattcggtcgtcatccattcggtgcgtcgctgctcctctgtcgaggtgacgcaggcgtcgacgatgcgcacgtcaataaacccgcacttctccagccacattttcagggccgccgccgaggggataaaatagacgttgcgcatttgcgcatagcggtcgcccggaaccagcaccgtattttcatctccttcaaccaccagcgtctccagcaccagctcgccccctggcgccagctgatctttcagctgccacagatggtccagcggcgagcggcggtggtagagcacgcccatcgagaacacggtgtcgaaggcctccagcgccggcagctgctcgatgcccagcggcagcaaatgcgcccgctggtcgttaccgagcagcttacgcaccgcttcaaactggcacaggaacagctgggtgggatcgataccgaccgccagatgtgcgccggcgccgatcatccgccacatgtgatagccgctgccgcagcccacgtcgaggatagtccggccagtgagatcggacaggtgcggcagaacgcgctcccatttccagtcggatcgccattcggtatcgatattgatgccgtacagcgaataagggcctttgcgccacggcatcaggtttttaagcagattttcgatccgccgctgatggccttcgctgagcggcgtttcgctctcggcggtgacgctgtgcagaagatccagacgccagggcgttaactccggcagaaattctacggcgcgctcccattcacgaaacttgccgtgcagggcatcgcgctgccaggcggctacctgggcaggcagcgtctccagccagtgagacagcgggcttttggcgatcagctgatagaagttactgaagtcgatcatgcctgctccccggctttaacagccaccagcgagccaaagttaaagcactggaaccacagttcggcatgttcaaacccagcctgacgcaggcgggctttatgggtttcgacagagtccgtcagcatcacattttccagcatgctgcgtttctggctgatctccagttcgctgtagccgttggcgcgcttaaagtcatgatgcatattgaacaacagttcgccaacgtgggcgtcttcgaagctgaatttttccgagagcaccagcgcgccgccccgattcagcccctgatagactttattgaggatcgcctggcgatcgcccggctcaaggaactgaatagtaaagttcaggatcaccagcgaggcgttttcaatggtcacgtcgcggatatccccttcaatcacttcgaccggcgtcggcgctttataagcgtcaatatggcgacggcagcgctccaccatcgcgggagagttatcgatggcgataatgcgacagcccggatggctaatattgcggcgcacggagagggtggcggcgcccagcgaacagccaagatcgtaaacctgagtgttgggctgaacgaagcgctcggccagcatgccgatcatcgagatgatattggagtagccgggcacagaacgctggatcatatcggggaagacttcagcaacccgttcatcaaaggtccagtcgccgaggctggcaatcggcgcggaaaaaagcgtatcgcggtgagacataacgttaaacccgaaaaaacgaaaacggcgtattgtgcgctaacggagggagaaaaccaactcccagggcatataccaaagattggccagcaccattagcaacaacgcgcaccaagtggcgctcatgccggagcggcgccagtagtagacgcggtgatgaaagccccaggagtgcatcagtcgcccgacaatcaataaaatcccgcaaacgtgcaccatccaggtctgagcgccgttcatctccataaataacagcaaaatgaggccaatcggcacatattcgacggcattgccgtgaacgcggatggcaacctgcagctcgctaaagccgccgtcaccgtagcctacatggtattgggtgcgcagacgcaccacgtcaaatgagaacttcactaacaataacgcacctaaaacggcatacagcgcgctgaccatacgaaaactccctttaactctggcagatggctccggatatgatagcaggatatcagaaaagagaagattgctgcggaatcgacggcgcatttcctgccgccggcagggcagcgcgcaggtcaccccacagggtatccaccagcgccggggcgaaggcaatgtccggagtatgcaggaacaaccacggggtccccgactgatgccacttcgccagggtctgcagccagacgcgaaacagttcccggttatgggccatatcgtcaccgccgataaagcgcaccattggctgtcgggcggtcatcaccgcatgtaccggcaccttcggtttcttttgttgggcatcgatcatcgccggactggtggccgcagcgctatggaccgggcggctgtcgagaattacacctttcttatgatacacttcttcaatctcttcataactcatcataaacaccatgccaaaagcaatctcatacatacgattttctactaagattcaatcagttggtgattctactaagcgtcaaagcaagtacattaacgactggttaaaaaggaatcctgattactatttagacgaatcactacgctttcaggatttgggtataagcggcttctctggcgctaatgctaagtcaggggctttcagtgaatttctagccgctgtggaatctggctacattgaagcgggttcagttcttcttgtcgaatctctggacagggtaagccgtcaggacatcgacacagcaggtgagcagcttagaaaaattctcaggtctggcgttgaagtggtgacacttgtcgataacgagtggtacacgaaagaaagtctcaaagattcactcagcatgattaaagcaatgctggtgatggaaagagcacacgaagaatcagcgatgaaatcaacccgtttaaggtctgtatgggctgctaagagggaaagggctgctaaaggtgaaatcatgtctaagcgttgtgcagcatggttaaaggtctctgaagaccgttcacactttgaattcatccctgagaatgtgaaagctgttcaacgtgtctttcagctacggttagagggcttgtctcacgtcaagatagccaaacaaatgaatgatgaggggttttccactctgaaccagttcaaatccgttacaggtggctggtctcaatcgtcggtcactgagttactttcaaaccgttcagtgattggtttcaaagttccttctaaatcaatggctgtaaagggggtctcagagattcctaactattacccgtcaataattaccgatgagcaattctacgctgtacagcagcttaagcagggttcagggcgtaaaccttcctctgacctacctttgctaacaaatctcttcaagggcgttcttaggtgctctgagtgtgggtttattgtcgttgttgcgggtgtctctgctaagaggtctggtatatacaaatgctcgatgaagagtgaagggcgctgtaatagtgttgggttcagcagattacagactgaccgcgcattggttcaggggctgctttacaacactaaccgccttaccctgaatagttataaagcctctgctataggctctcttcaaagtgagttagaacagcttcagaaacagcgtgagaggctcattaagctggctatgctggcagatgataccgaatcaatggctaaggatttgaaagccctgaatagtcaaattaaggacgctgaaaaggctgtctcagaggttcaccaacgagagcaatcaagccagcttgagacaatcagccatttggatttgactgtgaagaaagacagggtggaggctcaaatcatcatcaaacggatagtgaaagagattcgactaaacacggctcaaaagaagtgtgatgtcttcttacacaacggcttgaaattgttaaatttcccactggatagagttgttgatggggaaattttcttagaagtcttacccctgttagaagctgatgagttcgactttgacacttacaggattattgagtaagccctctaaagggggtaacttattgctcaaacaaaaatattctcaggggtagttatgtctaacaaaaaacatagcgtgttcaaagctcttacaatgggctttgaaaaggttcttgatgagcgtggttacgataatggtgcttattacgtcaaggatggaaagatttggatttttgatattgtagctttaaagcaaaaattaggtgtctcttcaaatgaagaattagaagcacaagattatgatgttgagacatatctttcactggaaaaagaaccgaatgaattagcagcactatatgaagatatggctgttgaagatggtgaaccagtttatcttgaaggtggaatgtatctttaccctgatggctcaattcgttgattagtcccttttaaagggatgcctcaattggtacgagttcggtgaatgaataggggcgaaacagccccttatgaaggtttaatagttatccctcaccacttcatcatacctttcaataaacgttaactgtttattgctgtcacgataagtatcaagccatttatcaatagcttcatcaaataaaaataaaaaatctgtaaagttcaaataaacaatgtcagcgtgacactgagttgggtggcctcgtttgcaaacagcaatactaaggcggcgctctttgccttgtgtcaccttatgtgaattcaggttagtcatgtgtaagagtgagtttcttaactcatataattcatcagatgttatttcaagttttttaatttctgagtaagtatcaagccagttttggaaaacccttttggaattaccatattcaatgtaagcaatggtgtcaatgaaggacattaacagcttgaaactagacaggtaatgtttttcattaaaaagcattctgatgggcttcatatggtcgtcattgagtaatttcttaatatgaaaaccatcttctttcatgtaatcatcaaggtaatcagggaagcttttaacaccttctatgtggtgatggggcatgtgcttatgccttagttgttcagacaatgatagttggatgtgataatgaagtttaccttctaccactggcgtaacaatagataaagggtgaaggggggcattcatagcctgtagagctaattcaaaaggggctaaattgtttcctaccctcatattcgaattatatcttgccagagttagttgtttgtcaccatcaagcaccgaagggtgaatgtcatgaaatgacctacaggaggctaaatcaatgtctaactgttttcttaaaaattccagcttttgattatcgtcaccttcaaaatcatgagcaacgattccgcaatgcgtgatgtgaactccatcaggacaaaagcagaagatgttataaatggtttctttcatttcctttgaagctccttatgctgagtcatccttatcatcttagtgaaaagttagtttgtgagacagttatttagccgctatggttagccagatttccttttcgattcttgaaatttccataatgaccccttcaatgacttgctaacgctgaagaatagccgtttagatggctaaattaacagtaaaaaacagtctctccaaatggtgttaaaacccctatcaacaccagtgatttcaatagctctagcctattaactgttttagttccgaaaagagataagaatcagtatttatataacctgtttcaatggtttggattgcctcaaaaggagatagttttgatactgctgaaaaaggtctaaaaaggtgtgtttaggctgtctcaaaaggttgaatttgagttttgatacaggtattattttgaaactaggttttgagacaactttcagggaatcaccatcatgtcatctgtaatcgcttacgtccgtgtatcaacttctgaccagacagttaccaaccagaaacagcagattgaagaagctggttatcaagtggctaagtggttcaccgatgaagctgtatcaggtggggttaaggctacagagcgtaaaggtttctctgacctactgcactatgtccgtgaaggtgacacactggttgttatcgggatagacagattaggccgtaacactattgatgttctctcaacggttgaacttcttcaggccaaaggtgtgaaagttatcagcttgcgtgaagggtttgacctctctacaccagttggtaaagcaatgctcactatgatggctggtttagcctctttagagaaagacctaatagcagagcgtagaacagcagggattaaacgtgctcagtccgaaggggttcactgtggcagaccaattaaagcaaccgctgaacaggttcaggaactgattgcacaaggttgttcccctgctcaggtacagaaagagttacagattagtaaggcaactttctatcgactgaacaagtaacaattagatagtgattcacaatgcccctgtattggggcttttttatgtctgtcgtttatcagaatccctgtaacgcattctaagcagtctttattattaacctatggggcagggttgctatcattaaacaatcgcttagaacgctgcacaggctcagatatgttcattttttgccattggtacgaaaccttagaaaaggtcgctaccaagtagagagattcagactatccaaaatcttagaaggtgctttagatatgctggaagtttctggtgaagctgaaataaaaacaggtctgaagattttttagaaaaataatatttgtgaaaattcatccaccagcttcaaagccgctttcacggatccctacatgatttactgtcaagctacaaggtggaaaccagaatcaccgatgagctgaaagcaggtgaggtttagaaaggctttctttaaagaactcttaaaagatactcagagacaagaagatgaaaaacaaagaacaaaaagaatctgttaagaggttttagggtagcataaaaaacaatcaattacaatcggttgatgtaaataaatcatgtgattcagggcgttagccctctttacaatattctgataaattagttttatttctaatcttatctctagtcttatagtgttcccttttggcataccccctgtgccgttttggcataccccttatccctttatgacataccccccatgccgttttggtatacccccctattcattatttcgaaatcacttacaccatcaagaaaaataagtcaaacaaatttattgacaaattgttaatgtgttgttacagtatttatatagcttattgaattgcaagaaggaaatcccaatgagaaaagacatcccacaacaggtaactatccgtgttgaagtgtcccacgccattcaccgtaaaattgttgaaatggcagctaaacagggtgtgagctactcagccctgattaaaaacatgattcgtgaaaatgtagtcacagcttaaatcgaacaatatacggccttgttaagaggcatttctgatattaggaaaatcccatgaatgaaactctatgaaatcccgtttacccccgcttatagtgatgtaacccgaatcacttctttcaacggtgttaagttatctctttcagctaaaatgatttacctgtttatggtaggtcttcaaagaaacggtcaagaagtcttcccctcaatcaattacctgtgtgaattgttcggtattgggcgaaaggttgctttaggggctttaacccaattacatgaatcaggtcttattagttctattcagcgttatgatagctctaaggtatacacagttgaaatcatgcctccagaattgattaaaagccaccagcaagaaaataaacctgaatcagtatctgaatcagaggccgcaatcaccagtgattccgataatgtcttacctttcccgttaatcgaaaggaatgaaaatccagttattgacgctgtagaagagattgaaccagttattatccgtctttctaaaccaaagcctaaaccagaaagtaaactgaattatctgtttgctactgatgcagaggaagacgacgagccatttaaaatgccaatttacgaggaattgtaaaatgaaacactcagtaattcacattgcaccagcgttaatgaaaaagctggaagcgttatcagaattgtacggcctgaaccgtcagcagactttagaaattatcctgaaagaggaattgaataatgtcgaataagaaagaacgctcagttatcaatctttcagctaagactcttgaactgctgaaccagttaagtgaaaagtatgatttgccacgacagcaaacattagcagtattactcaacaagaaaatgaaggaaatgaaccaatgaaaaaccgatttttgaatatgctaaacaatcctgtaccgcatcccgatttaacagacgcaatttttaattcggtatctgaaccagagttatgcttaacagtcctgaaaactcttccagagattaaccaaatcactattgctacattcttcagcggtcaagggctatcactgatgggtgctgcactaatctatgaaatggtactcaaggcacacgatgcaatgacagatttaatctggaatgaatatgaggttaaaaatatgaatggctaactatactgtagatgaatttatcatccaattgggctttaacgaaaacgtttcaaagaatcttcaaaaactcgaaagcagaacattaaaagtcgctgaacgaatcgaaaagaatctcaaccgttcattcacaccaaagggtgattttggaagagtaatttcttcagcaaataacgcatcaaaacaaattaaccgtgcattctcaaagagtatggattttgatgaagctggtaaatcatcggtgaaatctgtagagaacgctgctaaggcttctgcaaagcgcattaaagatatgtatcaggacgcctatggagctaaaggaaaaggccgctcaaatccaccagccggaaagccacaaggcagaggctcagatttaacagcttctaattcaatccgttcacttgctaacactcagttctattcgaatctgaccagacgtcttgagggtatgggttcaactggacaagcaagggcgatgaaattgcgtcagcagattcacggattgagagatgatgctttagccaatccttcagccagcctgaaccagttccgtttagctctccgtgcagccactgacagcgcgtctaaatgggcttctcagaaccgtaagcaggtatctaatgcagaagggttatcaagctccttcgggcgtctggtaagcgtttcagcagcgttatatgggacatttgaagccgtccgtaaggtggttgaaacaggtgtggcccgtgaaggtgtgaatctctccgctgaagctgttttcaaggggcaatcgaaaaatgctaagacattcgcggctcagttctctgaccaaatcggacagggtgtcactgagaccttgaaacagtacactggctttgctgctggtgctcagaactcgttaggctatcagggtacacaggacttctataagaatgctgctgtattcggtcgcatcagggggcttgatgctgaacagcttaaaggcatcatgatagcattcacacagatggcatcaaaagggcgcgtacaggctgaagaactcagaggccagttgggagaccgtttaccgggtgctgaacagatgttcgcagatgctttgggtgtgaacactcagcagcttgataagctcatgagtaacggtaagttactgtctaaagatgttcttccccgtgtatctgctcagatgaagaaaatggctgatgaagcagggggattagagaccgtttctaatatggctgtaacaggtatcggacgtgttaaagcagcgatggaaaacgatttaaacaaggctttcacaagctctgaaaagggtttaggccagtttaacgcttctgtagctaacatgcttaacgatgcttcaccaatcgcagaggctttgggtcacatcctcggaaaagttgcctctatgacctctggggcggttgaccacgtggacgaatggagccgtaaactctcagcgttaatcctcagaacttcagcgtggtacgatgacttatcagacggtcaaaagaaactggttgattctgctgaacagttcgctattggggctgctggtgtattggtgctggttaagtctatcgctggagtagccaataagctgaaatggttaagtgctctgttaggtggtggtgctgaagctggtgcggctgctggtgcaggtgggatgctgaaaggtgcttcccgtttagctggccctgtaggagttgctttagtcgctcatgatgctgtagacgcttcaggagttgaacagaagtacccaaccgctttaggtgtcgataaccctattgcaaaggctcttaactggctttcaagcccttctaaggtgttaggtgctcaggatggtgattcaatcactaacagcccgttcacacgtgctatgggttcatttggtgattggcttcagggtaacaatgcactgaacggtcagactaatacatttgctgtaccatcaatgtataaccctgctcagacaactatcaagaatgaccagcgcattaatattagtgtgaacatggatagccagaaaattggaacattccagacacaggttttaactggtggctttgaagacctgaatattaatgctgaacatttgggcgattaatgtctgtttgagttttacagattagagttatcatgtgataattgttttatctggttttgcttaaatctcaaaatactggtgcaggtcgttcaagaggttttgagaaagcaatgtaaaagggctgctcttatgagtggccttttttatttgcattgagaaaggttcgattatgaatgagaagatattacaaagtaacagggagaacctgtcacactatccatactgagttacggaagattggtgatttgattagtccaattcctaacaaggaatatcacatccccaaactgatgaccaaagcaagacgcttattactcattaaatcaatctgtgaaaagattaaaaataaacgttgacaatttgttaatatatgacagaatggttatatgagttaggaatatttcaccgtccatcaaatcaccgacttatttctgactcaaacaatttccttcttatctgtctttttaaggcatccatttcaagttccccttgagaagacagataaaccctaattagaaaacattgaacctcgtcccgtaacattgagttggctggatggggttttgtgctttctgaaatctaagcaaaccagactaagagtaaattaataatgactactttacatcaagctgtaaaaattgaatcaccagttgcttcaatcagtcacctgttaccgttcgaacagaaacagcatatcgaaaaattgtacttcccacggattcaacaggcaactgaccgaatgaataaggctgaagctgaatatcaggatgcagtagaatcacgccagcaattgattaatcgcaaagctcaagagttcttagcatccccttcagagcgtcacggatttattgtgaagcaggtttatccaacgaaccaacagcagattattcagtcaatggctgaacaaggctacatggttcatcgtgtaggaatgggattaatctatttcatctcaactaaaaagaatgctctgaaagacgcaactgacaaggcaactgctgaagctgagagttatattgataatatgactgaacgtctgaaggtaaaagcctctgaagctgtccaccagcgtaatgtgattgttacccaagcccgtaaaactctggattcgattaaatcatttgaaagctatttaaacgtgattgtaactgattctgaagaggtgtccgaatgagtattccaatgaaaggactaacaaaacgcgggagctataataatctaactgattcggtcgaatacaaatatttcaacggtcaagcagaaatcagtgaatcaacttataagctacttgcttcaggtaataaacctaaaccaactgtgaaaccagctaaagctgtcaccacgtataaggtgaagcctaagccgccaacagttgaacagcaaagggatgcagctttaaaggctgctattaaacggatggtaagcgggagctgataaaatggaagagacaattaacgcacctattaactattacgactctaacggctgtttggttattggagcaaaccttatcggaaagattcatcctcagttaatggataagttaacccgccgtgctggtgatggctcaaaacgtacacagcaagcccgaattacagaatacttagaaggactcttaaccaatgtctaatacaaccacgattaacacccctgataagccgtgtattcattgcggctcaactgttcgctatatctcatcgggtagttgcgtggactgttcaaagacacgtcagccgcctaagccaaaaccaaaggttgcccgtataacagctacagcagccgttgcaccgttccattcagaaggtggagacaatagcaataacatcattgtgaagctctctaaacccgctttagataaccttgaccgtgtaggatatgagttggttagaaagtatcgtctagccggatattcaccagaacgaatccgaatgattgcactgtcccatctgcttgaagccgcttaatccccgctacaaaatcccatctttagagtgtatcaatagaaaggtctcttcaggatcacgcggttgacgttacgctcgtgcagcccgcggttgagctgctgttccgcttcccctttggcgaaaaactcgggatgacgaacttcgacgccgtaggtgaaatccttcggcagtccgtcgagaaaatgccatagcgcggggagatcgcgaggaccgaacgtcgccggcagctgcagccagtactggccgatgcgcgaggccagcggcgccaggcgggcaaaaaattcgctgcttaactcgtcgcaatggcgcagggcggcctggtgcgagatggtggccgggaatttgaagcagaagcggaagtcatcgtgggtctgttcgtaccagcgggcgacaatctccggctttggtagcgcatacagggtggtgttgccctccacgcagttaaagtggcgggcgtactcttcaaggctggtgatgccaaggcgcacccatttcgggtgcgaccactggggaagcccaatataaatcatagcgccgtgaggatctcctcggtactgcgcacccggccgatgcgcgggaaaatatgcgtcatactgccctgatgctgctcggcggaggcggcgctgcaggcatcttcggcgatgaccaggttaaaacccagctcccaggcattgcgggcggtggattcgacgccgatgttggtggagatgccgcagagaataatggtgtcgatcccgcggcggcgcagctgaagctcaaggtcggtgccatagaacgcgccccactggcgtttggtcacttcgatatcgctctcctgcttacccagcgtggccgggtaggtccaccagttttcgggcagcgtatgcgccccggcctgagcgtcgacaggctgtttcagcgcttcggcgaaatcggccgaccagcccacgcggaccatgatgaccggcgaaccctgttgccggcacttgtctgccaggcgagcggcgcgcgccaccacctcgtcagcccgatgcgggccgccggcgaaaggcagaatgccttcctgcagatcgattaccaccagcgccgtgttttttgcattgagttctaacatggtatccccgtatcttcatctgttgtcaggcggctacaatacctttgcggcttcagcaaaagagtaacaaattttgttaatttatgtgagtgtggacgttaagcgcgcagcaaagcagcgtacatcgtgcgtcggacttatcgaacgacagaatttccagtataatagccgccttttttcattcagttgtgacatcagctaaagctgcgacctcgtcgcctgcagggcagacgacaatccgccgacggctaagttaagggatatctcatgcgtacagaatattgcggacagcttcgacagtcccacgttgggcagcaggtgactctgtgtggttgggtcaaccgccgtcgcgatctcggtagcctcatttttatcgatatgcgcgaccgcgaaggcatcgttcaggtgtttttcgatccggatcgtgcggatgcgttgaagttagcctctgaactgcgtaatgagttctgcattcaggtcactggcaccgttcgcgcgcgtgaagagaaaaacatcaacgcggacatggccaccggcgctatcgaagtgctggcttccgatctgacgatcattaaccgctcagaatcgctgccgctggactccaatcacgtcaacaccgaagaagcgcgtctgaaataccgctacctcgacctgcgtcgtccggagatggcgcagcgcctgaaaacccgcgcgaaaattaccagctttgtgcgccgctttatggacgaccatggcttcctcgacatcgaaaccccgatgctgactaaagccaccccggaaggcgcccgcgattacctcgtgccttcccgcgtgcacaaaggcaaattctacgcgctgccgcagtcgccgcagctgttcaaacagctgctgatgatgtccggcttcgatcgctactatcagatcgtcaaatgcttccgcgatgaagacctgcgtgccgaccgtcagcctgaattcacccagatcgacgtggaaacctcctttatgaccgcgccgcaggtgcgtgagatcatggaggcgatggtgcgtcagctgtggctggaagtgaaaggcgtcgacctgggcgagttcccgatcatgaccttcgccgaagccgaacgtcgctatggctccgataaaccggatctgcgtaacccgatggagctggtggacgtcgccgacctgctgaagtctgtggaattcgcggtctttgccggcccggccaacgatccgaaagggcgcgtggcggccctgcgcgtcccgggcggggcctctctgacccgcaagctgattgacgaatacggcaactttgtgaagatctacggcgcgaaagggctggcctatattaaagtgaccgagcgtgccaaaggcatggacgggatcaacagcccggtggccaaattcctgaccgctgaaatcgtggaagcgatccttgaccgcaccggcgcgcaggatggagacatgatcttcttcggcgccgacaacaagaaagtagtggccgacgcgctgggcgcgctgcgtctgaagctgggtaaagacctgagtctgactgacgagagcaaatgggcgccgctgtgggtgatcgacttcccgatgttcgaagacgacggcgaaggcggcctgacggcgatgcaccatccgttcacctcgccgaaagatatgaccgcggatgagctgaaagccgccccggaagaggctgtagccaacgcctacgatatggttattaacggttatgaagtcggcggcggttcggtgcgaatccaccgcggcgagatgcagcagaccgtatttggtattctgggcattaacgaacaggaacagcgtgagaaattcggcttcctgctggatgcgctgaagtacggtacgccgccgcatgcgggtctggccttcggtcttgaccgtctgaccatgctgctgaccggtaccgataacatccgcgacgttatcgctttcccgaaaaccaccgcggccgcctgcctgatgaccgaagcgccaagcttcgccaatccggcggcgctcggtgagctgggtattcaggttgtggagaaagaggcaaaagcgtctctggagaacaagtaatatgtcatttaagctgcccgtttcggtgctggtggtcatttacgccgaagatacgaaacgggtgctgatgttgcagcggcgcgacgatcccgcgttctggcagtcggtcaccggcagcctggaagctggagagaccgcgctgcaggccgccgcgcgtgaagtaaaggaagaggtcgccattgacgttgcctgcgagcaactgaccttaatcgactgtcagcgcacggtggagttcgagatattttctcatttgcgtcatcgctatgcgccgggtgtagagcgcaatacggaattctggttctgtcttgcgctgcctcatgagcgggagattactttcaccgaacatctggcctatcgctgggtcagcgcgacggaagccgctgcgctgaccaagtcgtggagcaaccggcaggcgattgaagaatttgtaattaacgccgcctgaaagggcgcgctttttggagagttttttatggcaggtcatagtaaatgggccaacaccaaacaccgcaaagcggcacaggatgccaaacgcggtaaaatctttacgaaaatcattcgcgagctggtcaccgccgcgcgtctgggcggcggcgatccggcttccaacccgcgtctgcgtgcggccgttgataaagcgctgtctaacaacatgactcgcgacaccctgaaccgcgccatcgcgcgcggcgtcggcggcgatgaagacgcgaacatggaaaccatcatttatgaaggctacggtcctggcggcaccgcggtgatggtggaatgtctgtccgacaaccgtaaccgtaccgttgcggaagtgcgtcacgccttcaccaaaaccgggggtaacctcggcaccgatggttccgtctcctacctgttcagcaagaaaggcgttatctccttcgagaaaggcgatgaagacactatcatggaagcggcgctggaagcaggcgcagaagacgtggtgacctatgacgacggcgccatcgacgtctacaccgcctgggaagagatgggcgctgtgcgcgacgcgctggaagccgccggcctgaaagccgacgctgccgaagtctcaatgattccgtccaccaaagcggatatggatgccgagacggcgccgaagctgctgcgtctgatcgatatgctcgaagactgcgacgacgtgcaggaagtgtaccataacggcgagatctccgacgaggtcgcagccaccctgtgatgcagccgcatccacggttaaccggaggcgcgtgatggctattattctcggcattgacccggggtcgcgcgttaccggttatggcgtgatccgccaggttgggcggcagctgagctacctgggcagcggatgcatccgcaccaaagtggacgatctgccgtcgcggctgaagctgatctacgccggggtgacggagatcatcacccagttccagcccgactatttcgccattgagcaggtctttatggccaagaatgccgactcggcgttaaagctcgggcaggcgcgcggggtggcgatcgtcgcagcgaccaatcaggcgctgccggtgtttgaatacgccgcccgtcaggtcaagcagaccgtggtcgggattggcagcgccgaaaagagccaggtccagcatatggtgcgcaccttgctcaagctgcccgccaatccgcaggcggatgcggcggatgcgctggcgattgccatcacccattgccatgtcagccagaatgccgctcagatcagcgagacccggctcaatctggcgcgggggcgcttacgataatcgcaaatcaggctggatatctatccagcctttttttatgataccgccagatacttagaccataacgcaggagccccacgtgataggcagactcagaggcatcattctcgaaaaacaacccccgctggtgttgctggaaacggcgggcgtcggctatgaagtgcatatgccaatgacctgcttctatgagctgccggaggccgggcaggaggcgatcgtcttcacccactttgtggtgcgtgaagatgcccagctgctgtatggatttaacaacaaacaggaacgtaccctgtttaaagagctgattaaaaccaacggcgtggggcccaagctggcgctggcgatcctctccggcatgtcggcgcagcagttcgtcaacgccgttgaacgggaagaggtcgcctcgctggtgaagctgccggggattggcaaaaaaaccgctgaacgtctgatcgttgagatgaaagatcgcttcaaagggctgcacggcgacctgttcaccccggcggccgatctggtgctgacctcgccggcaggcccaacggcggacgatgccgagcaggaagcggttgccgcgctggtcgcgctgggctataaaccgcaggaggccagccggatggtcagcaagatcgcgcgtccggacgccaacagtgaaacgctaattcgcgaagcgctgcgcgctgcgttgtgaggtaagggatgattgaagcagaccggctggtatcggcagacagcagcggctttgaagaggccgctgaccgcgccatccgcccaaaattgctggcagagtatgtcggccagccgcaggtgcgttcgcagatggagatctttatccaggcggcgaagctgcgcggcgacgccctcgatcacctgctgatttttggcccgccagggttggggaaaaccaccctggccaatatcgtcgccaatgaaatgggggtgaatctgcgtaccacctccggcccggtgctggagaaggcgggcgatctcgccgcgatgctcaccaacctcgaaccgcacgatgttctgtttatcgatgagatccatcgcctctcgccggtggtggaagaggtgctctatccggcaatggaagactaccagctggatattatgattggcgaaggtccggcggcgcgttccatcaagatcgatctgccgccgtttaccctgatcggcgccaccacccgcgccggttcgttgacctcgccgctgcgcgaccgctttggcatcgtgcagcgtctggagttctatcagatccccgatctgcagcatattgtcagccgcagcgcccgccatatggggctggagatgagcgacgagggcgcgctggaagtagcccgccgttcacgcggcacgccgcgtattgccaaccgtctgctgcgccgggtgcgtgacttcgcggaagtgcgccacgacggcaccatctccgccgatattgccgcccaggcgctggatatgcttaacgtcgatgcggaagggttcgactatatggaccgtaagctgctgctggcggtgatagataagttctttggcggcccggtggggctggataacctcgccgccgcgattggcgaagagcgggaaaccattgaagatgtactggagccctacttaattcagcagggctttctgcagcgtacgccgcggggaagaatggcgacggtgcgcgcctggaatcatttcgggattacgccgccggaaatgccgtagcgcgttgcggttgagcagttcatggtgaagcccggtcagcagcgtgaccgggctttttcattttcagctggcggcttttttcgtcatgctgagaataaacagcaccgcggcgcagagcaccaccgacggcccggccggggtatcatagaaagccgagaaggttaacccgccggtaacggccagcatgcccacgcccaccgccacggcggccatctgctccggcgtacgggcaaaacggcgggcggtggcggccgggataatcagcagggaagtaatgatcagcgccccgacgaacttcatcgccacgccgatagtcagggcggtgaccagcatcaacagcagcttgacccgctgcagcttcacgccgtcgacaaacgccaggtccggactgatggtcatcgccagcagattccgccactgccagagcagaatgccaatcacaatcaccacgccaatggcaatggcgatcaggtcctgcggcgtaaccgccagcagatcgccgaacaggtacgccatcagatcgacgcggacgttagacatcagactgaccaccaccagccccagggacagcgcgctgtgcgccatgatgcccagcagggtatcgatcgccagatgcggtcgtttttccagccacaccagcccgccggccagcagcagggtcacgacgatcaccgcatagaacggattgacgttaagcaataaaccgaaagcgacgccgagcagagacgcatgcgccagcgtgtcgccgaaataagacatgcggcgccagaccacaaaggagcccagcggaccagcggcgcaggccagcatcatcccggcaagccagccaggtaacagaagttcaatcattagcggctgtttccccgacgcagtacaattcgcccctgaaggtcgtggcggtgattatggtggtggcggtatatccccagctgttccgcgccgcgcgggccgaacatggagataaactccgggtgcatggagaccacctccggtgcgccagagcagcagatatgctggttcaggcacagaacttcgtcggttttggccatcaccagatgcagatcgtgggataccattagcaccgcgcagtccagttcatggcgcagctggttgataagatcgtagagcgccacctggccgttgacgtcaacaccctgggtcggttcatccagcaccagcagctgcggacggttgagcagggcgcgggccagcagtacgcgctgcgtttcgccgccggagagcttttgcatcggcgcatcgatcagatgccccgcctgcacgcgcttcagcgccggcaggatgtcgtctttacgggtgcccgggcgcaaacgcaggaagcggctaacggtcagcggcagcgtggcgtccagatgcagtttctgcggcacatagccgatgcgcaggcgtgcgtcacgcttgataacaccctctgtcggtgctaccagcccgagaaccacccgcacaagggtcgatttgccggcgccgttggggcccagcagggttaagattttgcctggcgtgagagccagcgagatgtcagacaacacgcggcgttggccaaaggccaccgagacattttccagcgttacaaggtttgtcatagtaatttaggggttgcacaagctagtgaatgttataatatcacatcaaactcacttatttcgatgactagacgcattatgttacataaaaatacgcttctttgcgctggacttggcgctgtttttttgttcgcgcaggtaccgctggccagcgccgccgtggtgacttctatgaaaccgctgggctttatcgcggcggccatcgccgatggggtgaccgagacccaggtgctgctgcccgatggcgcctccgagcatgattattccctccgtccttctgatgtaaaacgcttacagaacgcagacttagtggtgtggattggtccggaaatggaagcctttatggataagtcgacgcaaagcattgcggcgaataaaaaggtgacgattgccgagctggatggggtcaaaccgctgctcatcaccggggcggacgacgatgacgatcaccatggtcatgaccatggcgcagcagaaaaaggtgacggcgatcaccatcacggtatttacaatatgcatctgtggttatccccagagatagcgcggctttcggcggttgcaatccacgataaattattggaacttatgccgcagagtcgagccaaactcgacagcaacctgcagcagttcgagaccgcgctggcggcgaccgacaagcaggtgagcaatgagctggcaccgctgaaagggaagggctatttcgtttttcatgacgcctacggttactttgaaaaacactacggtttgacctcgctggggcactttaccgtcaaccctgaaatacagcccggtgcgcagcgtttacacgaaatcagaacacaactggttgagcagaaagccacttgcgtttttgctgagccacagttcaggccagcggttatcgaagctgttgcccggggcacgtctgtgcgcatggggaccctggatccactggggacaggaattacgctgggtaaaacgagttacccgcaattcctcacccaactggcgaatcagtattcgagctgcctgaaaggagattaacgaggaagtgaatacgtgcaacagatagcccgcgctgtcactcaggcattcaacaatctgccacgacctcatcgcgttatgctggggtcgcttagcgttcttaccttagcggtcgccgtctggcgaccctacatttaccacccggaatccgcccccatcgtcagaaccattgaactggaaaaaagcgagatccgctccctgctgccggaagcctccgagccgatcgaccaggccccgcaggaagaagaagccattcctcaggatgagctcgacgaaaaagccgatagcgatgccggcgggcacgaatacgtggtgtcgaccggcgatacgctcagcagtattctgaaccagtacggtatcgatatgggcgatatcgcccagctttcctccgccgataaagagctgcgcaacctgaagattggccagcagctctcctggaccctgaccgccgacggcgatctgcagagcctgacctgggagatgtcccgccgcgagacccgcacctatacccgtgtggataacggttttaaaatgagcagcgagctgcagaaaggcgattgggtcaacagcgtgctgaagggcaccgtcggcgccagctttgtctccagcgcgcgtgatgccgggctgaccagcacggaaatcaacgcggtgatcaaggccatgcagtggcagatggatttccgtaagctgaagaaaggcgacgaattctcggtattgatgtcgcgcgaaatgctcgacggcaaacgtgagcaaagccagttactcggcgtgcgtcttcgctctgacggtaaggattactatgccatccgcgccgaagacggcaaattctacgaccgcaacgggacgggtctggcgaagggctttatgcgcttcccaacggcgcgtcagttccgcgtctcctctaactttaatccgcgtcgtctgaacccggtcaccggccgcgtcgcgccgcaccgtggcgtcgatttcgcgatgccgcagggaacgccagtgctggcggtaggcgatggtgaagtagtcgtggccaaacgcagcggcgctgccgggtattacgtcgcgatccgccacggtcgcacctataccactcgctacatgcacctgcgtaagctgttagtgaagccggggcagaaagtgaagcgcggggatcgcattgcgctgtcggggaataccggacgctctaccgggccacatctgcactacgaagtgtggatcaaccagcaggcggtcaacccgctgacggctaagctgccgcgtaccgaagggctgagcggttccgaccggaccgactatctggcacaggtcaaagaggtcgttccgcagctgcggtttgactaaccaccggtcagtggaaagccggtgccccagggcgccggctttttcttttgtaggatacccgacgtctcgctacactatcccattatcttgattaagcagtcgatctgcggattgggcatggaaacgaaaaaaaataatattgagtttatccctaagtttgaaaaatcctttttactgccgcgctactggggcgcctggctgggggtctttgccttcgccggtattgcgctgacgccgccatcctttcgcgatccgctcctcggcaaactcggtcgtctggtagggcgtctggcgaaaagctcgcgccgccgggcgcagattaatttgctgtactgcttcccggaaaaaagtgagtacgagcgggaagcgatcatcgacgccatgtatgcctcggcgccgcaggcgatggtgatgatggccgagctgggcctgcgcgatccgcagaaaatccttgcccgcgtcgactggcaggggaaagcgatcatcgacgagatgcagcgcaataatgagaaggttatttttctcgttccgcatgcatggggtgtggatatcccggcgatgctgatggcctccggcgggcagaagatggcggcgatgttccataaccagggtaacccggtgttcgattacgtgtggaataccgtgcgtcgtcgttttggcgggcgtatgcacgcgcgcaacgatgggatcaaaccgtttattcagtcggtgcgccagggctactggggctactatctgcccgatcaggatcacggcgccgaacacagcgagtttgtggatttctttgccacctacaaggccacgctgccggcgattggccgcttaatgaaagtatgccgcgcccgcgtcgtaccgctgttcccggtctacgatggcaagacgcaccgcctgacggtgctggtgcgcccgccgatggacgatctgctggacgctgacgatacgaccatcgcccggcggatgaacgaagaagtggaagtgtttgttaagccgcacaccgagcagtatacctggatcctgaagctgctgaaaacgcgcaagccgggtgaaatcgagccctataaacgcaaagagctgttcccgaaaaagaaataaaaaaagcctccgtcaggaggcttttttatctctaccgtgcttactcgacggtgaggatacgggtggtgttggtgctgccgatggtgctcatcacgtcaccctgggtcacgaccacgaggtcgccggagaccagatagcctttgtcccgcagcagattgacggcgtcgtgcgcggcggccaccccgtcattctggctgtcgaagaacaccggcgtcaccccgcggtagagggcggtcaggttcagggtgcgctcgtggcgggaaagggcgaaaatcggcagaccggagctaatgcgcgaagtcatcagcgcggtacggcccgattcggtcatggtgatgatggcggtgatgcctttcaggtggttggcggcatacatcgccgacatggcaatcgcttcttccacgttgtcgaactggacgtccagacggtgtttggagacgttgaggctagggattttttccgcgcccagacacacgcgcgccatcgcggccacggtttccgaaggatactgaccggcggcggtctccgcggagagcatcaccgcatcggtaccatccagcacggcgttggccacgtccatcacttccgcgcgagtcggcatcgggttggtgatcatcgactccatcatctgggtggcggtaatgacggaacggttcagctgacgggcacgacggatcagcgctttctggatgcccaccagctcaggatcgccgatctcgacgccgaggtcgccacgggcaaccattaccacatcggaggcgaggatcacgtcgtccatcgcatcctgatcgcaaaccgcttcggcacgctcaactttggcgacgattttcgcatcgcagccggcatcgcgcgccaggcgacgggcgtagttcaggtcttcgccgcagcgcgggaaagagacggccaggtagtcgacgccgattttagcggcggtgacgatatcagctttatctttgtcggtcagcgcttcggcagacaggccgccgcccagcttgttgatccctttgttgttggacaacgggccgccgacggtcacttcagtgaacactttcatcccctgaacttcgaggactttcagctgcacgcgaccatcgtcgagcaataagatatcgcccggcacgacgtccgccggcaggcctttatagtcgatcccgactttctctttgtcgccttcgcctttgccaaggtttgcgtcgagcaggaatttatcgccgacgttgaggaaaattttgccttctttgaaggtcgatacgcgaatttttggtccctggaggtcgccgaggatggccacatgacggcccagttttgccgcaatctcacgcactttgtcggcacggagctgatgatcttccggggtgccgtgagagaagttcatacgtactacgtttgcgcccgcggcgataaccttttccaggttgttatcgcggtcagttgccgggcctaaggtagtaacgattttggttctgcgaagccttctggacatgtaatactccgttgactgatacaactttggtgttgcgtgaacatggattcggtagcgccagcctgcaacgtcgcacagccggatcgttatcgaaggtgtaatggggtactgcttgttatcaacttttattgattatcactgggtacgaatggttctttatcaaaacgcgattccttcagcgcttccttgaccctcttcaagttatctctgaattttgccccccgacgcaaggtaaagccagtcgccaacacgtcaatgacggtcaactgggccaaacgggagaccatcggcatatagatgtcggtatcttccggcacatcaagggtaatggcgagcgtggcttccctggctagcggcgtaccggcggaggttagagcgatcaccatggcatcgttttcacgagccagctgcgccagctccaccaggctcttggttcttccggtatgcgagataatcaccaccacatcatcgtcatcgcaattcatacagctcatgcgttgcaggacaatgtcgtcggaatagatgaccggcacgttaaagcggaaaaatttgttcatcgcgtcgtgagcgaccgccgctgaggagccgaggccgaaaaaggcgatttttttggcctgagtcagcagatccaccgcgcgatttaccgccgacatgtcgagagaatggtgcacctgatctaaactcgccatggccgattcgaatatttttcccgtgtatgactcaacgctgtcgtcttcatcgacattccggttaacatagagcgtgccgtgcgcaaggctctgggccagatgcagtttgaagtcagggaatccgcgggtttcgagactacggcagaagcgattgacggtcggttcgctaaccccggcctcaagggcgatggcggcgatgctcgaatgaatggcctgctcgggggtggcgaggatcacttccgccactttgcgttcagatttgctaaggtgttccagtcgggactggattttttccagcatgttcattagtaacagggcgctcatcaatggaaacgatttcattaatgggtgaaatcattgggcgttttagcaagaatatacccctccgcaagcgcaagcggtgaggaatgacgtgaaatgatgttgttttttttcattacatgatcagggtcgtattttactgacctgaaccaggtacaaacaacgaacaataacggccgaatgcccaaatcatcgccgaatgttttcaccctgtgcggttttaccgccgcaaacgaaggggaaggctttcgggaaatacgtaaacacagtacagtgcagtgtaagaaaattacaaatatagcctggcaaaagcaccagactatcaactgaggagaatgacatggcggtaacgcaaacggcccaggcatgcgacctggtcattttcggcgcgaagggcgacctggcgcggcgtaaattgttgccttccctgtatcagcttgaaaaggcgggccagatccacgctgacaccagaatcattggcgtcggccgtgccgactgggataaagcggcttataccaaagtcgtgcgcgaagcgctggaaaccttcatgaaggaaaaaattgatgaaggtttgtgggataccctgagcggacgcctggagttctgtaatcttgacgtcaatgacaccagcggcttcacccgcctgggtgagatgctggatcaaaagaaccgtgtcaccatcaactatttcgccatgccgccgagcacctttggcgcgatctgtaaagggctgggcgaagcgaagcttaatgccaagcctgcgcgcgtggtcatggaaaaaccgctcggcacctcgctggaaacctcccgtgaaatcaacgaccaggtcggcgagttttttgaagagtgtcaggtctaccgtatcgaccactatctcggtaaagagacggtcctcaacctgctggcgctgcgcttcgccaactccctgttcgtcaataactgggactgccgcaccatcgatcacgtcgaaatcaccgtcgcggaagaggtgggtattgaagggcgctggggttacttcgaccaggccgggcagatgcgcgacatgatccagaaccacctgctgcagatcctgtgcatgattgccatgtcaccgccgtccgatctcagcgccgacagcatccgtgatgaaaaggtcaaggtgctgaaatccctgcgccgtattgaccgctccaacgtgcgcgagaaaaccgttcgcggccagtataccgccggctttgcccagggcaaaaaagtgcctggctatctcgaagaggagggggccaacaagaccagcaacaccgaaaccttcgtggcgatccgcgtcgatatcgataactggcgctgggctggcgtaccgttctatctgcgcaccggcaaacgtctgccgaccaaatgctcagaggtagtggtttacttcaaaaccccggaactgaatctgtttaaagagacctggcaggagctgccgcagaacaagctgaccattcgcctgcagccggacgaaggggtagatatccaggtactgaacaaagtgccgggcctcgatcataaacataacctgcagatcactaaactggatctgagctactccgaaaccttcaaccagacgcacctggccgatgcctatgaacgtctgctgctggaaaccatgcgtggcatccaggcgctgttcgttcgccgcgacgaagtagaagaggcgtggaaatgggttgactccattaccgaagcctgggcagccgaccgcgatgcgccgaaaccgtatcaggccgggacctggggaccggttgcgtcggtggccatgatcactcgcgacggtcgttcatggaacgagtttgagtaaggctggaggctaatccgtcagggttattttaccggtaacatgatctgacgcagaaagtcgcacgctttttaatcttttaagccccgtgaggattcacccacggggctttttttattacactgcctgcagacattttgcccctgagcgctggtgtttgtggcctttaccacgtcaacacgtcatcacgcagcggccggacagataaaaatttgaggagcctttatgaattcgacaatgttacgggtaacaaatcgcattatcgaacggtcgcgtgacacccgcgcggcttacctcgcaaggattaaccaggccaaaaccgacaccgtgcatcgtgcgcaactggcctgcggcaatctggctcacggattcgcggcctgccaggctgacgacaaagcctccctgaagagcatgttgcgcaacaacattgccatcatcacctcctacaacgacatgttgtccgctcaccagccctatgaacactacccggagatcatccgcaaagcgctgcacagcgccaatgcggtcggccaggtcgccggcggcgtgccggcgatgtgcgacggcgtaacgcaggggcaggacgggatggagctttcactcctgagccgcgaggtgatcgctatgtccgccgccatcggcctgtcgcataacatgttcgacggggccctgtatctcggggtctgcgataaaattgttcccggtctgaccatggcggcgctctcatttggccatctgccgtcggtctttattccctccggtccgatggccagcggcctgccgaataaagagaaggttcgcattcgccagctgtatgcagaagggaaagttgaccgtatggcgctcctggagtccgaagccgcctcttatcacgcgccggggacctgtactttctacggaacggcgaacaccaaccagatggtggtcgaatttatgggcatgcagctgccgggctcgtcctttgtccatccggatgctccgctgcgggaagcgctgaccgccgccgccgcgcgccaggtcacccgcatgaccggcaacggcaatgagtggatgccgctgggcaaaatgtttgacgaaaaagtggtggtcaacggcatcgtggcgctgctggcgaccggtggctccaccaaccacactatgcacctggtggcgatggcccgcgcggcgggaattatcattaactgggacgatttctccgacctgtcagacgtggtgccgctgctggcgcgcctctatcccaacggcccggcggatatcaaccacttccaggcggcaggcggcgttccggtactggtgcgcgagctgctgaaaggcggcctgctgcatgaggatgttcacaccgtggccggctttggcctgtcgcgctacaccctggagccatggctgaataacggcgagctggactggcgcgaaggggcgacagcgccattggacgaccaggtcatcgcgacctttgaaaaaccattctcccgccacggcggcaccaaggtgctgagcggcaacctgggacgcgcggtgatgaaaacttcggcggtcccggtggagaaccaggtgattgaagcgccggcggtggtatttgagagccagcacgacgtgttgccggcctttgaagcggggctgctggacaaagactgcgtggtggtggtccgtcatcaggggccaaaagcgaacgggatgccagaattacataaacttatgccgccacttggtgtattattggaccgccgtttcaaaatagcgctggtgaccgatggccgactctctggcgcctccggtaaagtcccgtcagccattcacgtcacgcctgaagcgtatgatggcggcttgctggcgaaagtgcgcgatggcgatcttattcgcgtgaacggacagacgggggaactgacgctgctggtggatgaggccgaactggcggcgcgtcagccgcatatccctgacctcagcgcgtcgcgcgtgggaaccggtcgggagatgtttggggcgctgcgtgagaagctctctggcgcggagcagggcgcaacctgcatcactttttaagacgatttaatttctagatctggcgagagaaaatcctgatgaaaaactggaaaacaacagcagaagcaatcctcacctccggtccggttgtcccggttatcgtagtgaaaaagctggagcacgcggtaccgatggcgaaagcgctggtggcgggcggcgttcgcgtgctggaagttaccctgcgcaccgagtgcgccctggaggcgatccgcgcgattgccaaagaagttccggacgcgattgtcggcgcgggcacggttaccaacgttgagcagttgaaagcggtaacggaagccggcgcgcagttcgctatcagcccgggtcttaccgaatccctgctgaaagcggcgaccgaagacggcaccatcccgctgatcccggggatcagcacggtatctgagctgatgctgggtatgcagtatggcctgaaagagtttaaattcttcccggcggaagccaacggcggcgtgaaagccctgcaggcgattgcgggtccgttcggccacattcgtttctgcccgaccggcggtatctctccggccaactaccgtgactacctggcgctgaacagcgtactgtgcatcggcggttcctggctggtgccagccgacgccctcgaagccggcgactacgatcgcatcaccaccctcgcgcgagaagcggtggaaggcgcgaaataaaccacgcctccaggtcaacaacccggtctgcggcaacgcgaccgggtttttttgtctttacccttcgacgatgaccgccgcggcggcggctttagcccgcgccacggcctcctcaaccgaatcggcgacggcgagggttacccccaggcggcgggtaccgtcaatctccggcttgccgaacagacgcagctgcaggccagccccgacggccgactgcagctggccaaagctgacgttctggctggacaactgcggaaggatcaccgcggaggcggccgggccatactggcggatagcgccgacgggtagcccgaggaaggcgcgaacgtgcagggcgaattccgagagatcctgggagataagcgtcaccatcccggtgtcgtgtggtcgcggggagacttcgctgaagatcacctcgtcgccgcatacgaacagctccacgccaaacagaccataacctcccagcgccagcaccaccttgcgggcgatggtctgggcacgctcgagggccaggtcgctcatctgctgcggctgccaggactcacggtaatcgccgtcttcctggcgatggccaaccggagcgcagaaatgcacgccgtcgacggcgctgacggtgagcagggtgatttcgaaatcgaagttcaccaccccctcgacgatcacccgtccggcgccagcgcggccgccctgctgcgcatagcgccaggcttcgctgagctggtcagccgagcggataaagctctggcctttgccggaggagctcatcaccggtttaacgatgcatggcaaatcgatctcggtaaccgccgcgcggaagccttcttcgctgtcggcaaaacgatagcgggaggtgggaagctgcagctcttccgccgccaggcggcgaatgccttcgcggttcatggtgagctttgccgcccgcgccgtggggaccactttctgcccggcctgttccagttcgaccagggtgtcggtagcgatagcttcgatctccggcacgatataatcaggtttttcctgttcaatcagggcgcgcaggctctcgccatgcagcatattgatgacatgggcgcggtgggcgacctgcatcgccggggcatcggggtagcggtctacggcgatggtttcaatgcccagacgctgacattcaatagcgacttctttacccaactcgccggaacctaacagcataactttggtggctgccgggcgcagcgcggtgcctaatacagtcataactctcatccgcagtaaaaaaagatggcagcgattataaacgaaaacgtttgcgtatgtctttacgcgcgtaacgcgcgtgagttgagtccgggagggaaatttgctatactgtataaaaatacagtgttgagaggctgcagtatggcggttgaaattaaatatgtggtgatccgcgaaggtgaggaaaaaatgtcttttgccagcaaaaaagaggccgacgcttacgacaaaatgctcgatctggcagaggtgctgaatgactggctggtgacatcgccgctggagatggatgacgtccagcgcgataccatggcgatgtggctggcggagcgtaaagaagcgctgcagcatatcctgcgagttggccgactgccggagcaagagacgcccgcacaggacgcctccgcgccgtcggctaccgccgagacttctccggcgggtgatgacgccgtgccggcggccaaagcgcgcaaagccaaggcagcctgaacgctggcggtcagtcactggtcggtcggccccgatgctgccgtcgcacgtacctttgcgcatctttagccatatctaacatttcctgacatcgcgtcgtttaggctgataacagtgtttgtcacctgagaggaaaaccatggctaactggctacatcaactgcagtcgctgctcgggcagcagggtgcgtcaccgtccggcgagtcgtcaaaagggagcggcctgctgcccggcgccatcggtgggctggccggattgctggtggccagcaaatcgtcacgcaaattattggcgaaatatggcactagcgcgctgctggcaggcggcggggcggtggcgggcacggtgttatggaacaagtatcagcagaaaatgcgcgcgcagaatacatccgcccaggcgcctgagacggcagcggcggaggtcgatccgcgtagcgtgcggctgatcacggccctggtatttgccgcgaaaagcgacggtcatattgatgaccacgagcgggcgaatattgaaactcagctgcgggcggccaatattgacgttcaggcccgggtgctaattgaccaggcgctagcccagccgctggatccgcagcgtctcgccgagggcatcatcgacccgcaggaggcgctggagatctactacgtcagctgcgcggtgattgatatcgaccattttatggagcgtagctaccttaatgcgctgggagacgccctggcgctgccgaaagatgtccgggccgatatagaacaggatatccagtcacaaaaacaagcgctaagcgtctaaatcatcacgtttcgcttgcatcgctcgcgtcttttgccacccttatagacacgtcatcattcaggcgccaccctgcggcctgaatgctcttgtgtcacgataaagcagcagaagaataacatgccacctaaagctaaacggatccctcacgccatgaccttgcatggcgatacacgcatcgataattattactggctgcgcgacgatgagcgcgcgcgacctgacgtgctggagtatctgcacgcggagaacgcttacggcaagcaagtgatggattcgcagctcagcctgcaggagcgtctgctgaaggagattatcgaccgcattccgcagcgggaagtctctgccccctacagtaaaaacggctttcgctaccgtcaggtgtatgagccgggctgcgaatacgctatctaccagcggcagtcggtgctgaaagaagagtgggatgagtgggagatcctgctcgatgccaaccagcgggcggcgaagagcgagttctacaccctgggcggactgggcattgcgcccaacaaccagctaatggcggtggcggaagattacctttcccgccgccagtacggcctgcgcttttgcgacctcagcaacggcgagtggtacccggaaatcctcgaaaatgtcacctccggctttgcctggagcaacgattcacgctttgtttggtatgtgcgtaaacatcccaccacgctgctcccttatcaggtctggcgccacaccgtcgggacaccggcgcagagcgacgcgctggtctacgaggaaaaagatgagaccttctacgtcagcgtgcataaaaccacctcccagcagttcgtggtaatttatctctccagcgccaccaccagcgaagtgctgctgctcaacgccgaactgccagacgccgagccggtctgctttctgccacggcgtaaagatcatgaatacagtcttgatcactatcagcacgctttctatcttcgttccaaccgggaggggaagaatttcggcctctaccgtaccgtgctacgtgatgaagaacagtggaccacgctgatcccgccgcgtcacgacgtgatgctcgaaggatttaccctgtttaccgactggctggttgtggaagagcgtcagcgtggcctgaccagtctgcggcaaattaaccgcaagacccgggaggtggtggggatcgcttttgacgatccggcctatgtcacctggcttgcctataatccggagcccgaaacgtcgcgactgcgctacggctattcctccatgactacgccggatacgctgtttgaactggatatggataccggcgaacgaagagtgatcaaacagcaggaggtaaaggggctggatacgagctgctaccagagcgaacacctgtgggtgaccgcccgcgatggcgtcgaagtcccggtctctctggtctaccatcgcgaacattttcgcaaagggagcaacccgctgctggtctatggctatggctcatatggcgagagtatcgatgccgatttcagcgccagccggctgagcctgctcaaccgcggctttgtctacgccatcgcccacgtccgcggcggcggcgagctgggtcagcaatggtatgaagacggtaaattcctgtgtaagaaaaataccttcaacgactatctggacgtctgtgacgcgctgcttgcccaggggtacggcgatccgcggctctgctacggcatggggggcagcgccggcggaatgctgatgggcgtggccgtgaatgaacggccagagctgttccatggcgtgatagcccaggtgccgttcgtcgatgtggtgaccaccatgctggatgaaactattccgctgaccaccggtgaatttgaagagtggggaaatccgcaggatgaaacctattatcattatatgaaaagctacagtccctatgacggcgtgagggcgcaggcgtatccccacatgctggtgactaccggtctgcatgattcccaggtgcaatactgggagccggctaaatgggtggcgaaactgcgggaactgaaaaccgacgataacctgctgctgctctgcaccgatatggattccggacacggcggaaaatccgggcgctttaaaagctatgaaggggtggcgctggagtacgcctttttcatcgccctggcgcaggggacactgccgggaaaagcggcagtgtaggggctattccccgaggtaatgcctgagcgtcaggcgcagttcggggctcatgcggtcgagattgttgaataaccagcgcagatagcctggatcgttttcagcaatctcggcgacggccttaccccggtatttgccgaaggtaaaagtagtcagcagcgccggccgaccggtgatatcggccatttcgtcaggggtccagccggaaacattgatgatatccagcagcagcgcggcggtgatatagcagtcatacagcgcccggtggtgatgcagtcccggcggcgtagtcacgttcagcttacgtgacttatataaccccatattgctgtatttgattcccggccacaggcgtcgggccagcttcatcgtacagatccactcgccgtgcatctccggcaacacccggcgatcgaagctggcgttatgcgcgacgtaccacgggctgccatgatagtgcggaataatctcctcaatccacggcttatcggcgaccatctcttccgtgatccggtggatagccatcgcctgcgggctgatgggccgatcgggacgcaccagatggctcatgggattggtaatttgcccgtcgactatatcgaccgaggcgatttcaacgatgcccccctgcaggccgcaggtttcggtatcaatgacgcgcagcatggctcgctccagagcaaaacaataagcgtaatggaattggccgggcttgccaaccgacggggaggaggcgagcgcgcattatttctgtttcggctcccacggtagtcgcgaaagggagacggaggccagccgatgggcgatcagtcgttcatggaaccagtcgcgcagatgtgcaggctgttcacgctcgactaaatcagcgaccaccggcatattgtaccgttccttaaaagcaacgccggcggcggcgagatcgacattgactttatccatctcatcttgcgaaattttggccagatttctttccatcatccactccactctgcttataaatccggtcagggccagatgcctggctcgactctggcattatacagggttattctctgtgctacagacataacaaaagggaatgacgaatatgcgacttcttgctggacgcgcgttgcgtctctccgttgcgcttgccgggatgttaaccgcggcgggcgccttcgcccacgctcacctgcagcagcagatcccgaccgccggggcgcagctttcagcttccccacagacgttgacgctcagtttttccgaaggtattgaacccgcattcagcggcgtgaccgtcaccggtccgcagcagcatgcggtggctaccggaaaactgacccgcagcgccgataatccggccgaggtcacgttacctttggcggaagccttgccgccgggagagtacaccgtggcatggcatgtggtctcggtggatggtcataaaaccaaagggcaatatacctttagcgtgaagtaagcgatgctgaccgggctctatattaccctgcgctttgggcactttatctccctgatgctggcttttggctgcgtgctatatggcgcctggtgggcgccggtaccgctgagacgcgtgctgatgctgcgcttttatccactactgcgcccgctgctgctgatcggcgcgatctctacgctggcgctgtatctcctgcagggaggaatgatgggcgagggctggacggatgtctggcgacccgccgtctggcaggcggtggccgggacccgctttggtggagtgtggatctggcagatcctactggcgtggatcgcgcttgcggtagtgtggatccgtccccgtcacggcgcccgccagctggtggccctgctggcggcacagctgctgctttccgccggggtagggcacgccgctatgcacgatggtctcaccggcgtgctgcagcggacaaaccacgctgtgcatctcttctgcgtcgccagctggtttggcggtctgttgccctttatctattgcctgcgcctggcgcaggggcgctggcggccggccgcggtctataccatggcgcgcttttcacgttacgggcatctggccgtcgccggcacgattgccagcggagcgctcaatgcgctgttgatccagggaggattgattggcgcatcgccgtggggacgcatgttgttgatcaaatgtgcgctggtcgccgggatggtggtaattgcgttagtgaacaggtatgttctggtaccgcgcatgtcggcaagcggttcgcgggcggaaagcctgatcctgcgaaccacgcaggctgaaatagggctcggcgcgctggcgctgctggccgtcagtctgtttgccacctgggaaccttattgaattaactggcaaaatcatgaaaaaaattgttctgaccatgttgttactggcaagctccggggctgctctggcagcgccacaaattatcaccgtgagccgttttgaggtggggaaggagagctgggcgttcaaccgggaagaggtcatgttgacctgtcgaccgggtaacgcgctttacgccatcaacccgagcacgctggtccagtatccgctcaatgaggtggctgagcagcaggtcaaagccggcaaaaccaccgcgcagccgatctcagtgatccagatcgacgatccgcagcatccgggacaaaaaatgagcctcgcgccctttatcgagcgagcgcagaagctctgctaaactttctcgctatcctgctgtaataacatcaaaaaaaccgcccttgccggacaacggcagtggcggttttttcgctggcagaggccccctttccaggaattatgcagccactttggccgcggactggaaaagctgacgcgttaaactattcttatagtgcaaggcggcttagcctgcattaatgccaacttttagcgcacggctctctcccaagagccatttccctggaccgaatacaggaatcgtattcggtctctttttatctttatctgtcttctttcccaagagccagcgacatcctgtcagtcaaacacccgctggcctctggatgtcccgttatagcacaccgtttttagcatacacaattcatttacacataaatcgcatcctgtggaaggggaggtggcaacggtggaaccgtaaacgagggcggagaaaagaaaaaacctgcacctaaacaggcccggcgtgcaggttaactggcgggccaacatcggaagcctgctagtatacatatttgtatgataaataaaataagcaaaatctaaacgatttggcaattcatgcgattacacctcgccggctgacgaggtggcataaataataagcacgagcacttttgcgggcggaaaatattattgcggaacgctgaatgtagggtatatctggctttccagatagcagagcaatagccaaatttcatcgctgaaaataaaccatatgctcccgagcagaatgaccgccagaataatcagcagaaaaatttcggttttactcattatgcaagcgactatccggtggccttcggggaccctgatagtagcgaaatattgacataataagcaaacgccatgttgtaattcggcttcaccgacagtgcaatttagtcaccggcatgccgctgcgtcaatattgccacctgctccgtcagctgatccagcagctggaatcgccgccgatattcagcccgttttttactggcgatactctccagcgattttctttccagacatagcggtagccgccagcgccatgggctttccggctggccgtcgatagactgccagaactcgtcgtagctggcgtggaaatggcggcctttgctcaggcgatagcgcagggcgcggaacacgtgaccgttatcgctgacgccgtaaatagccgcgatttggctgcgagcggccagctgccagataaactccagcagcaggcgcttcggaaacaggccgtagcaggcgcgagtcgcctgcttaatcacctcatgagaaacgtgacgtcgtggcccctgcagaccgccgataaccagctgccaggcatcgtgatcacgggttacgctgaaggtggcgctggccagcagggtgtggtcgctgtcgcgcagccacagagtggtttcaccctcacgttcggctttgcctgccgaggaggcataaagagtaaaccggcggtcctcttttccgtttaacgtcagcagcgggacctcagacaccgcggtcatagcgtgcgccagccgcgatccgcgtagggtgtcgatatagcgataatggttgattaccgccaccgcccgctgccaggcgttgagatcgcgggtcagatattgacggtgtactttgcccggcagcgtagcctgtgcggccagcagctgattaaaatcatcccgagcgctgagcgcttccagcatcgctctggtggcgttataaaataaggccgtgcgcagcaaaaacttaaagcggtaatttttttgccgccagatgggggcaggtgtcaatctgcccatcaccagatcggcaataagatgcgagcgcggcgctagcacgccggatgaatgcaggctattgtctgtcacgataaacacctcgttgtgatttccccctattttaaagcgagccactgacaagcttaatcctctggcggactatatttgccgtctgtttaaaattgattgaggtgtaaattaaattccgtggacctttgctggaattacctataattaccgctgagaggtaattatatgtatcaacgtattaacggcagcgactggcgtaatatctggctgatgggcgatctgcatggctgctttgcgctgctgatgaatcgcctgcgtcagttgcgttttgatccctgggccgatctgctgatctcggtgggcgatctgatcgatcgcgggccgcagagcgccgattgtcttggcctgttgcgctgtcgctggttcagggccgttcgggggaatcatgagcagatggcgctggaggcgctggagagcggagatatgcggctctggcagatgaacggtggcgactggtacgtcaagggtgatgcgcggcagcgggccgacgtcgatcggctgctggcgcactgtcggcggctaccgttgattattgaagtggaatgcgggaaagcgcggcatgtgatcgcccacgccgattacccggcgccggtctatcgctggcagcagccggtggatccccaacgggtactatggagccgctatcgtctgagtgaacacctggcggggcgccatggcgctattgccggcgcagaccatttctggtttggccatacgccgcttcaggcgcgttatgaccacgataatcaacactatattgatacgggcgctgtgtttggtggggcgctgacgctggtggcgctgcagtcggcaggctaaaagtcgctgtattcgctggcgggttgccagaagccatcaataaaatcttctatcgggtagcagccaccgtggcggatccgctgatcctccatcgccactaagcactgcgtttcctcgcggtagacgtctaccacaatgtcctcgcagccgccatccagatagcaaataaacaacactaaggcaaacatcctggcctcatgctcgggttcacatactatttagtgtaggggatgacggcgggacggggaaataaataacccgtctcaggcgacgggttcattggtgtcaggcaaggcgcatgacccaggcatcggactggcggtcgtaatgtttacggtagagaacggaatgttcgccattgagaatcgcgggcacgctggtgtcggcatcccaggcgtcaagctgcatacataagtctggatcggatttgcagggtatgcttaacgttcgctcaccctgatgctcaccgtgcagttcggcatcgtctatttcgaacgcgccgatgcggacattggttttactcatcgcttcaccccatttttcagctgagttgtggtacgaccagttatggccgttatttttcagcgtagtcaatggggcgaaaagcgccagtcaaaaagtgcgcattttttgcgcggcctcacaccttgccggcaaaaagttttccatcgcgcaccagttcgcgcggatagctgttcttcagtcgggagccgacgcgcttcgccaggcccagcgggacgccctggaaggtcacaatggtttcatcctgcccaggcgcggtttgcggatagacgtcgcgcccgcgataccattcctccgcttcctcctgcgacagctcgaaggcgcgctgcggcgcggcaaaggcgataaccgcctcatgctgccagcggtaccccttattgtgcagctccgccaggcgcacgccgatgcgagaaaagcgcaccttgccgaacaggggctccaaagccagcggaaacagccacagctctttatcccgctgccacagcgtatggcctgcgtcccactccaggccaacagccctggcggcggcagttaccgcggcggcctcccggtccttcagcggcgtaaacgggaatttaccgaccttatagcctggcgccgggagcggatcgatcgccgcagttttgcgcaacctcgcgacaaagaagccttcgcaatcgtaaatttgcggaaaaacgtgcagaaaaccttccgcggttaaggcgtcggctgcgccgggaaacaactctcccagcggcaggatctcaaccgcctgcggatagcgggacagcagccactcaatgaccgattgattttcttcacgattcagggtgcaggtggaatacaccagcgtcccgccagggcgcagagcatggaaggcgctgtcgataagctcgcgctgagtggcggcgatgtcgaggttgctctccggcgaccagtttttcagcgcgtcggcgtctttacgtacaaccccttcgccggagcagggggcgtcaagcaggatggcatcgaaggtttcgggcaaggccgcgccaaaaacccggccgtcgaagtgggtcagagcgacgttgctgatgccgcagcggctgatgttggcatgcagcaccttcacccggctggcggagaattcattggcgagaatgccgcccgcgttgcccattcgggctgcaatttgggtggttttcgatcccggagcggcggcaacgtccatcacccgttcgggctgccggttatcggcgaacagggcggcgaccggcagcatcgaactggcttcctgaatatagaacagcccgctgagatgttcggcggtactgcccagcggcagcgcgtcgtcatcctctcgctcgatccagaatccttctgcgcaccaaggcaccggcgcgagttgccagccgtagggggcaaccagagagaggaaatcatcgacgccaatcttcagcgtattgacgcgaatactgcggcgtagcgggagctgacaggcggcgataaagtcgtcgaaagagagatgcgctggcatcgccgcgcgcatttgagcgagaaacgcttcagggaaatagacagtattttcagccacgggcagcgcaccacagaaaaaaagggtgcgcagtttagcacaaacgccccggcgcgtgacaccggggcgtgcggtttaccctctccccgcgccaggcgttgcccggggcgggagaagggggcattactgcggcagagcggtgccccactcccgccactctttcggctcgctctcctgcagcaggaagtgcttgccatcctgggccttcggcgccagcggcgtgcccggcggcgtggcaaaggcgatcccgccgcggataaactgattgaaggtaccggttttcaccaccccgccaatcaggccgaagtcgaggctgtaacccgaggccagccagaacaccgagttattacgtaccaggtactggtagcgcttactgatgcgcagcttaaccatcacccggtcagacatcgaccccagcgacagtccggtaaccgtcccgacttccagtccgcggaacaggaccggcgtaccgatgccaagcgaccccgcctccggcgcttccaccacgatgttcaggccgtcgatataacgcgaatcgctgatcgtcgtatcctggatctcaaaatcgcgtcgtgccgggccgcggccgggctcaacgttgatgtaggcctggaacagggtgtcgagatgttccacgcccgcggcggagatttgcggagtgatcaccgagaagcgggtcccggcgcgagcgaaggtgccgacgtattccggatagagcaccgctttcgcctgcacttcgtttttggcggtgattagctccagcgactggatttgaccgatgtcgatgccgagataacgaatcggcatcccggccgccatcttcccggcgtcgtacgcgtgcagggtgatttggccgcccacggcgcgcgccgccgtttcagatgcataaaggatacgtttgttattcagccgtgctccggcgctgctgccattgaggttatcgaaactgatcgcccctttgatcgcgcgcgccagcggcgaggcctgcacggtgagtccgttaccgtcaagcttgaccttcgcaccgccttccgcccagaagacgctgttgttggtcagcaggtagcggtactccggcttgatatgcagatcgatatcgaatgcatccttgcgcggtttgacggcgatgatctcgccgacggcgaatttacgatacagcaccaccgagccggcctgaacgtcaggcagcgtctcagcagacaggctcagggtagtggtcggcacttcgctcaggctattttcctgcgccttttcaaggttagcgtacagcggatagctgctttgcattttgcctttttcgccggggatcaccctgatcccgccgttcacccattcgctggcgctggcgcccagcacctgcacgccgtcgagccccactttgacgtccagacgactgttaaccacaaatttgctgtcgccgtgaattagatcgcggtattcagggtcaatggcaacctgaaaggttacccctttggccgtcagtttacgctccagcacctggccgacttttactccgtgcagcaccagcggctgaccgccgtcgatgccgtagctctccggcgccgagagggtaacggtggcgacgttgggctcatccagcagcgctttatccgccggcattaccgagaagtgattgcgtggctcgccttcgccgggcaccagctcaaaggtattgccggtgagcagggtgctaatgctggggttatcgagggagagcttcggcttcttcatctgaatcagcgttttctcccgcagcagcgtcaccacgctcgggtcgacggtcatctcgccagtaactttgccgccggggtttagattcagtttgcttaactggcccacctccagcccctgatacatgagcggcgtcgagcccgctttcagtccgtcgccatcaggcagatcgagggtcactaccacgccgcgctggctatgcgccagatcttcatacaggtgatattcatcgttttgcgaggcgacatgcgaatcggcgggggagtcaaaggcgatggcgccgttcaccagcgcggacaggttctccagttgcactttggccccgctcaggccgacgtcggccttgacgcctgagacgttccagaagcggctgccttttttcaccagattggtaaaccggcgctcgattagcacatcgatggtcaccccctgattattggcattcagggaataatcatacactcgcccgaccgggatttttcggaagtagaccagcgagccgctgttcagagagccaagatccggcgcctgcaggtggatcattagctcgccgttgttgatgcggtatttaggttgggtgtcgagggcgacaaagtgatcttcgggttcacccttgcccggcatcatgccgatgtagttcccgcccaccagcgcatcgaggcccgatacgccggccagagaggctttcggcgtgaccagccagaactgggtctctttgcgcagcgcatctttcatatcgcgtttgatgctggccgaaacctcaatcttactcagatctttactgaggctaatatcctggacggtgccgacttcaaccccctgatagcggatcggcgtccgtcccggcacgatgccgttcgcggactggaaatcaatcgtaatcgtcgatccgcgatcgtcaaagctggtccagattagccaggcggcaatcagcaacgcgatgaccggcagcagccagaatggcgaaatacggcgtttggtttttattctggcttcagtctgcgaagcgggcgtttcctgactcatgtgcgtcccaaagtaagcggctgtccagccattcaactgcaagaatagttaaaattaccgcgccgccaaagtaaaccgcagccggccccatggtgaaggcgaggagctgatcgcgatttattagcgacatggtgagtgagataacaaacagatccagcatcgaccaacggccaatccaggtgattagccgcagcagcaggatgcgggtgcgcaatccctgctcgcacttgaattgtatgctgagcagcagggtaaataacactataactttggtgaatggcaccaaaatactggcgataaacacgaccccggcaatggcgatattgctgctggccagggagatgatccccgagaggatcgtgtcgtcctggcgcgcgccgttgacgtagataatggagattggcaacaggttggccggaaagaggaaaaccagcgaggcaatcagcgccgcccagctgcgctgcaggctctgcggtcggcgatgatgcagcggcgtgtggcagcgtcggcagcggccgcgcgcgtcgcgatagccggtgtaatggcagccggtgcacacctgcagattattatcggcgcgggtcgccggacgctcgggatagaaacgctcccatagctcttcgacgttcatatgaataagcgtcaggatgctcaacaacgtcagggagataaacgccaccagaccgatgcccggctgcaggaaggcgtaatcctgcaccttgatggaggcgacgccgatgcccaccagatagatatccagcatcacccactctttaagcttgccgagcatcagcagcaccggccgcaggttcatccccagcacattgcccagccagagatagctgatggagaccaccagcagcaccggggcgaccaccgcgcaaaacagtaccatggcggcggtaatcggatcgccctgcgcggtcatctgccagatcccctgcaggacgttggcgtcgatgcgtacgcccaacagatgcaggcgcagcagaggttcagaccaggcgaaaggcatgagcaatagcatcgcgagggccatgctgcccaggcgggtcagcgaccagtcgcgaccatcgcgcaccttcgcgttacagcgcggacaccaggcgctttggttgcgtttgagcaccggtaagcggaagagcatgtcacactgcgtacagcgctgataatgcgcatagggaagcggcgtgctgacggtatgcacgaccatctttttcgcaggtttgagggtgggtgtttttatcggcatttattacgtacaggaatgaatgtatctcactatcttaacctatgaatgaattcatcttgagcccaagcgcatttaatgcttattttagtaggctgtacgtatcaggcagtaagacaacaaagtgaagatataatgagcaaaacagaattttacgcggatctgaaccgcgatttccaggcattaatggcaggtgaaaccagttttctggcgatgatcgccaataccagcgcgctgctgttcgagcggctgagcgaggtcaactgggccggtttctaccttctggaaggcgataccctggtgttgggaccgttccagggcaaactggcctgcgtgcggatcccggtcgggcgaggcgtatgcggcgcggcggtggcgcaggctcaggtccagcgcgtcgaggacgtccacgcctttgacggccacattgcctgcgatgccgccagtaattcggaaattgtcttccctctgcgcgtgaatggccagattatcggcgtgctggatatcgatagtccggcttacgggcgcttcaccgctgaagatgagcaggggttgcgcacgctggtcgagcatctggaaaaactcattgcggccacggattatcaaaaaatctttacccgtgtcgtgggataatcaacggataacgtagcatttagcgaggacgtcattataatgtcgcctgttcatgcctgcggcttgttggctacgtccgttgtaatcaggaaatttcatggaaaatcaacctaagttgaatagcagtaaagaagttatcgcctttctggccgaacgtttcccgcagtgctttagcgctgaaggtgaagcgcgccccctgaaaatcggaatttttcaggatctcgttgagcgagtgggtggtgagatgaatctcagcaagacccagcttcgcgctgcattacgtctctacacgtccagctggcgttatctgtacggcgtaaaagccggcgctattcgcgttgacctggatggcaatccgtgcggcgaactggaagagcagcacattgcccatgcgcgtcagcagctggaagaagcgaaagctcgcgttcaggcgcagcgcgcagcccagcaggcgaaaaaacgcgaagccgctgcggccgcaggccagcaggatgaaggcgttcgccgcgagcgtaaaccgcgtcctcagcagccgcgtcgtaaagaaggcgctgaacagcgtaaaccgcgtcctgttgcggccaaagccccgcgtgaagagcgtcttactccggtatcggatgtttccgttctgaccgtcggccaggcgctgaaggtaaaagcaggcaataacgccatggacgccaccgttctggaaatcaccaaagatggcgttcgtgtacagctgacttctggtatgtcaatgattgtacgcgcagaacacctggtgttctgaaacggaggccgggccaggcatgaacacattttttaaaatcaccgcgcttgcgggcctgctggcaatagcaggccatgcattcgctgttgatgacataacccgcgcagatcaaatccccgtgctgaaagaagagccgcagcacgcgacggtaagcgagcgcgtgacgtcgcgctttacccgctctcattaccgtcagtttgatctcgacaacgccttctcggcaaagatttttgaccgttacctgaacctgctggactacagccacaatgtgctgctggccagcgatgtggcgaagtttgcggctaaaaaagaccaaattggcgatgagctgcgcagcgggaaactggacgtcttttacgacctctacaacctggggcagcagcgccgcttcgagcgctatcagtatgcgctgaaggtgcttgaacgtccgatggactttaccggcaatgataatttcaaccttgaccgctccaaagcgccgtggccaaaagacgaggccgagctgaacaagctgtgggacgctaaggttaagtttgaccagttaagcctgaagctggcgggtaaagacgataaagagatccgcgacaccttaacccgtcgctataagtttgctatccgtcgcctggcgcaaaccaacagcgaagatgtcttctcgctggcgatgaccgccttcgctcgcgaaatcgatccgcacacaaattatctgtcgccgcgtaataccgagcagttcaacaccgaaatgagcctctcactcgaggggatcggcgccgtgctgcagatggatgatgactataccgtcattaattcgctggtggcgggcggtccagccgcgaaaagcaaagcgatcagcgtcggcgatcgcatcgttggcgttggccagaccgggaagtcgatggttgatgtcatcggctggcgtctggatgacgtcgtggctctgattaaagggccgaagggcagcaaggttcgtcttgaaatcctgccggccggtaaaggagccaagacgcgtattgtaacgctgacccgcgagcgcattcgtctggaagaccgtgcggtgaagatgtcggtgaaaaccgtcgggaaagaaaaagtcggcgtgctggatattccaggcttttacgttggcctgaccgatgacgtgaaagtgcagctgcagaagctggaaaaacagaacgtcagcagcatcatcattgacctgcgcagcaacggcggcggagcgctgacagaggcggtatcgctctcgggtctgtttattccgtccggtccggtggtgcaggtgcgggataataatggcaaagtgcgcgaagacagcgacaacgatggcgtggtttattacaaagggccgctggtggtgctggttgaccgctttagcgcctcggcgtctgagatcttcgccgcagcgatgcaggactatggccgcgcgctgatcgttggcgaaccgaccttcggtaaagggacggtacagcagtatcgctcgttgaatcgtatttacgatcaaatgctgcgtccggagtggccggcgttgggttccgtccagtacaccatccagaagttctatcgtattaacggcggcagtacgcagcgcaaaggcgtgacgccggatatcatgatgccaaccggcaatgaagatcgcgaaaccggcgagcagtatgaagacaacgcgctgccgtgggatagcatcaacgcggccacctatgtgaagtccggggatctgaccccgtttggaccggagctgctcaagcgccacgacgagcgtattgcgcaggatcctgaattccagtacatcatgaaggatattgcccgttataacgcgatgaaggacaaacgtaacatcgtctctctgaactacgcccagcgtgagaaagagaacgaagaagatgatgcgattcgtctggcgcggattaacgatcgcctgaaacgcgaaggcaagccgccgctgaaaaaactggacgatctgccgaaggattaccaggagccggatccgtatcttgatgaaacggtccatatcgcggtagacctggcgcatctggaaaaagcgcgcccggcggtggaaccgccggctagcaaataagttgctaacgggcaccctgagaggtgcccgttttttttgtgcgcgttgtcatcgccattcagctcatctaacaaaatgtcaacctgcgctgccgctgtcagcaagatgctacaaaatgtaaagttgtgtttttatcgtgacttagcgggggctgatggttgaaaattgcagcctgacccatacgatgtgggtaatcgcatagtgcgttttgttaaattgaggtaaaaagaaaattatgatgcgaatcgcgcttttcctgctgacgaacctggcagtgatggtcgtgttcgggctggtgttaagcctcacggggatccaatccagcagcatgaccggtcttctgattatggccctgctgttcggcttcggtggttctatcgtttcgctgatgatgtcgaagtggatggcgctgaagtcagtgggtggggaagtgatcgagcagccgcgcaacgaaacggaacgctggctgatgaataccgttgcgcagcaggcgcagcaggtaggtattgccatgccgcaggtagctatctatcacgcgcctgacattaacgccttcgccaccggcgcgcgtcgtgacgcctcgctggtcgccgtcagcaccgggctgttgcaaaacatgagccgtgatgaagcggaagcggtcattgcccatgaaatcagccacatcgccaatggcgatatggttaccatgaccctgatccagggggtggtgaacaccttcgttatctttatctcccgcgttatcgcgcagattgcggccggtttcctcggcggcaaccgggaagatgaaggggagagcagcaatggcaacccgctgatctacttcgcggtcgctacggtgcttgagctggtgttcggtattctggccagcataatcaccatgtggttctcgcgttaccgtgagttccatgctgacgccggctcggcgcgtctggtaggccgcgagaagatgattgcagccctgcagcgtctgaaaaccagctatgagccgcaggaagccagcagcatgatggcgttctgcattaacggtaaagcgaaatccatgagcgaactgtttatgactcacccgccgctggataagcgtattgaagccctgcgtagcggtgaatatctgaaataatctatcttctgacgctgaaaacgaaaatccgcagcccgcaagctgcggattttttttaccgtccgtcaggctgcgcgcggctgagtgacccgcagaccgctaattagcgcggcgacgatagccagggtgccggccagcagcagggcggtgtgggtgccgttgttaccgagcaaattgaatagcagcgccaccagcgccgcgccggtgctctgtccgagcaggcgagcggtgcccagcatgccgctggcgccgccgctacgatggctcggagccgaggcgacgatggtatggttgttcggcgactgaaacagcccgaagccggcgccgcacagcgccatgcgccagatgatatccagatcggagggcgacgagggcagcagcgccaggccgaacaggccgcaggccataatcagcaggccgatagcccccagcagcccggcatgacatttctcgatcaaatagccggccagcggcgccatcaccatggtcgctaacggccacggcgttagcagcagacccgtctccacttcgctgcgccccatcatcgactgcagaaaaaagggcagggagaccatcgccagcatctgcgcgcagaaggagcagatggaagtgcagatagagagagagaagagtgggatacgcagcaggtcgaccggtagcagggggacgggcatcgtgagctggcggcgaacgaagaagaaccccaccaccagcatagcggcgacctccgccagcaccagctgagtggactgcccctgggcgaaaccgctcagggcggtgatcagcagcccgaaggtaagggcgttcataatggcgctcggcagatcgaagcggatgattttgctgcgcgcgctgttgggcggcagaaagcgcatggccagaacaaaggcgacgatgccgagaggcacgttaattaaaaacagccattgccatgaggcgagggagaggatcgctgcggcgatagtcgggcctgccgccgaagagacggcaacgacaaaggagttaatgcccatgccgcgaccaagaaagcgctgcggataaatcagacggatcagcgcggtgttgacgctcatcagcgcggcgccgcccaatccctgcgcgacgcgagcgaaggttagcatttcgaggctacgcgacagcgcgcaggccagcgaggtaaagataaacaccaccaggcctatcttatagatacgccgatagccgaccatgtcgccgaggaaggagagcggcagcagggcgatgacaatggcgatttggtaggcgttaacgatccagattgaagccgccggtgaggcgttgagatcgctggcgatagtcggcagcgcgacgttggcgatagccccgtcgagcacggccatggtcagcccaagcacgatggtcagaatggcgccatagcgttgcggcaacggcacgccatcagaagaatttttatccatggtgaatatgagtcttaaatgaaacggttttttgaatgatgagtttagcattgattaattcgcagtatgtcgcagatttgtaacgaagtggcagaagaatgattgcggctcagaggcggcgaatttataataaaaaccggttctaatttttataaaacagttacgacgaggtgataaatggcaggtgcagatttggataaacagccagattctgtctcttcggtattgaaggttttcggcatcctacaggcgctgggtgaagagcgtgaaattggcattaccgaactgtcccagcgcgtcatgatgtcgaaaagcaccgtttatcgctttttacagaccatgaaatcactgggctatgtggcacaggaaggagagtctgagaaatactctctcaccctcaagctgttcgaactgggcgcgcgcgcgctgcagaacgttgacctggtgcgcagcgccgatattcagatgcgcgaactttcgcggctgacgaaagagaccatccatcttggggcgctggatgaagacagtatcgtctacatccataaaattgactcgatgtataacctgcggatgtactcgcgtattggccgccgcaacccgctgtacagtaccgcgattggcaaggtgctgctggcatggcgcgatcgcagcgaagtggagcagatcctcgacggcgtggagtataagcgcagcaccgagcggaccattaccagcaccgaggagttgctaaaagtgctggatggcgttcgcgagcagggctatggcgaggataatgaggaacaggaagaggggctgcgctgcattggcgtgccggtgtttgaccgtttcggcgtggtcatcgccgggctgagcatctctttcccaacgctacgtttctctgaagaacgcttgcatgaatacgtggcgatgctccaccaggcggcgcgtaagatttctgaacaaatgggatacaacgactatccgttctgaggcggcggataacggggttggcgaccgcggcgctacgtcgcgatcgccggttcgatgttagccgttatcaaccacggttgtgcttttacgcagcagagggcaactgctgacgccgatcactccgctgtcggaatgaacataaagtgcggtgctgactccgcgggcggtgagatattggcacttaagacccagaccgccgacgttttcctcactgtggaataacaccccataaccgctcaataatacgccaatccataagatagccaccaagataatagtacgaatgattaatcgcattgatgcctcattatttgtatgatccctggcttgattttgacacgaacacgttttgaaacaagtcgatgattcctaaacttacctttcgtaatacagttagccgcggtttaagaaggccgtgctatcctggcgacattgcgtactgatgcggagagtggagtgaaaaaattacggtgggttttactgatagtcatcatagcaggctgcctgttgctgtggactcagatgcttaacgtaatgtgcgaccaggatgttcagtttttcagcggcatttgcactattaataaatttattccgtggtaagacatttttctgccgactgatttccttctgcgccgcgggtggtagaatgaacgccttctctttgaggtggtgaaatgagtgagttactaaatcctgggattttaaatctggcatcgctggctgtgtccgtggcgctgctgcttgtcggtctgttgttatggttcttcgtcaaccgcgccagttcgcgggccaatgagcagatagagctgctgcaagcgctgctggatcagcaaaagcggcagaatgcgctgttacgtcgcctgtgcgaagctaatgcgccagagaaagaggatgtggctgagccgaccgtcgccggcaaggcgaaaggggaggatgagtttatccgcctggtagctgaacgttaaggtgcccgacaggtgtgcatcataagatgcgcacctgcatgatagcgggcggtaatatcttattcttattccattattcctttcttagtgcaatatcctctttattacacgctgtaaataaagtcattctcgccgcgtttattgttgggtaacgtgacactgtcatctttttttcattattaaggtgcagaattagcactatttttagcgtgacgactaacaggttttattatcactacactggcacggcttagcgatttttagcctggagttataacgaattatgcgcatcaatattcaccgttgcccaccagacgcttacattacagcagttcgtgtacggacatacctggacgaagcgaagttgttgagctatggtaaaaaagttgcagtaatgaggcaacgaatgggcgatattggctgatgctgtagcgccttgccaggggcggcaaagacgcataaatgtgcaggcgatcaaatgattaccttataatttgtgcgaacgatcgagacacgtttaaaaatggcttgccattatttacgtagtgtgtgataacacgtttcgggttaaacgaggtacagttctgtttatgtgtggcattttcagtaaagaagtcctgagtaaacacgttgtcgttgaataccgcttctctgccgaaccttaaattagtgcctcatgcagttatgtgtcagttttatctaggtaaacgccagcaggcgaagaaaacagtctaaggaattttgcaaatggcaaagattaaaggtcaagttaagtggttcaacgagtctaaaggttttggtttcattactccggctgatggcagcaaagacgtgttcgtacacttctccgctatccagggtaacggcttcaaaactctggctgaaggccagaacgttgagttcgaaattcaggacggccagaaaggtccggctgcagttaacgtaactgctatctgatacaagaccactcttcttgtataaaagcctcgcctgcgcggggcttttgcatttttattgcaaagcatgtcatttttccccctcccgtcgcgtcttgttgcaaatactcatctttattagcattgtgtagcagtctgttttgctaattttctgttaaatcagttggttgcaaaacaatgccggagctatggtgctaaagaaaaaaacgaagtccgccgccagtttcaccccgattcgcttcgggttactgtgtgtggccattctcggttgtctggggctgctgctggtccgcgtgggctggctacaaattatctcccccgataacctggtaaaacaagaagatatgcgctccctgcgcgaagaacccgtagcggttgagcgggggatgatcagcgaccgggaaggacggccgctggcggtgagcgttccggtcagtgctatctggatcgacccgcagaccactatggagaagggcggtgtgggctatggaccccgctggcaggcgatggccgaagcgctgcacctcaacctcggagagctggcccagcgggtacagagtcatccccacgctcgctttctctatctggcgcgtcagatcaatcccgagcaggcagagtggattgataaactgcatctgccgggcgtctacctgcgcgatgaatcgcgacggttctacccggcgggccacgtggctgccaatctgctgggctttaccaatgttgataatcagggcatcgaaggggtggagaaaagctttaacgcccagttgaccggtaaacccgggcgacgtctggtgcgtaaagataaacatggtaatgtcattgagaacattaccgaagtgccgccggtaccggcgcataatctgcagctgagtattgatgaacgcctgcagacggtgacggaagacgccctcgacaacgccgtccgctggaacaaagcagagtccggggcggcggtattgatcaaaattgataccggcgagatcctggcgatggccagctatccggacttcaatccgaacaatcgcgatagcgcgacgctggatgattttcgcaaccgggccatcagcgacaccttcgagcccgggtcgacggtcaaaccgctggtgatcatgactgcgctgcagcaggggattgtccagccagacagcgtggtggatacccatccgttcgtcctcgatggccatcgtattcgcgatgtgggctattatccggagctgagcctgaccgggatcctgcagaaatccagcgataccggcgtgtcccacctctcgctcgccatgccggtgcagcatctgatcgatacctataaagctttcggcttcggcgaaccgacggggctggggttgaccggcgaaagcgccgggctgatgccgcatcgccgctactgggggcaactggatcgcgccaccttcgccttcggctatggtttgatggtcaccccgctccagctcgcccacgtctacgccaccatcggcggcttcggcattgcgcgaccactgtcgattacccgcatcgatccgccggtgatgggcacgcgggtgatgccggagagtattgtgcatagcgtggaacatatgatggagagcgtggcgctcccgggcgggggcggtaccaaagcggcggtacgcgactaccgggtggcggtaaaaaccggcacggcgaagaaaatcggcccggacggcaaatatatcgataagtatgtggcctataccgccggcgtggcgcccgccagtcgaccacagttcgcgctggtggtggtgatgaacgatccgagcaatggttcctattacggcggcgctgtgtccgcgccggtcttcagccagatcatgggcgatgtcctgcggctggagaacgtcatgccggacggcatgccgcaaggggcggagaatctgatcgtaatgcacgatagccacccacaggggccggcgctgtaacagtggtctgcaggggcgaatagcgctacactttcgccctttcagcaacaccggagccgtcatgtcatacagttgccccctttgtcacgcgccgctcagccgtagcgacaaccactattcctgcccgcagcggcaccagttcgatctggcgaaagaggggtacgtcaatctgctaccggtgcagttcaagcggtcgcgcgatcccggcgatagcgccgaaatgatgcaggcccggcgggcgttcctcgacgccggacattatcggccgctacgggatgctatcgctgagcggctgcgacattacgcccctacggatttactggatatcggctgtggcgaggggtattacacccacgcgtttgccgcgatcgccagccgcagctgggggctggacgtgtcgaagccggcgatccgcgcggcggcaaaacgctacccgcaggtgaatttttgcgtggcctccagccagcgcctgccattttccgacgctagcttcgacgcggtagtgcgcatttacgcgccctgcaacgccgaagagctggcgcgggtggtgcgtcccggtggttgggtgatcaccgccacgccgggtccccgtcacctactggagctgaaagggctgatttacgatgaagttcgcctgcatgagctgaagacggaagcgatgccggggttccgcctggaggctcagcagcagctggcttacccgatgatcctgacgggaagtgaagcgcaggccctgctgcagatgacgccgttcgcatggcgggctaaagccgaagtgcacgccgcgctgcgtcagcagccgacctttggttgccagaccgattttatgatccactgctggcagcgcgaagcgtaaagcttaaccggcgaaatggctccagaggatttcgctgccgatgccaatcagcacgataccgccgagaatttcggctcgtttgccaagcagcgggccgataaagcgaccgaccatcatccccagcgtcgacatgataaaggtggcgcagccgatcgccagcgcggtggtcacaatgctgacctgcaggaaggccagaccgacgccgacggccatcgcgtcaaggctggtggcgaaggcggtggtgaccagaagccagaaaccatgtcggtgaggcgcctcgcacgcctcgtcgctgtcgccgcgaaaaccttcgacgatcattcgcccgccgagaaacaccagtaaaataaaggcaatccagtgattccactcgaggataaactggctggccagcatgccaagcccccagccgaccagcggtgtcagggtttcaatggcgccaaaaatcagcccggtgcgtactgcctctgaaaatttgggtttatgcagggtggcgcctttgccgatggaggctgcgaaggcgtccatggacatgccgaaagcgagaagaatggtagcggataaattcatgtgcgtgtcctgaccggggataatccatatgacacatcgctgcccccagtaaacatacgcggagccgctcaatggctgagcaatacgtacagcagtgatgtatctatggtctcgcctgattgaatctcttcaacccgtacgtgccacgttttgcaacgagtatgttgacacgtacatttcctggcgggcaggaaatcggctactccccaacgacgggcgcaaccttaacatatttttagaatataaaacaataacagaagagggctattttaataaccaaatgataacgattttcatttaaatttataagtgaaaaaatagttaataaaaaagataaggttaggcgggaaatatagccgtggctataatatttctccgctgctaacgggaataatatagcgctggctatatttttaagtcattgagttgtaatgagaagtttgtatatcttctccagatcgtcgatatttcgtacgcgtatcagcagccgccgttgctctaattgcatcaccagcacaccgtcctcggataaattcatctctttaatccgctgatattctatccacacgttggcgaagaaaaagccgcgcggtttaaaaatgattttcggcgtacggatccagaataaatagagccccatcagcgccagcacagataatagccaggtggtgatcgccgtgccgtgctgggtgatgttgttatagatcagaatggcggtgaggccgacaaagatcatgccgtcaacgcgactgcggcgaagcagggggatggccagcagtaccgggccgtttcgcctcggcataataaactggtcatatatcgcgtaggccagtagcgcaaggataaacaggatgatcaccaggtccgtgaaggtcattgctttgcgtttctcctgataaaaaaaagccgggggcaagcccccggcgtacagcctggaaattacagacccagcaggccgaccgcgtagccggcgataccgatgacgaagaagccaacgatgatccacagcgggttaactttcttacgcagcagccacatacaggcgaaggtcaacagcagcggcaccagaccaggcatcagctgatcaaggatagtctgcaccgtggtgacgtgaacctgtccgtcagagccggtgatttttgacaccaccatcggaatgttcacatgcgtccacttgttaaccagcgcccccatgacaaacaggccgaggattgacgccccctcagtcagtttctgcaggaagccgccgcccatatctttaacgatatccacgcctttgcgataaccataggcgacaccgtagtaacgggtcagcagacgcaccgcgttgaacaggataaagaacagcagaggaccgagcaggctaccgctcatcgcgatcccggcgcctaaggctgcaaacaccggacgcacggtaccccagaagatcgggtcgccaacgccggccagcggtcccatcagaccgactttgatgccgttgatagcgccatcgtcaatctctgcgccattggcgcgctgctcttccatcgccagggttacgcccagtaccggagcggcaacgtaagggtgggtgttgaaaaactcaaggtgacgcttaattgcctgcttacgcgcatcgttgttctccgggtacagacgacgaatcgccggaaccatagagaagcagaaccccagcgcctgcatacgttcgaagttccatgaaccctggaacaggttagaacgaatgaacacgccacgaatatcactctgtgtgagttttttctcggtggtatttttagtcatatcaaccatttcgctcacctgttagtccagttcgttatcgagatcgttgttaccagccgcctgagccggcgcaccggcgacgcggttatatttcgggctcagctggatgtagaggattgccatgaccgcaccaatcacgcccagggccaccaggttgaagttggtgaaggcggcggtgacgaagccgaggtagaagaacggcatcagatagcctgcgcgcatcatgttgatgaccattgcataaccgacaaccacgatcataccgccggcgatgttcagaccgctggtgaccacttccgggatagcattcagcaggccctgaacttcgctggtgccgacggaaatcgccacgataacggccgggatagcgatacgcatcgcctgcaggaacagggacgagacgtgcagccacgacagggcggtcaggttgccattctccgccgctttatccgccgcgtgctggaaggccacggtgatggtgcgcacgatgatggtcagcacctggcctgccgccgccagcgggatagccagcgcgataccggcgccgatgctctgatggccggcaataaccaggacggtggaaataatggacgccagcgcggcatcaggggctaccgccgcaccgatgttcatccagcccagggctatcatctccagcgtaccgccgatgataataccggttttcatatcgccgagaacggcgccgatcagcgtacaggcgatcagaggacggtggaactgaaattcatcaagtaccgactccatacccgcaatacacgcgacgatgaacaccagcacaatctgaagaagggtaatctccattgtacttctcctgttgattaagtcttaaagtgaaaactggggcgcgatccgccgggttatttatcaaccttagcgatcagatccatcattttcagtttcgggtcggtggacactttacgtgcctccagctcgataccgcgggcgttcagctttttaaacgcctcaatatctttggcatcgactgaaatcgcgttgttaacctgggttttaccctggcggaacgccataccgccgatgttgacgctggtgattttcacgccgccctcgacgatacgttcaacgtcggtcgggttagtaaacagcagcataacgcgctgtccggcatacttggggttgttgtagacgcggatcattttggccacatccaccacgtgagcggtgacgcccggcggcgcaacctgggtcagcagagttttacgcacggtatccgcggccacttcatcactgacaacgatgatgcgggtaacgttggtctctttggtccagcgggtggcgacctgaccatggatcagacggtcgtctatacgcgcaaggccaattaccatgtagtcgttcgggcccatgggtttggccggtgcggcggcttttggcgctgcggcaggcgcgggcgcaggggccgctttttccaccggtttggctttaagcgctttcacgccttcgctgccggtttcaaccgctaaggcgaccagttcatcaaaggaaggatcgtcgtcgcgggccatgaaggtttccaccagcatcgggatattgacgccggcgataacttcgtaatgctctttatcgacgacaatgcggctcgcagcgttgaaagggctgcctccccatgtatcgacgagaaacagcacgcctttactggtatccagttttgccaactgggcgttgtatttctcgatcaacgtttcggcattttcacccggaacgaaatcgatccagccaacgttttcctgctcgcccaacagcatttctgctgttttcagcagctgttctgcagcccaaccatgtgtgcctattacaatagcaatcgtcacttgctacctcctttattatcgtgaatgcatcatctgctttgatacatcctgaatcactcttgaggacaaaatcgattcagttagggtgtaagatagaaaatagttactaccgcgaattattttagacagtgaaaaaataattaatgtgatgaagatccgttaatcacgtatcgtctgcgaataattttgcagcgcaaaaaatagccttagttattgcaaattcaggtaaattatttccaatttcgatctatattttgctatgtttaacttccgtttaattactcaggagtatagggcatagcccgcagtatggaccgtcatcgacgtcttttcactttctggcatctgattgccacctctacgtatcccgcatttctttcagcacctggtgtcgcgcccctgcatggcatggcaatgactgaccttgccgcaaaccggagtcgtacatggaattgttaatggatccctcaatctgggccggcctgttgacgcttatcgttctggaaattgtgctcggtatcgacaacctggtgtttattgccatcctggcggacaaactgccgccgaagcagcgcgataaagcgcgtctgatcggcctgtcactggcgctggtgatgcgcctggggctgctgtcggtcatctcctggatggtgacgctgacgaaaccactgattaccatcgccgatttctccttttccgggcgcgatctcatcatgctgctcggcgggatcttcttgttgtttaaggcgacaaccgagctgcatgaacggctggaaaaccgccagcacgatgccggtcacggtaaaggctatgccagtttctgggtagtagtattgcagatagtggtgctggatgtcgtcttctccctggacgccgtgatcacggcggtcgggatggttaaccatctgccggtgatgatggcggcggtggtgatcgcgatgatcttgatgctgctggcctccaagccgttgacgcgctttgtcaaccagcacccgacggtggtcgtgctctgtctgagcttcctgttgatgattggccttagcctggtggcggaagggtttggcttccatattccaaaagggtatctgtacgcggcgatcggtttctcgatcattatcgagttctttaaccaggtggcgcgccgtaactttgttcgccaccagtcgacgctgccgctgcgcgctcggaccgcggatgccatcctgcgcctgatgggcggccgcaaacaggcctccgtcagccatgacgcagacagtccagccgcggtgcccgttcctgagggcgcctttgcggaagaagagcgctacatgattaacggcgtgctgaccctggcccagcgctccctgcgcagcatcatgaccccgcgcggagaaatcagctgggtcgacgctgagcagagtgaagatgaaattcgtcgtcaactgctgtcgtcgccgcacagcctcttcccggtctgccgcggagagctggatgaaatcattggtatcgtgcgggcgaaagagatgctggtggccctggagtcgggggaaaacgtcgcggcgctggcttctgcctccccggcaattgtcgttccggaaacgctggacccgatcaatctgctcggggtcctgcgtcgggcgcgcggcagcttcgtcatcgtaactaatgaatttggcgtggtgcaggggctggtcacgccgctggacgtccttgaagccatcgccggtgaattcccggacgctgatgagacgccagagattgtcatcgatggcgatggctggcttattaaggggtcgaccgacctgcatgcgctgcagcaggcgctggggctggatccactgatcaatgacgatgaggatattgccaccgttgccgggctggtgatctccgctaatggtcatatcccgcgcattggcgacgtcgtgtcgcttccgccgctgcattttaccgtagtggaagcgaatgattaccgggtcgatctggtgcgcgcggtggtcactcgtccgccgagcgacgaagaagagtaatcgccaggctcgccggccgctgcggccggcgagttattctgtcgtctcgctctcaccctcaccctcactctcactctcctccctgctggccagccacgccgggaacgcctccaccggcatcggccgcgcataataaaacccctgcagcacatcgacgccgtggctacgcaggtagttttcctgctccagcgtctccaccccttcggcaacggtaacaatatgcaggcggttggcgagggcgataataatatctgtcaccgtcgcgttcacgctatctatgccgaccgagctggtgaacgagcggtcgatcttcaggacgtccgggcgcagcttttccagccatgagagcgaagtattgccggtaccaaaatcatcgatcgccagctgtacgcctttaaagtgcagatgttcggccatatgctggtcgccatcctgcaggacatcgcgttcggttagctcgaccaccagctgctgcaccggatccacgctgaaccagtaattgtgcaggtcgcgcagcaggagtccgttagcgaaatggcgcgcggcgacattgatcgcgatgtgaaaatggcggtcgcgaggaaaagcgtccaggcggcgagcggtttcggcaatcacatagcgggtgagagggatgatcagattattgccttcggcgatggggataaatacctccggcgaaatcgtcccacggcggggattattccagcgcagcaggatctccaccccgcagcagcggccgctgcgcgcatcctgcagcggctggcaccagagggcaaactcccgggccgaaatgccaaggcttatttcccgcgagaaactcattctgccggcggtggccagccaggcgatgccggtcattagcaggctaaaaatcagcgccagcggcagctcgccgggcagctcctcaagcgcaatcgccgaggcgccagggccgttaatattgacagtaaacggaaactccgtagagcgctggcgataaatcaccgtgccctgcgggacatgcgttttttcgagaagcccatggcggctgctaaaataacgatcgccaacctgcaggctgacgtcgctgatcagggccgatttttcattaagaattaaggttcccagcagctcaatattcaccaccagcatcacgccgtccaggccgctctccgcggctggataccattggatcagtaccggcgagcctttgagcaaggagctgtcgttcgagaagagcagcagagggcggggcacaggaagcgcgggctgcaggcgatgtaagtctgcctgtcgcgggccaaaaatactggaacagtaaacgatacctgacgtgacgagggcgacggaacgaatggtttgcaacgaggccgccattttgcgcagcgtcagatggatatcagggcagggtttgcccaccagagggagcagggtggctcgctgcgcgcttagcgggcgcaagatgtcattgagcgccgccacccgttggctggcggccgtgcgaatataatcttcatttacgctgcgctgcgaaataaatcggatggctaatgtggcgcccagggtcgccagggctaccagcaggcagacaataatgcgtttgtgacgataggccgtaatgactttttgtgcagtctgcatgtgcgacaccctgtcgacaggacgagtggttaagcgtggcttattttatagagcaagtgtagtggcagaatatcgccaggtatagaaaaaagaaaatgcgccgttgaaggcgcatcagggagatttcagtcaccagggttaaccccctgcgcgctttgcaggcgcagagggacacgaatagtttagtcacactgaactttaatcgccaggccgccgcgcgaggtttcgcggtacttggcgttcatgtctttaccggtttcatacatggtctcgatcaccttatcgagcgagacgcgcggttcgctggtgcggcgcatcgccattcgcgcggcgttgatcgccttgacggaggcgatggcgttacgttcaatgcatggcacctgcacctggccggcgaccggatcacaggtcaggccgaggttgtgttccatgccgatctccgccgccacgcaaacctgttccgggctggcgccgagcagttcagccaggcccgccgccgccatcgagcaggcgacgcccacctcgccctgacagccgacttccgcgccggaaatggacgcattcatcttatacagcgcgccgatcgccccgcaggccataaagtagcgaatatagatctccgggctgacggactcgataaagtgatcgtaataggcgagtaccgccggaacgatgccgcaggcgccgttggtcggcgcggttaccacgcgaccgccggcggcgttctcttcattgaccgccagcgcgaacatattgacccagtcaacaacgttcattggatcgctggagagcttatcgctggccaccagcagacgacgcagcgccgaggcgcgacgcggtacgcgcagcgggccaggcagcacgccctcggtgttcatcccgcggtcgatacaggcgcgcatggtttgccagacgttggcgaaataatcctcgatctcttttttgctgtgcagagccagctcgttctgcatcaccatcccggagagcgacaggccagtctctttgcagtaggccagcatttcctgcgccgatttaaatgggtagggcacctgcagttcgttggcgttttccttgccgaagtgctcttcgtcgacaataaagccgccgccgatcgagtagtaggtcttgcagtagatctctttctcgccggcccaggcgtgaatggtcatgccgttttcgtgcagcggcaggttgtcgctgcgaaaacgcatgccgtcatccgccgggaagtcgacctcatgctggccgttggccagcagcagacgaccacgcgcttcgacgtcacggataaaagccgggatcgcgtcaatatcgaccgtatcgggctgattgcccgccagtcccatgataatggcgatgtccgtatggtggcctttgccggttaatgacagtgaaccgtagacgtcaaccgccacacgagtcactgcattaagcaatcctttttcgaccaggtcatcgacgaactgttttccggccttcatcgggccaacagtgtgggaagatgagggaccaatccccaccttgaacatgtcgaatagactaatcacgataatactcctgacagggttaccgcgggtgcggtaacgatgtaataactgcgcatagtgtaagagggaagcgccctgtcagttcaactattcacatgaattaaactaatggctaaccgcgattttactaataatgagagcgccctctcattatcagtatagctaaggacgtgcgccaatttgcagcgccagctcgcgaatgatcccggcggtcattccccagacaaaataatgctggtaccaggagagccagacgcggtggtcgttgccccggcggtggatatcgagcggatggtagcgcccaaggcgcagggcttcggcgagcggcatttcaaataccgcggagacttcgtcctggctggcgggatagtgcagatccgggggaataatgcccaccaccggcgtcacctgaaagccggtgacgctgtccaccggcggcaggacgccgatcacctcgaccgcctccggcgggatcgccacctcttcctgagcttcgcgcagggcggcggcgataagcgtcgcgtcggtattatctactgcgccgccgggaaaggcgacctggccggcgtgcttgcgcagcagcggcgaacgctgggtcagcagcaggccgggctgcggccggcgcacgatcggcaccagtaccgccgcctgccgctgattgagcgcatggcgcgaaggctgcgggcgcagaagctgaaagcgggacagaaaatcatccagattaagggcgcgatccgccatggtctagttctccagttgctgcaggatacgattaactttatcaaaagtttcctgatattccgccgcttcctcgctatccgccacaattccgccgccggcggagcagtacagctgtccctgccatgccgtcagggtgcgaatggtgatgctggtatccatattgccgcaatagctcaggtagccaatgctcccacaccaggcattgcgtcgctggggctccagttcatcgataatctccatcgcccgcactttcggcgcgccggtgatcgagccgccgggaaaggcggcgcgcagcaggtcgctggcgtgcagcgtcattggcaggcgggcggtgatggtgctgaccagatgatggaccgccgggaacggctccaccacgaacagctcggggacccgcacgctgcccgggacggcgacgcggccgatgtcgttgcgcatcaggtcgacaatcattaaattctcggcgcgatctttcggcgaattcgccagcttctcagcctgctgcgcatctgccagcggcgaatcgagccgcggcagggtgccttttatcggccgcgtctggatctccccctggcgcagctggataaagcgctccggcgacaggcttaaaatcgccccttcatcgaggcgaataaaggcgctaaagggggcgcggttgacggcgttcagctggcggaaggcctgccattcatcaccgacgtagctggcctgaaaacgctgggcgaggttgacctgatagcagtcgccgctgtgcagataggcctgtacctggcgaaatttttcgccgtactgctggcggctcatatttgactgccaggcagaggtcagggcgaaaggtttcatcgccggacgtgattgcgccagcagccactggaaacgccgctgaggatcgtcatagctgagcagcgatatctgttggcgctggtggtcgacgatcagcgcccagtcatagatccccaccgccatatccgccagcgcgatatcggcctgcgcgtgcgaagggagacgctcaaagcgacggcccaggtcgtaaccgaataatcccagcgcgccgccgagaaacggtagatcgtcatggggttgcggcgtgaacggctgacgatccaactgctgctgcaggagctgcagcggatcttccgctgagacaacaacggtttcgccgtcgtcgacccacgtctgttcaccgcgcgtcagcagcgtggcgcgcggggcagccaccagaatatcaaagcggttatgcggatggtcggcaaagccggaatgcagcagcatcgcccagggcagggcgcttaacggcgcaaaatagtgttcggccgcatccgggcgccagggcagggtaataatcgcgggggacaacatctttctcgatcctgaacgttgccgcccctctggcgtagttggggacggcgtgaaataattacgccccacaatgtagcaggagtaaaagatgtttgcaggtttaccttcgctgagccacgagcaacagcaaaaagcggtcgaacgtatccatgagctaatggctcaggggataagcagcggccaggcgattgccctggtggcggaagagctgcgcgcaacgcataccggcgagcagatcgtcgcgcgctttgaagatgaggatgaagatcaagacgaagatgaggacgaagaccagtaaatccgtttcgtcttgctcgggtgagaaaccttacctcctctgcaggatcacatcaggggcccgtccgggttcgtcatatagcatcacctgcgtcatgtgatgactgcgccagaaggtcactcgggttccctttggcgtgggatccacatgagcttcggtaagcgggttaccgttggccagatcccacagaccgacaaaacgcgcctgtggaagatgattgcggataaccagatagctaaggtcggttattgccgggttatcaggggcctgcccttgccaaagctcgccgtcgcccgccagccaaagcgcgatagtgctgccgtcccgcacaaagtggcgcggctgacagccattcagcgacgtcatcgttgccttcttcatatgccgcagcggtccgctgagcgaaaaaggctgcggtgtaccgttctgatccagcgcctcggcagccagatgcagcgtccagtcgagctgctggcgatgcgggttttccaccgttgagagatcgatcaaaacctcttcaagccacaacaggcggcggcgaaagcgtacgtcacgccaggactccaggtcccattcgactcgactatgactgtcgagcgcaggcggcggtttaccccagtcggtctcacaatccagccagaaaacgtcgtcagccatatgccagcccagcaccgtcgggatggcagggggttgattgctctggttaactgacagcgtattatgcgtggcgctgtttttataatagtcataatgcatttccgccccgtagccggtggtgccaggatccggcaacaaccagccgtcgcgctgccatagcatcaggctttgtctgtcgtagtggtcgtgttccccgccccagggactgtgtttaatcagcaccgccagctgttgcttcggacgtcgccacagggtcaaccccgcgcccggtgcaaaaaatgactgctgggggatcggcgttagcggtgactcaggcagcggatggtggcgccacaataacgtctcatcctcgtcaggctccgtttcggtgaattgcagcacggcggcatacagcggatcgcgccagataaaccaggcgaactcgtacagatcccggtgctgtagcttttcctgcccggcaagacagtcattcagccgcgggaatgtgccatccggcagcagcagcgacagcgggaatttcagcatcggctgataccaggggccatccagcaggctccagcgggtgccgcgcgccagcttctcaaaggcgaaaaagccctgcagcgcgtagtagtggtagtgaatcgaaccctcaaaccatagcccctctgccagcaggccattttccagttgccagcgcaagccgtacggctgaaaaacggcaaactccagtagatcctcatcttcgaggatgaagccaagtacagccagcgccgcattgattttgacttcatggttatggatctgcggcgtgcgatgctgccgcaaaaacgtggccgcacagcgcaacaagttttccctgatgtgctgctgttcgccaggcgtcaggctgtcgctaataaaatcgtaacccagcgccatgtccagaatgcagttggcttcgcacagggtctgggcattcattttacccggcccgttgttgggaatatcaccgtggacttcatagcccggataaacatccgcgtagcccatcagtaaggcgcgtactttatcgcgccaggctctctcaccggtcagttgccatagcaggccgagctgctggcatgcgctggcattacgcccgttcatttcgcgccaccacgcgctgtcccacggttcgccgcgaaaaatttcattatcgaccgggcaggcatgctggtggggcatgtccgctcgccacgttaatcgtacgccgtggtgcgggcaaaagtagtagagattccagctggcaatcccggtctgcggaatgcgtaatgcggcatgtagtaccggctgtgcatccttcacgagccgttcgagcagcccgttatgggctgcggcacgttcgacaatattgggccagagcccagtaaattgtttcattagcggttttccctgacctctgaggatggtaaaagcggggcgataagagtggtgatatcgtcggggtatttcgcccgtagccactgcgctttgttacggaacagcggatcttccggccaggcgtgggcggcagtggcgatattgcgcagtgctttttggtcatccatgttatcgatgtctttccatggccatggggtatcgctgttaataaatccggcgatgtactgatagcctttgcgcagactatggtcatcaagggtgaagttccagatatcgacgcccgctttctcgcccagtcgcccgaggcggttgtaggcttcaaggttgaaattactgtagtgccagggccgcgtacgctccagctcggccatctgacggccttcgatatcaaattgaccggcaatgcgccgtagctgggtgagatacaggcgctgtttcgcctcgtcggttttgccgctaaacagggcgaaggtgacggcctgcatgtcaaaatagctgccgtggttgttgtgccagttatcttcttcgaaaccgttctggctggtggtcatccagtgataatactcgccaaaccactgcttcaacgcactcacgtccttctcgctaagcaccgcagaggattgcagcagggcgatagcatccaccacctcaaccagcgcccggctatcaataatgccgataccgcgcccgttgttaatgccgggaatggcttgggcgtattgcagattggggttcatacgcgtctgtgggtcgagaaaccaggtcttcaactgggctgccgctttttgagcgtagcgagcgtcgtgggagaagtaccatgccagcgccagggttgatacatcctgactcatcttcaccaggcggtttttatcggtggcatcgctattggcgtccgggttggtttgcccatctttgcggatatacggcagcccgtctttggtatcgggattcggccaccagtaaggggggaaactatagtagtcgtgcttgttgccgctggcggcaacaagcgttttgtccatcactgagcgcagcggatgcgtgagcgccagatcggctttttttagcaaggccgcctgcgccagaacaaacaacggatctttggcggcaatctgctggcggctaaaggctaaatccttttcgtccagcgtgtacggctcggcggcatgcagagaagcgctaaggctggaacaaaatagcgcaacgcataaccaacctcggcgaggtattgcgttcatggtgataacccttctgcaagtgtgagaaaagataacaacggatttaagcctgtcgcgtatttaaataacgcgtaaaacaggcggtttaattaaaaagaatatatttgaatatacagtggcgagcagtgtaaaagacaaagttattttttgtgtgacgcacatcaaatttatcgctatcgattgataatgacctttttaatgttatgcacatcacggaattcagcgtttttctatattttttgattgtttcaataaaaatggtaaatttataattaattgattttaatgtatattttttcggtgtaactttcattgtcacttttccatgtgatctgattcaacttttttgtttttgaaacgcaatttctttttactgtggttgtattgatgggtgtgtttctatctaatgaatggaaatatttcttgcgtcagctgttttaacgcctgagcgatattcaaattaattcctgcgtattaattgagaatttaattacctttgtgtccaacaataaaggatatgcaatcatgtctgcgaataaattccgctcattattactactcaccgcgcttggactcggcgtgagccaaagctatgccgccacgaccctcaacgtctggatccgcgccagcaacgactcgaaaaatatatacaagcaagaggcggagaaatttgaagcaaaaaccggtatcaaaattgagtacttcaacgccactactgactttgaacagcgcctggcgcgcgccacggcgggtaacgctttgcccgatctgatttttaacgacgcggcttcgctggggcagtttatccagttgggtattgctgaggaaatagatccgcagtcgatctccggcggcgaccagctcttcccaaccgcatggaagagtacccgctatatcgacggtaagtactacggtgtgccgacctccgcccaaaccttcgccctgtttatacgcaaagactggcgggaaaagctggggctgccacagcctaaaagctgggaagatattcagaccctggcgaaagcctttaccacccaggatcctgacggcaacggtaaaaacgatacctacggctttatcgtccccgcctccacgacgcgcggctacgccagctggtttatgagcagctttatctggcaggcgggaggggatttcgtcaaagaagagggcggcaaattccgcgcggcgctcaatacgccagaagtggttcaggcgatgacctttatacgcaccatgatgtgcgaaaaagtcacccagccgggggcgatcaatgccaccaccgccgacgtcatcccgtctttccgctccgggcaaagcggcatgttctttagcggcccgtaccatatcgcgctgtttgataaagacccgggtaaagacaattttgaagtggttccggtagcagggccaaaaggtgaggccacgctcgcggagggcaccacggtctttatgatgaagagcagcaaacaaaaagacgccgcgcgtaaatttatcgaatttatgatctcggcggaaggtcaggaaatcggcatgggtaaaggcagccagcatattccggtggtgcgcctgccggtgaataagaacgtcgacgtcaaagccgtctatcaggacgcccgctgggagactttcgccaggctttacaatcaacagggacgctatgtgccgcaaattcccaactggacgccggtgcgtcaggtggccgccgagggctttaaccgtatttttgccgactgcaacagcccgatcgccggcgagctggagagtatcgacggcaaggtgaacgctgagctgaaaaaacaaaatgtgctggctaactgaggacaaccgtgatgacgctgcatgagacgaagtcctctccgatgaagcaggccgcgtcgcctgactcgatcggatggctgagcgcaaagcgtaagcgggcgctgatcccgtggttgtttttagcgcctgcgttaattatttttagctggtttaagttcatcccgatgattcagggtctggtgatgagcttttacaaggtcaactttaatcagccgaacgaatgggtaggactcgataactttacccgtgcgtttgccgacgtcgagctgcacgcggcggtggtgaatacgctgctgtatgtggtagtcacgatgttcgctgcggctatcctggcgttcttcctcgcgatgctgctggaaggcccggcgcgccacctgcgttttattcgcaccgccatctttttacccgccgtcaccagcgcggcgatcgtcgccgaaatgtggcgtattttattcaacccgacgcccaacggcgtggttaaccacattctcagctggtttggcgtcgccgaccagggctttcttgccagttccgaccaggcgctgtgggtcatcatgctgctgcacatctggaaagcggtgccttacaacatggtgatctttattgccggtctggcggggatcagccgcgatttatacgatgcggcgaacgtcgacggcgctaactggtggaaccgtctgcgctacgtcacgctgcccggcatgatcccggcgctctcggtggtgctgatgctctcctttatccgcggtttccgcgtgtttgccgaggtgtacgccaccaccggcggcgggccatctaacgcgacggaaatggtcatgacccatatctacaaactggggtttgagcagtttgactatggctacgcgtcggcggtgtcgtttctgctgttcgccttcacggttttcttaaccatctgtcatctgacgctgaaaaaacgtattgcacgttactaaggagccgcgatgttaagtcaacgttgggataccgcagggcgctggtgcatctacgcgctgctgctgatcgtttttgtcggaccgttctggggcatcgtcgccacggcattcagcggtgcgccggtgaaaccgggtgagctgctggcctggccgaatcagttctcgtttgaaaatttcatcttcgcctggcgggatatcggtgtctggcagtatctgttgaactccatcctggtggtgttcttcggcaccgttttgcaggtgtcggtcagcgcgctggcggcgtatgccctggcccgtaagaagtttcgcggcgtggcgctggtcagtctggttattttgtcgaccatgatgctgccggaagaggtgattgcgatcccgctgtacatgatcatcaactggcggctgccgctgatcgatgcctcactctacaacagctatctcgggatgatactgccggtcgttggctgggcgttttccatctttgtgctcacggaatttatgtcggcgatcccgaaagagctggaagaggcggcgcgcattgatggcgccaacgaatggcagattttctttcacgtgatcctgccgctggtgaaaccggcgcttggcacggtagtcaccttcggcttcattatgatttgggaccagtacctgctgccgctgattgtggtcaaccacgacagcctgaacaccattccggtgatcctcggcacgctgcgtaccgacgagagcatcacgccaaacatttttatcgccattacgctgctggcgatgctgcccagcatcatcgtctatctcggtctgcaaaaacatttcaatcgcgggattatgtccggcgcggtcaaaggataaggagttacccatgggatctgttgtactgaatagcgtacgtaaatcgtatggtgatgcgcacgtgataaaggatgtgtcgctgaccattccggacggcgagttctgcgtgcttgtcgggcccagcggctgcggcaagtcgacgctgctgcgcatgattgccggcctggaggagatttccggcggggaagtacatatcaatgaacgcaatgttaccgacgtcgagccgaagctgcgcgacattgccatggtgttccagagctacgccctctatccgcagatgacggtgcgggaaaatatgggctttgcgctcaagatggctaagttgccgaaagcggagattaaccagaaggtgaatgaagccgctgcgctgctggggctggatcccctgctggagcgcttaccaaaggatctctccggcggccagcggcagcgcgtggcgatgggacgtgccatcgtgcgtaaaccgcaggtgtttttgtttgatgaaccgctatccaacctcgacgccaagctgcgcacccaggtgcggggagagatccgcgaactgcatcgccggctgaaaaccacctcggtatacgtcacccacgatcagatcgaagccatgaccatggggcagatgattgtggtcctgcgcgatgggcgcatcgagcaggcgggtaccccactggagctgtacgaccagccggcgaacctgttcgttgccgggtttattggttcgccggagattaaccagctgcccggcgaggtcgtattgaacggagacgcgaccagtctgcggctgaaagatggttcgcttctggcattacctgcggggttagcggtcaccaatggtcaacaggtggtgtatgccattcgccctgagcaggtcaacgtggtgcatgaggcccacgatgatgcgctggcggcgaaggtcacggcggtagagaacaccggttcggatatgcagttgttctgcgataccggcggcggggcgtttacttcggtatttaaacagcgactggcggtgaaagagggcgacagcatctggctgcagccgaagctttctggtgtgcatctgttcgatgcgcaaagcggtcaacgtatagcctgccgggagggcgtctgacgtggcgatgaagctgtacacccttgacgaaagctgtctggaaaacgcgcgtgcgggattaaaacagccgttctcgccgctgcagctggcgctgagcaagctggtttcgcaggccgatattctgcgtcgtgaagcgccggaaagcgttgtgcataaaaaactgcggccggcgagcggcgacgcgcacgattactacagcctggggacctactggtggccgaaccctcggcgtcccaacgggctgccgtatattcgccgcgacggacatatcaatccgcagtgtgaaaataacgataccgacacctcgcgcattatccgcatgtgcgaacgctgcctgaccctggggctggcgtggtacttcactggtcagcgccactatgcccaggcggcggccgcgcagatccgctgttggttcctggatccagagacgcgaatgaacccgcatctgaactatggtcaggcaatcccggggattgtctccggtcgcggcaccgggctgatagatacccgattaatgtggatggtggtcgataccatcggcttgattagcccggcgaacgtgctggataccgacgatattatcggcctgcaccagtggttccgggattttaaccactggatgtactacagcgaaatcggccattcagagtatgtctggcacaacaaccacggcacctggtacgacgcccagcggacggttaacgcgctattctacggcgataaaggactggcggcgcggatcattgcgcaggggatcacccagcgaatggcggcgcagattgaccaggatggcaagcagaccatggagcttgagcgcaccattcctttccattactcgctgtttaatctggaggcgcatctgctgctgaatcgctatgccgagcatgtcgaattcgatcgctggaacaccatccgcgacgggcgaggagtgaagcaggggatagattacctggtgccgtttatccgtgaacccgatctctggccgtacagtgacctgcagggcattgtgtgggatagtgcgctgcgggtgctgctgcagtcagcccgtggttatgcaaaacaatccgccagctatcgcgatgtgctgaaatgcctgccgcaggagacgctgcagttgaaggaacagctgatgtggtgtccgggtttgtaggcctgataagcgcagcgccatcaggcattaggtgcacgttgccggatggcggcgtgccgccttatccggcctacagataccgtgtctcgccgacctcgggaggcacggtataacgagttacaccgcggcgataattttgatctcaactttatactgcgggttcatcagcgtcgcttccaccgtgcagcgcaccggggcgtgaccagccaccacccacgcgtcccaggctttattcatcgccgcaaagtcgcttttatcggcgaggaagatggtggcgtcaagaatacgcgacttgtcgctgccctgtttttccagcaccgcgtcaatctgcgccagggtattggcggtctgctcgaaagcgtcggcatcgagatttgccggcacgccggtgtagtacagggtctggttgtggatcaccacgtctgaccaacgggcttcggcatcaatacgcgtaattgtcattgctttttcctctttaagcattccattcggctgcggcaagactgccataatgtgccgctcgcgtcactacccggactggcgaaacgccgtcctccctgacataatcactgtccaaataaccagggggcaatgtgatcgacgattttgcagcagacggccagctagccaaagccataccgggatttaaaccgcgcgagccgcagcgccagatggcggtggcggtcagcgaagcgattgaggcctcccggccgctggtggtggaagcggggaccggaaccggtaaaacctacgcttacctggcgcctgcgctgcgggcgaaaaaaaaggtgattatctccaccggctcgaaagcgctgcaggatcagctttacagccgcgatctgcccaccgtcgccaaagcgctcaaattcaccgggaaactggcgctgctcaaagggcgctccaactacctgtgtctcgaacgtcttgagcagcaggcgctggcgggcggcgatctgccggtgcaaaccctcagcgatgtgatcctcctgcgctcctggtcgaatcaaacccaggatggcgatatcagcacctgcgccagcgtcgcggaagactctcaggcctggccgctggtgaccagcaccaacgataactgtctcggtagcgactgcccactgtataaagattgcttcgtggtgaaggcgcgtaaaaaagcgatggacgccgacgtggtggtggtcaaccatcacctgtttctggccgatatggtggtcaaagagagcggctttgccgagctgatccccgaggcggaagtgatgatcttcgatgaagcccatcagctgccggatatcgccagtcagtactttggccagtcgctctccagccgccagctgctggacctggcgaaagacatcaccattgcctaccgcaccgaactgaaagacactcagcagctgcaaaaatgcgccgaccgcctggcgcaaagcgcgcaggatttccgcctgcagctgggagacccgggctaccgcggcaatctgcgcgagctgctggcggacagccacattcagcgagcgctgctgctgctcgatgacgcgctcgagctatgctatgacgtcgccaaactttcgctgggtcgctcggcgctgctcgacgccgcttttgagcgcgccaccctctatcgcgggcgcctgaagcggttgaaagagatcaaccagccgggctacagctactggtatgagtgtacctcgcgccactttactctcgcgctgacgccgctgaccgtggccgagaagtttaaagaggtgatggcgcagaagtcggggagctggatctttacctcggcgacgctgtcggtgaacgacgatctgcaccactttaccgcccggctggggatcgacgaggcgcagactctgctgctgccgagtccctttgactatcagcaccaggcgctgctctgcgtgccgcgcaacctacccctgccgaaccagcccggcgcggcgcgacacctggcggcgatgctcaagccgctgatcgaggccaacgatggtcgctgctttatgttgtgcacctcgcacgccatgatgcgcgatctggcggagcagttccgcgccaccatgacgctaccggtgctgctgcagggcgagaccagtaaaggccaactgctgcagcagttcgtcagcgccggcaacgcgctgctggtggctaccagcagcttctgggagggagtcgatgtgcgcggcgacgcgctgtcgctggtgattatcgataagctaccgttcacctcgccggacgatccgctgctaaaagcgcggatggaagattgccggctgcgcggcggcgatcccttcgatgaagtgcagctcccggatgcggtgatcaccctcaagcagggggtgggtcgcctgatccgcgatatcgacgatcgcggggtgctggtgatctgcgacaaccggctggtgatgcgcccctacggcgcggtgttcctggccagtctgccgccggcgccgcgaacccgcgatatccgtcgggcggtgcgctttctcgccgtaccgccggcaaggtaatccgcactaaaatgtgttaagctgcgcgccattttgttaattagcggttcccaatagacttcgggcggcatggcggcgggtttgccgtttgccggaaatcaggctgcctgaaggcctgaactatgtaacgagagcgtgaccacccatgcgaattttggctatcgataccgccacagaggcctgctccgcagcgctgtggaatgatggcacccttagtgctcatttcgaaatttgtccccgcgaacatacccaacgtatcctgccgctggtgcaggaggtcctcaccgagagcggcaccaccctgagcgagctggacgcgctggcctttggccgcggtccgggcagctttaccggcgtgcgcatcggcatcggtatcgcccaggggctggcgctgggcgccgaactgccaatgattggcgtttccacgctggccaccatggcgcagggcgcctggcgcaaaaccggcgccacccgtgtgctggcggccattgatgcgcgtatgggcgaagtctactgggccgagtaccagcgcgacgagcagggcgtctggcatggcgaagagacggaagcggtgctcaaaccggacgcggtagctgaacgactggcacagctttccggcgaatgggccaccgtcggcaccggctggcaggcgtggccggatctggcgaaagcgagcggactgaccttaagcagcggcgaaattgaattgccggcggcggaggatatgctgccgttagcctgttacctgctggcggcggggaaaaccgtggccgtggagaaagcggagccggtttatttgcgaaacgaggtggcgtggaagaaacttccaggccgcgagtgaatctcagtaacaagaagactgagaaaaggagtcgcatcatggcgggtcaaaaacagggcgttcgctggctgctggccgcagcgattgccgttgcgctaagcggctgcgtatcggtgccggatgccatcaaaggcaccagcccgacgccgcagcaggatttggtgcgggtgatgaacgccccgcagctgtacgttggccaggaagcgcgctttggcggtaaggtggtcaatgtgcaaaaccagcaggggaaaacccgcttagaaatcgccaccgtaccgctggacagcggcgcgcggccagtgctgggcgagccgtcccgcggaaggatttttgctgacgtcaatggcttcctcgatccggtggatttccgcggtcaactagtgaccgtggtcggaccgatcgccggggtggttgacggcaaggtgggcagcacgccgtataaatttatgctaatgaacgccaccggctacaagcgctggaacgtagtacagcaggtggtgatgcctccgcaacctatcgacccgtggatgctgggtccgcgcccctggggctacggctatggcggctggggctggtacaatcccggccctgctgaggtgagaaacgttgtaaccgaatgattttgttgtttatgttagttcaaagaaacagcggccggtccgctgtttctttgttttcagtcgaataagaaaaaaaatagtgacgcgcttcgcaacctgctcattgcctaattaataaactggtacgctgagttaatataatgttaacaaaatgtattatccaggggctgtgatgacgacgaataactatttcagaggtgatgcagtgaaaaaggtttggctaaaccgttatcccgcagatgttccggcggagataaatcctgaccgctatcaatccctggttgaactgtttgaacatgccaccacccgttacgccgaccaaccggcgtttatcaatatgggtgaagtgatgacctaccgtaagctggaggagcgtagtcgcgccttcgccgcttatcttcaggaggggttggggttacagaagggcgatcgcgtggccctgatgatgcctaacctgctgcagtatccggtggctctgtttggcatcctgcgcgccgggatgatcgtggttaacgtcaaccccttatataccccgcgcgaactggagcatcagctcaacgacagcggcgcggcggcgatcgtcatagtctccaactttgcccataccctggaaaaagtggtggcgaaaactcaggtccagcatgtgatcctgacgcgcatgggcgaccagctttccaccgccaaaggtacgctggtgaactttgtggtcaagtacattaagcgcctggtgccgaagtaccatctgccggacgccatctcgtttcgcagcgcgttgcagcacggctatcgcatgcagtacgtcaagccggagatcgttgcggaagatctggcgtttctgcagtacaccgggggcaccaccggcgtggccaaaggtgcgatgctaacccaccgcaatatgctggctaacctcgagcaggtcaatgccacctacggcccgctgctgcatcgcggcaaagagttcgtggtgaccgcgctgccgctgtatcacattttcgccctgaccatgaactgcctgctgtttatcgaactgggcgggcaaaatttgctgatcaccaacccacgtgatatccccgggctggtgaaggagctggcgaagtatccttttaccgccatgaccggggtcaataccctgttcaacgccttgctgaacaacaaagagttccagcagcttgatttctcctcgctgcatttgtccgccggcggtgggatgccggtgcagcaggcggtggccgagcgctgggtaaaactgaccgggcaatatctgctggagggctacggcctgacagagtgttccccgctggtcagcgttaacccgcacgatattgactaccacagcggcagcattggcctgccggtgccctccaccgaagccaaactggtggatgatgatgataacgaagtggcgccgggtcagccgggcgagctctgtattaaagggccgcaggtgatgctgggctactggcagcgccctgacgcgacggatgagattatcaaagacggctggctgcacaccggggatatcgcggtgatggatgaagaggggttcctgcgcatcgtcgatcgcaaaaaagatatgatcctggtgtcgggttttaacgtctatccgaacgaaatcgaagatgtggtcatgcagcatagcggggtgctggaagtggcggccatcggcgtgccgtccggcagcagcggcgaagcggtgaagattttcgtagtcaagaaagatgctgcgttaaccgaagaggcgctgattacgttctgccgtcgccatttgaccggatacaaggtgccgaagctggtggaattccgtgacgaactgccgaaatccaacgtcgggaaaattttgcggcgagaactgcgtgacgaagcgcgcgctaaagtggacaataaaggctaagtaacgaatgagtcgcctgacgccggctacgccggcgttttttatgggcgcaagttaagagagtatgctttgaactatcagatgatcaccaccgacgatggcctgcgcgctgtctgcgaagcggcaagcacggcctccgccgtcgctctggatacggaatttgtccgcacccgcacctattacccgcagctgggcctgctgcagctgttcgacggccagcaggtctctctgatcgatcccttgacgattaacgactgggcgccgatgcgcgacctgctgctcaaccaggatgtgactaaatacctgcatgccggcagcgaagatttagaagtcttccttaatgcatttaacctgatgccgcagccgctgattgacacccagatcctggcggccttctgcggccgcccaatgtcctggggcttcgcctcgatggtggaagagtattccggggtagcgctggataaaagcgaatcccgcaccgactggctggcgcgcccgctgactgagcgtcagtgtgaatatgccgcggccgacgtctggtatctgctgccgatcgccagccagttaatggcggagaccgatcgcgctggctggctgccggcggcgctcgacgagtgccgcgtgatgcagcagcgtcgtcaggaggtggtcgacccggccgaggcctggcgcgatatcggcaacgcctggcagctgcgtacccgccagctgggttgtctgcagctgttggcggagtggcgcctgcgcaaagcgcgcgagcgcgacctggcggtaaactttgtggtgcgggaagagcatctgtggagcgtggcgcgctatatgcccaccagcctgggcgagctcgacagcctcgggttgtccggtagcgaaattcgcttccacggcaaaacgctgattagcctggtcgaaaaagcgcaggcgctgccggagtcggccctgccagcgccgctgcagaacctgatcgacatgccgggctaccgcaaagcctttaaagatattaaagcgctggtgcaggaagtgagcacggagaagggcgtaagcgcggagctgctggcgtcgcgtcggcagatcaaccagctgctgaactggcactggcagctgaaaacgcaagccggtgaacctgagctgatttccggttggcgcggggagctaatggccgagcggctgaagaggctgttaaacgactatccgcgctagttcgcggccaggttcagaccattaaaaaaccggcggcgcgtggcgtagccggttttttttcgcgatagcgcgacaggtcaggatttcgactcttccgtttcgggtagggtcacgttcagctcaagaatggatatatccccgtcccgctgctccagctgcacgctgaccatctccgggtcgatctgtacgtatttacagatcacttccaggatatctttgcgtaactgcggcaggtaatgcggctccgcgtctccgcggcggcgctcggcgacgatgatttgcaggcgttctttcgcaatattagccgtgttcttttttcgcgagagaaaaaagtcgagtaaagccataatttatcctccgaacaggcgtttgaggaatcctttcttctcttcttcaatgaagcggaaagggcgttcttctccgagcagacgttcaacggtatcggcataggctttgcctgcgtccgaggcggcatcgaggatcaccggctcaccctggttggatgcgcgcaggactgactggtcttccgggatcacgcctaccaggttgatgcgcagaatttccagcacgtcttccatgctcagcatatcgcctttattaacgcggcctggattgtagcgggtcagcagcagatgctctttgattggctcttcgccattttccgcgcggcgggatttagaggcgagaatgccaaggatacggtcggagtcgcgaacggaggagacttccgggttagtggtgatgatggcttcatcagcaaagtaaagcgccatcagcgcaccggtttcaatgcctgccggggaatcacagacgatgaaatcgaattccattttcttcagttcttcgagaaccttgtcgacgccttcgcgagtcagagcgtctttatcccgggtctgggaagccgggagaatgtagaggttttccgtgcgcttatctttaatcagcgcctggttcagtgtggcatcgccctgaatgacgttgacgaaatcataaacgacgcgacgttcgcagcccataatcaggtcgaggttacgcaggccgatgtcgaagtcgataacgacggttttctttcccttctgggccaaacctgtagcgatggccgcgctggaggtggtcttgccaacgccccctttacccgaagtcacaacaataatgcgtgccatagaaattccttgttaaaaagggattaatttaacggttgaattgccaaagcgctttcacctaaacgcaggcgcgccgctttgccataaaattcggccgggatgttatcgctcagccaatattccccggcgatggagaccagctccgccgcaaggtgggtacaaaatatctgggcgtctctgtcgccaccggcgcctgccagcgcacgtcctcgcatcatgccatatacatggatatttccgtcagcgataagttccgcaccggcactcacatgatttgtaacaataagatcacagtgtggcgcataaatgcgctgaccggaacgtaccggctgatcaatcaaacgcgtttttgtgatctgactagcaactggcggcggcggggtgggttcggacggtgccggacgagaggctttttctttcccttcggttaataacgggatgccggcgcggtcgatttcggttttcaggcgcggaattttgcatccgctaacgcccataatacgtaaaccggtcgcggcgatagcctcgttgatggcgcgccattccacctcctcctcgatgctggcgatattcaccaccaccggagcatgacgtaaaaaagcgggagcctgggcgattttgtcttctaacgcctgacgaataacctcgggatttgcatcgtgcaaatgaacgacagataacgtgaagctactgcctttaagttcgattggcgtatttgacatcctggccttactcaatttgctgtttatcaaccgccgaagtgcggtgatattccgaagactaaaaggcatgttatagtcactcatatattgaggcaagtgaccacgggtctaattccgagtaaaactatgttttgtgtgatctatcgaagtactaaacgtgaacaaacctatttatacgtcgaaaaaaaggacgatttctcgcgcgttcctgacgagctaatgcgcagctttggcacgccgcaaatggcgatgctgctgccgctggatgggcgcaaaaaactggttaacgccgatctggaaaaagtgaaacaggcgttaagcgaacagggctattacctgcaactgcctccgccgtctgaaaatctactaaagaaacacctggcggaacaggggaaacaatccgattaacccacgagggaaaataatgtaccaacatcataactggcagggtgcgcttctggattatccagtaagcaaagtggtttgcgtcggcagtaattatgcgaaacacatcaaggaaatgggcagtgcgacgccggaagagccggtgctgtttattaaacctgagactgcgctgtgcgatcttcgtcagccgttggtgctccctgaggggctgggctcggtgcatcacgaagtcgagctggcggtgcttatcggcagcacgctgcgtcaggcgacggaagagcatgtgctgaaagggattgccggctatggcgtcgcgctggatctcacgctgcgcgacctgcaggcgaaaatgaaaaaagcgggacaaccctgggagaaggccaaaggcttcgataacgcctgtccgatctccggctttatcccggccgctgagttccacggcgacccgcagaatacgtcgttaagcctgaagattaatggcgaagtgcgccagcagggcaccactgccgacatgatccataggattgtgccgctgatcgcctatatgtcgcgcttctttaccctcaaagccggggatgtgatactcaccggcaccccggaaggcgtggggccgctgcacagcggtgacgagctggaggtcggcttcaacggcctggcgctcactacccgcgtgctgtaagcgctatttgccgccttttggggcggcaaaacttgcatcggcgtgccagactggttataaggtgcacccttaactggcaacgacggacactccgatgagcgaacaacctttctggcaacaaaaaacactggatgacatgagcgacgcggagtgggaatcgctgtgtgacggctgcggccagtgctgcctgcacaagctgatggatgaagacactgacgagatctacttcaccaacgtcgcctgtcgtcagctcaatatcaaaacctgccagtgtcgtaactacgcgcgtcgctttgagtatgagccggactgcatcaagcttacccgcgaaaatctgccgaccttcgaatggctgccgccgacctgtgcctatcgcctgctggcggaaggcaagcctctgccggcctggcacccgctgctgactggctcaaaagcggcgatgcacggcgaacgcatctccgttcgccatattgcggtgcctgagtccacggtggtcgactggcaggaccatatccttaatctgcctgacagggcgcgctaagcgccgtcacgctttcttcgcgtggaacagcccgttttcaccgtcggtttcttccgccacccagaagtgaatattgaagcgggcgtcgtcactgagttcgacgcggtgccagtactgcggcggactggtagcaaactgcccggcatgaatcacgacttttttctccggctccgtcgcctgttcattggcaaaaccgtaataggtcaccgttccctccatgacgcacagctggccgaagacgccagccgcggtgttgtggtggctcagcagggcggcagggacattctctttggtaaagaatggggtggagcgtttaactttccagtctgcggggatcagtaaagatgacatgtgagctcctgtggggttttaaaagatgtatttaatatgcaccttttaatggctatggtcaaccatagaggtcaaccatagacgggaaacgattcagcgatgcgcaggaggcataaaaaaacgccccgcagggcgtttcattgtgggctgtactcgccgcggcttaacgaccaaacagatcgcgttttttcgctttgaaaggctgagcaacgatcaccagaatagcgaccagcagataggcggcgaaaatccccaccagccattgcggcatctccagcgacaggaactgccactgacgtactgagcagtctccggacgcaacgaaaacctgcggcagccatttatccagcggcagccaggttgggaagcgggcggcgaaatcgcaggtctggaacggtgaagggtgcagctggagcatcgtatgctcccacgccagctgtagtccgcgtatcgcgctgtacaaccagattgccatggcgacatagcgcagcggcgttttgggggcgatagcgcccaccagtcccgcgcccatgatgccgaacagcgcgcagcgttcgtaaatacacatgacacacggctgcagcagcatcacgtgctggaaccacagcgcgacaagttcgagaataaaagcggtcaacgccatcaggagccaggcaccgcgtcctcttgagcactggtttaaatattgcaacataatcatttccctggaagatgctaaatcatggcagtgtaaacgaaaaccgaaccgacgccagaggcgcggcggaaaatattccgtaacgggttattgatgcgcccgggcgaacccgggcaaaaactgactcagggtaggctgggcgtcaccagccagccgtgcgccagcagccagtcggtgactggcatcagggtgaactcgacgcataacaggccgaccagcgtcagtacgatggtgtagggcagcgccatccacaccatacggccataggagagcctaataagcggcgccagggcggaagtcagcaggaagagaaacgccgcctggccgttcggagtggccaccgagggcaggttggtgccggtgttgatcgctaccgccagcatctcaaactggggcaggctgatggcgccatgttcgagcgccgctttcgcttcgttgatgtagaccgtgccgacaaacacgttatccgaaatggacgacagcaggccgttgaacagataaaacagcgacagctgcgcgtgcggcgaggcctgcaggacaaactcgatcaccggcgtgaacagctgctgatcgatgataaccgcgacgatggagaagaagaccgtcagcagcgcggtaaagggcagcgcctcggtgaacgccttgccaatggcgtgctcatcggtaacgccggtaaaggtggtggcgaggatgatcaccgacaggccaatcaggccgacctcagccaggtgaaaagccagggccacgatcagccaaacgccaatgagcgcctgggcaatcagccgcagtcgctcctgacggctgcgctgggcgcggctgcgatcgtcaaactcctgcagcaccttgcgcaccgtcggcggtagcggttcgccgtagccaaacaggcgatacttttcgaccagcagacaggttaacagaccgcagaccatcaccggcagggtcacgggcgccatgcgaagaaagaactcgccaaaatgccagcccgcggctttggcgataatcaagttttgcggctcgccgaccatggtcatgacgccgccgagcgcggtcccgacgccggcgtgcatcatcaggctgcgcagaaagccgcggaactgctccagcacctcacggtagtgctgctcgatatggctgtcatcgagcaggtcgctatcgtccgggcgcgccgaggcgacgcggtgatagatgccgtagaacccgacggcgacgctgatcactaccgccaccaccgtcagcgcatcgagaaaggccgagaggaaggctgccgccaggcagaaggccagcgatagcagcattttgctgcggatccccagcagcaggcgcgtaaacacgaacagcaaaagctgtttcataaagtagatacccgccaccatgaacatcagcaggagcagcacctccagattgccggcgatctcttcccggacgtgcgccgggctggtcatgccgatcagcagcgcctcgatagccagcagaccacccggcagcagcggatagcacttcagcgccatggcgagggtaaagataaactcgaccaccagcagccagccggcgacaaacggcgccacggcgaacaccagcggatttacgattaagaaaatgattaatgccagcttgtaccagtccggcgactggccaagaaaattgcgccacagcgcgcggccataagaaatttccacgacagaatccttccccgtcaatgagtgcatggttttgtgcataacgattggcaagagtaccagttgagcaaaatgagaagcaactttcttcgcgccgcgctggcggtttgtgaagataaggaaaagcgcaaagtaaaagcggaaaatgaaacggcgatccctttttaattcacttgccatgctatctgcgctatagcggctctggtatgatgagtgcaattgtaacgctgtgtaatggaaatcttactatggtcattaaggcgcagagccctgcgggtttcgcggaagagtacatcattgagagtatctggaataaccgcttccctcccggatcgattctccccgctgaacgcgagctttctgagctgattggtgtcacccgcacaaccctgcgcgaagtattgcagcgtctggcccgtgacggctggctgaccattcagcatggtaagcccactaaagtgaataacttttgggaaacctccggcctgaatatcctcgaaacgctggcgcgcctcgatcacgacagcgtaccgcagttgattgataatctgctctccgtgcgcaccaacatttccacgatttttatccgcaccgcgtttcgccagcatccggataaagcgctggcggtcctggacagcgcccgggaggtggaggatcacgccgacgccttcgccgagcttgattataatattttccgtggtctggcgtttgcctccggcaacccgatctacggtctgatcctcaacggcatgaaggggttgtatacccgcatcggccgccactatttctccagcccggaagcgcgcagcctggcgctcggtttctatcatcagctggcgaaagtgtgtgaggctggcctgcatgaccaggtttacgagctggttcgtcgctacggccatgacagcggcgagatctggcaccggatgcagaaatcgctgcccggtgatttagccatgaatatgcgttaagcgggcttttcgcgatcgatatacagaacaagggggccaatggccccctttgttattttactcgccccgcaatgctatagcgcgttcggccgcgccgggcagcggtccaacagctcaatgctgccgtcggcgttctgttgctccagcagcacatcgaacccccacagacgatgcacatgcttcagcacttcgcgccggcctttgtccagcgggacgcggttgtgcggcacatagcgcaaggtcagcgatcggtcgccgcgcaggtcaacgttccacacctggatattcggctcaagattgctgaggttatactgcgcggagagcttattgcggatctcgcgataaccctcttcgttgtgaatcgccgagatctccagataattgttgtgatcgtcgtcgagcacggtaaagaagcggaaatcgcgcatgatcttcggcgacaggaactgactgataaagctttcatccttaaagtcgcgcatggcgaaatgcagcgtttccagccagtcagaaccggcgatatcggggaaccagtacttatcctcttccgtgggcgactgacagatgcgcttgatgtcctggaacatggcgaagcccagcgcgtaggggttaatcccgctgtaccacggactgttgtacggcggctggaacaccacgttggtatggctgtggagaaactccagcataaagcgctcagtcactttcccttcatcgtagagatggttgaggatggtgtagtgccagaaggtggcccacccctcgttcatcacctgggtctgtttctgcgggtagaaatactggctgactttacgcacgatgcgcaggatctcgcgctgccacggttcgagcagcggggcgttcttctccataaagtacagcaggttctcctgcggttcggaagggtagcgacgagcggattcaatcgctttttcttcctcgcgcttcggcagggtgcgccacagcatattcacctggctttgcagatactcttcccggcttttctgccgcgctttctcctcctgcagagagattttttgcggacgtttatagcggtcgacgccgtagttcatcagcgcgtggcaggagtcgagcagtttctctacttcgtcgacgccatagcgctcttcgcactcggtgatgtacttacgggcaaagatcagatagtcgatgatcgagctggcgtcggtccagctgcgaaacagatagttatttttaaaaaacgagttatgcccgtagcaggcatgggccatcaccagcgcctgcatggtgatggtgttttcctccatcaggtaggcgatacaggggttggagttgatgactatctcatacgccagaccctgctgaccgtgcttataggcctgctcggtctcaataaattttttgccaaacgaccagtgcggatagttgatgggcatgccgacgctggagtaggcgtccatcatttgctcggaagtaatgacttcgatctggtgcgggtaggtgtcaagacgatagagcttggcgacccggtccacttcggccaggtaggtttccagtaactcgaacgtccagtcgggtccatcgcttaaacgggtggtgtccctgttcatggagtcaatcgtagccattagcgcgccctcgttgttgttggttttctctgaacggaaaacctctaaacaagcatagaacacggtgcagcaaactgtgctgtacgccaatcgcttttcttcgcgatttccccatctcaaagccgtttttttgccttgtttgcagaatttaatgctgggtaaaaataaagcgcagcatgagatcgtaaatctcacagcgcagggctggtgcggtttgctgtgagttaagtcaccataaataaagcgtatgttgaataatattttcaactgagttatcaatttgtaattagatgattgttctttaactgttacggagtcgctatgcgtgtcgtcatactgggaagtggggtggttggggtagccagcgcgtggtatttgagtcaggcgggtcatgacgtgacggtcatcgaccgtcagcccggtccggcagaggagaccagcgcggccaacgccgggcagatttctcccggctatgcggcgccctgggcggcgccgggggtgccgctgaaggcgatcaaatggatgtttcagcgccatgcgccgcgggcgatcggtcttgacggcacctcgttccagttgaagtggatgtggcagatgctgcgcaactgcgacacccgccactatatggagaacaaaggccgtatggtgcgcctggcggagtacagccgcgactgcctgaaggcgctgcgcgacaccaccggcattcagtatgaagggcgccagggcgggacgctgcagctgttccgtaccgccaaacagtatgaaaatgccacccgcgacatcgcggtgctggaggacgccggcgtgccgtatcagctgctggaagcgaagcggttggcggaggtggagccggcgctggcggaggtcagccacaaactgaccggcggcctgcgcctgccaaatgatgaaaccggcgactgccagctgtttaccacccgtttggcggcaatggcggaacaggccggcgtgaccttccgcttcaacaccgcagtggatgcgctgctgcacgagggcgatcgcattgccggggtgaaatgcggcgatgagattattaagggcgacgcctatgtgatggccttcggctcctactcgacggcgatgcttaaagggctggtggatataccggtctacccgctgaaaggctactcattaactattccgatcgctcaggaggacggcgcgccggtttcaactatccttgatgagacttacaaaatcgccatcacccgcttcgatcagcgcattcgggtcggcggcatggcggagatcgtcggttttaacaaagcgctgctgcagccgcgtcgcgaaaccctggagatggtggtgcgcgatctgttcccgcgcggcggccacgtggagcaggcgacgttctggacgggcctgcggccgatgacgccggacggcacgccggtggtcggccgcacagcgtataaaaatctgtggctcaacaccggccacggcacgcttggctggaccatggcctgcggctccgggcagcttatcagcgatctgatctccggccgcacgccggcgatcccttacgacgatctggcggttgcccgctacagccccggttttaccccggcgcgcccgcagcacctgcacggcgcacacaactaaggagcttgcatgacccgtccggtagtggccagcatcgacctgctggccttgcggcagaatttacagatagtgcgtcgcgcggcccccgggtcgcgcctgtgggcggtggtcaaggccaacgcctacggccacggcgtggcgcgcgtatggagtgcgttaagcgcggcggatggtttcgccttgctcaacctggaagaggcgatcctgctgcgcgagcagggctggaaaggcccgatcctgctgctggagggcttcttccatgccgatgagctggcggtgctggatcaatatcgtttaaccaccagcgtccacagcaactggcagattaaggccctgcagcaggcgaagctgcgcgcgccgctggatatctatctcaaggtgaacagcggcatgaaccggctgggctttatgcctgagcgggtccacaccgtctggcagcagctgcgggcgataagcaacgtcggcgagatgacgctgatgtcgcacttcgcggaggcggagaacccgcagggaattgtcgagccgatgcgccgtatcgaacaggcggcggaggggctggattgcccgcgctcgctggccaactcggcggcgaccctctggcatccggaagcgcattttgactgggttcgtccaggcatcgtgctgtatggcgcgtcgccttccgggcagtggcaggacatcgccaacaccgggctgaagccggtcatgacgctgcgcagcgaaatcatcggcgtgcagaacctgcgccccggcgaggcgattggctatggcggcctgtaccgcaccacccaggagcagcggatcggcatcgtcgcctgcggctatgccgatggctatccgcgggtggcgccgagcggcacgccggtgctggtggatggcgtacgcaccactaccgtgggacgcgtatcgatggatatgctggcggtcgatttaacgccctgcccgcaggccgggatcggcgcgccggtcgagctgtggggcaaagagattaaaatcgacgacgtggcggccagcagcggcaccgtcggctatgagctgatgtgcgccctggcgccgcgggtgccagttgtgaccctgtaacctattccggggcggatcactccgcctcgtcttccgcgacccgcaccccaaccttcagcacgtgatcgttctctttttcagctaccgtccacaccatcccggcgaactccacctggtcgcccaccaccggcgccgcgcccagcagctgctgcaccacttccccgagcgactgctgatgctcgcggaactcctcaccgccgtcgagaccgtagatttgcgccacatcggcgaagcgggcctcagcatcaagaatgaagtcgccgaaaaagcgctgatcgagcgccaccggcggcgactggctgaacattttgccgagcgccggcaggtcgtgctcccgaccaataacgcacaggatatcgccttcccgcaggcgggtgctgccggtggggtgcagcaggacattgttgcgaaacagcgcggcaatccgcgtctccggtggcatgtgcaagtcgcgcagcgccgcgccgatgcaccacttatcggcccccagctggtagacaaactgctcccacgggttttccgggtgaatatccagcccgacgcgggagatgggccagctgatgggcggcaccaccactttggcttttttcgccgcccacgacagcgaagtgccctgcagcagcagcgacaccagcaccacgaagaaggcgacattgaagaacaggcgggcgttgtccaggccggccatcatcgggaacaccgcgagaataatgggcaccgcgccgcgcaggccaacccagctgataaacacccgttcgcgcaggttaaagccgcgaaacggcagcaggccggcaaacaccgacaggggccgggcaatgaatatcatccacatcgacagcagcagtgccgggatagcgatcggcagcaggtcggagggcgtcaccagcaggcccagcaccaggaacatggcgatctgcgccagccacgccaggccgtcgaagttctgcaggatgccgtgccggttgcggatcggccggttgcccagcagaaagccgcagagatagacggcgaggataccgctgccgtcgagggaggtggtgacggcaaaaatcatgatcccgccgctcagcgccagcagcggatagaggccggcgggcagcacgatgcggttaatcatctgcagcagcaggtagccgccgccgaggccgatggcgatcccgaggccgaactgctgaatgatatgcacggcgaacatccagctgaggccggtttggtgctgctggatcatttcgatcagggtgatggtcaggaagaccgccatcgggtcgttactgcctgactctatccccagcgtcgagccgacgcgctcgttgagccccttgccgccgagcagcgagaagaccgccgcggcgtcggtggagccgacaatggcgccgatcagcaggccttcgatcagatccagcttgaacaaccaggccgccatcatcccggtcagcgccgaggtgatcagcaccccaaccgtcgccagcgacagcgcgggccacagcgcgacgcgaaaggagctggcctgggtgcgcatcccgccgtccagtaggatcaccgccagcgccaggttactcaccatataggcgaaggggtaattgtcgaaggggatgccgccgatgccgtcaatgcctgccagcatcccgatggccagaaagatgaccagaatcgggatgccaaggcgcgaagaaaaggagctcaataagatactgcaggttactaaaacagaacccagaataaacagactaatgaccgcagcggcgtccaatgttcacgtactccctgactggcgtgaaaaaatggctaaaagtgacactattttaacaattcgcaggggatccgcctatgcgttcgggaaatttattctgtcagcaccggatggccgccgatcgtcagggtggtggccgccgcctgattcaccaggcgcgcgcgggcgcccagcggcagggtcaccgtgcgctgctcgtggccaaactccagtccgctaatcagcggcagggatagctgctggcgcagataatcaaagacctgcggcaaatcgtatcccgcgtcatagtcgttcggcgcgctgccggtgaagctgccgaagatcaccgctttctgcgccgccagcacgccgctgtgcaacagctgaagcagcatgcgctcgacgcggaacgggtgctcattgatatcctccaccaccaggatgccgtcgcggatcgccggcagccacggcgtgccgataagcgaggtcagcatcgccagatttcccccccacagggtgccttccacccggcagttcggcccttcgcccggccattcgagggtgaattccggctggcgtagcgcctgccagaaatggtgctcggtaaacgggtcgagggtctccgcgccgaagttgccggcgagcattggaccgctgaaggtgatgacgttgcccatggccagcaggcccgactggatagcggtgaaatcgctgtggccgcaaatcagcagcgggtcgcgctgctggcgggcaaccagcccctgccagtcgatatgcggcagcaggcgactggcgccgtagccgccgcgtacggcgaggacgatccggttgcggccgggcaactgggccagctggttaatatcggccagccgttcatgttcagtcccggcgaaacgctgctgccggcggggaatgacctgctggtgggccacctcgtgtccggcctgctgcagacgctcgacgccgcgggctgccgcctgctggttgatgcaatacccggatggcgcgaccagataaaactgagacatgataattccttgctatgaatgaaagggttatgatgccgcctggaatggcgattgtcatctccaggtggctaacttcagtccgcacccgtcatccttcaggttgtcggcaggcgggagacgtaccgcggccgtcgttctgtagcatgatggcgtttgggtagataaggatagatgtgtgaaattgagatggttgcttattttagtcgtttttctggccggttgtagttcgaaacatgattacactaacccgccgtggaaccccgaggtcccggtgaagcgggcgatgcagtggatgccgatcagtgaaaaagccggcgccgcctggggcgtggatccgcagctgattacggcgatcatcgccatcgagtcgggtggtaatcctgcggtggtgagtaaatccggcgctgtcgggctgatgcagctcaagccctcgacctccggacgcgatgtctatcggcggatggggtggcgcggcgagccgtcggtcagtgagctgaaaaacccggaacgtaatatctcgatgggggccgcctatctgagcattctggagaacggtccgctggcggggatcaaagacccgcaggtgatgcgctatgcggtggtggtctcctatgccaacggcgctggcgcgctgctgcgtaccttctcctcgaaccgccaggacgccatcgaggagattaacgatctcgacgccgatgagttcttcgaacatgtggtgaaaaaacacccggcaccgcaggcgccgcgctatatctggaaactacagaaagcgctggacgccatgtaatccctcgtttggcctccggtagtctcccggaggccacgtcctcagaaatcgtagcccacggtggctataacgctgcgctctgctccccagtaacagttgccggtgccatagcagccggaaatatactcgcggtcgccgatattgttggcgttaacctgcacataagcgcctttcagcgttggcgaccagacgctgaggtcggcccgcatcatggcgtccatcagcgtgaccgacggcagccgcgcggtgttggcatcatccgcccactgtttaccgatgtagcggacgccggcgccaacggagatccccgccgggaactgatagcgcgcccagaaggaggccatctgatccggggtcagctgcggcgtgttattgtcggtcccgtctttggtgtcctggaaacgcagacgattccaggtatacgaggcgatagtactcagctgcggggtgatctggtggtgcgcttccagctcaacgccctgggaatggaccttacccgccggaatataggtggcggtggcgatgttcgggtcgcgagtggcgacatccttttgcgtcaggtcgtaaatcgcgatgctatagagatcgctgctgcccggcggctggaacttcaggccggcttcaacctgttcggcggtggtcggtttcaacggtttgccgtccgcgcccggcagcatcgccggagtgatcgcctggctgtagctcaggtagggcgacagaccgttgtccagggcgtacaacagcgaggcgcggccgctgatatggtcgtctgaacggcggtttgaggtcccctgggtatcgctgacctgctgggaaacgatgcggtcgtagcgggcggaaacatccacatgccagcggttccagaccatctcatcctgcagatacagcccggtctggtaatagcggcgattattgtcgtcgctgtaggtaacggtatgtccggtctgcgcggtatagccgctaaacgggttaaggggcgccgcgccgccggcgccggtccacaggtcgttacggaagcgatgatattcggcgccgaggatcagggtgtgtgccaggtcgcctgtattgaaatcggcgcgcaggcggttatcggttgaccagccgtccagcgaaccgcgcgaaccgctgtagccgcgggccagcatgtcgctgtcatctatccagccgacctggtagacctgatcgagggagacgttggtatgggtgtagctcccggcggaatagaccgaccagacgtcggtgaactggtggtcaaactcatagctgtagatctgctggcggcgttgatagccatctcccggatcgccttcgttggtgctgggggagagcttacggccattgtgcgcgtagcgggtgccgtccagcggcaaagagccgtggtagccgccggaaggatctttttgcagataggcgcgcagcagcagcgaggtgtcgctgtccggctgccacagcagggaaggcgaaatcgcgtagcgctcttcgcgggtatggtcatactgcgtgtcgctgctgcgggtcatcccgatcagccgccatgcccactggtcattgatggcgtcggtgtaatcgaaggccgcgcctttggtattttgcgtgccgccggtcaggcggatgtggccctgctgactgaactgcggacgtttggaagtcaggttgaccacgccgcccggcacgctctgcccgtagagcgcggaggaggggccgcggatcacatccacgcgttcgataaaccacgggtcgatttgcaatacgttatggctgccgccgtcgctcatcaggcgcatgccgtcgaggaacaggttatcgacgtcgccgccgtggtagccgcgcagggagatggcgtcgaaccgggtggcgccgccgccgaagctggagtagacccccggggtatattccagcgcctggctgatggtattcgccccctgatccgccatctgctggcgggtgaccaccgacaccgactgggcggtagtgattaacggttggtcggttttcgtcgccccgagcgaggtgctggcgctgtagccctccgtcggcgcgctggcggacgccggcggggtggcagtgaccaccaccgtctcttcggcttgcgtggtgaaggggagtgcgaccgcaagggcatacagcagccccgggcgttttcgagaaatagccacgttcataagatcatcctgaaccaacgcggtctggtactcctgtacgccgccgcgtgaaaaacgaatctgtcattattcgttaaaaagtaatgcgaattattattgtttgtatttgtgcgatcaagcgaaaaggtgacctgttcaacgcgagggggtggggaagtgtttcccgcgagccgcagaatgggtctgcgcgggacgatagtgaccagggagaccgcttccccccctaccgattttggtagggggcggcgaagcgtcaggagccggtcttttgcggttccgcaggggcggggtcgttagccgcgggcgccgcaacaggtttgtcctgcggtgaaggggttgtcgccggacgggtagcgggcagcgcatcgcagggtttctcctgcgggcagatcagatccaacatcttcagggtgacgccgttggtccagccaaagccgtcctgcagcggatattccccgccgccgccgccggtgccggtcgagctcacgtcatacttctccaccagcttttgcttactgtcataggtatgctgcacgttggtcaggaagcgccaggtgacctccatggcgatcttctgctgaccatagttttgcagcccctcgaccgccacccactgcagcggcgcccagccgttgggggcgtcccactgctggccgctgttgacggtggtggtggtcagcccgccgggtttaagcaggcgcgactcggcggcggcggccactttcgtcgcccgctcgcgtgacgcggcattgacgtacagcgggaacagcgccgccgcggtcaactgattgcgcaccttgtggcttttcagatcgtagtcggcgtaccatccctctttatcattccacaggtatttctcgatggcctgctggcgggcgttagccagcgcatcgtactgcgtagcgccagcgctgtccccggatgccttgctggcgcgggcgagggttttctccagatggaacatcagggcattgagatcgaccgggacaatcgaggtggtgcgaatggtggcgagctgctgcggattgtccatccagcgggagctgaaatcccagccggaggcggcggcggagcgcaggtcgcgatagatctcggttgccggacgattcgggttgcttttggcggttttgacgtcgtcaagccaggactcgggacgcggggtgtcgttatcgtcccagtagcggttgagcagcgcgccgtccgccatccgcaccgcccgtttgtcggcgctgccgggagccagcgcgtccgctccggccatccagtagcgatactctttctccagctgcggctggtaggttttcagcacctggtcgccatcgtgcgtcgccagcaggctcaccataaaggagaagaaggggggctgcgaacggctgagataataggtgcggttgccgttggggatatggccccaggcgtcaatttccgcggcgaagttggcgaccatatcctcgactttatcccagtgaccgctttcggcaagacccagcatggtgaaatagctgtcccagtaatagacttcgcggaaacgtcctccgggcaccacgtagggcttaggcagcggcagcagcgagtcccatttttccacctcgacggtgctgcgggtcaggaccggccacaggccatcgatatgttgacgcagagtttgccctttgggcggcacataggtgtcgttctctttcggcagcgtgaagttcagttcgacgaagtggcgcaggtcgaagctggcctggtttttttgcatccggtaatcggcaaggatcatcagcggatcgctgttagggatagcgtcggcgaaggttttctgatcggcaaacagcttcgcgctctggacatcattgaacagcgggcccagcagaatatccggcgaggggggcggcgcggttttgccgtcttccgcctgagcgttcaggctcatcagggcgatcagagcgccgccgatcgccaggcgcagggaacagggcaaagcagcgggacgacgtgcatcagtactcgtcatggggagttctccttatcattatcgactgcgggccacgacgtttggccatccaaaaaccttagacgaatatctgccgctgcgcgtgtcaggggtaacattttgcgcgaaaacagaggatttacctgccaggtctcctgagaccgccgcgggctgggccgcctggctgagggcgctggcgtccacgatggcgcaaaaaacgtcgccctgcctcacgacggtgcagccgccgccgggcgcgggcggctgttttgacgattttttgcacaaccagacggcggggctgaaccgatttgcacaacgccgcggcggcagaggacctggcataattaatgcttatctcttagcgggattaccacaaagtgagtacaaccggaggggatagccatgattaaaattacgctacctgacgggcattattatgacgagatgctgaccgcgcagggtgaacagcggccgcactataatgcctggtggcaatggtttcgcaacaccgatcaattctctatccggcagaaaaaagcgcaagcggaactgctttttcaccgtatcggcatcacctttaacgtttacggcgaggatgaggggaccgagcggctgatcccgtttgatagcgtgccgcggatcatacctgccggggagtggcagcgcattgaccgcggcatacgccagcgggtgaacgcgctgaacgccttcctctatgacatctatcatgagcagaatatcctgcgcgcggggctgatcccggccgagcaggtgctggccaacgagcagtatcagccgtgcatgcagggcatcaacctgccaaacaacacctatgcccatatcaccggcgtcgatatggtgcgcaataacgacggtcagtactacgtgctggaggataatctgcgcacgccgtccggcgtctcctacatgctcgaaaaccgtaagatgatgatgcgcctctatccggagatgttcgagcagcatcacattgcgccggtggagcgctacccgagctacctcctgcagaccctgcgcgaaagctcgctggtggatgatccctgcgtcgtggtgatgaccccgggtcgcttcaacagcgcctacttcgagcacagcttcctggcgcagcagatgggggtcgagctggtggagagcgccgatctgtttattaaaaacggcgcggtgtatatgcgcaccaccgaggggccgcggcgggtggatgtgatttatcgccgcatcgacgacgcctggctcgacccgctggccttccgcgccgattcgatgctcggcgtcccggggctgctgtccgtctatcgcgccggcggcgtagtgctggccaacgccatcggcaccggggtggctgacgacaaatcgatctatccgtacgtcccggagatgatccgcttttacctcggcgaacagccgatcctcagcaatatccccacctggcagtgccggaaagcggaggacctgcgctacgtgctgagcaatctcgagctgatggtggtcaaggaggtccatggcgccgggggctacggcatgctggtcggcccgcgttcgactaaagaggagcgagaggccttccgccagcgcctgctggccaatccggccaactatatcgcccaggacacccttgcgctgtcgacctgccccaccttcgttgaggaaggtctgtcgccgcgacatatcgatttacggccctacgtgctgtccgggcaggagatgcggctggtgcccggcggcctgacccgcgtggccctcaccgaagggtcgctggtggtcaactcgtcgcagggcggcggaaccaaggatacctgggtgatggaggatgacgcatcatgctaagtcgtacggcgagtgaactgttctggatggcccgctatctcgagcgggcggagagctacgcccgggtgctggacgtgacctggaaattatcaatgatcccccgccacagccagcagtcgcgggatctggcgctgccgctgaatttgtcgatgacccacgagttgtttcaggcgcgccatgcccgctttaccatgagcaatctgctcaacttttttgcccttgatggcaacaacccctgcagtatttacagctgcgtggagatggcgtggaacaacgcgcacgcggtgcgcggcagtctgtcggccgaagtgtgggagagcatcaatgccacccgcattgaactgcggaccctccgccagcaagggctgggcgagctggggagcgacggcttttttgagtgggtgaaagagcgggtgcatctgtttcgcggagcggtgataggcacgctgctgcgcaacgacgccctgagctttatcggtatcggcaccctgattgagcgcgccttcgccaccacccagctgctgctgattaaggatcaacagctgaccaacgatccggacccggtgcgggaatactaccggctggataccctgctcaatgcggtcagcgcccgcgaagcctacaacagcctctaccgccagccggtcagtcgcgaaacggtgatggagctgctgatcctgcgcaacgatattccgcgttcgctgcgcgccagcattgccgatctggtgggcgagctggagaagatcgccaacgaccgctcctatcaaccgctgcgcctcgcccatcagcttaacgttgatctgcgcttcagcacccgtgacgacctggcgcaggcggacctgcagaccacccttaacgggctgctggcgagaattaacgcgctgtccgacagcatcagacaaacctatctggaggccttatgaaactggtcatcgatcatctcacccgctatggctacgatgaagaagtgaagttttccacccagtatctgcgcctgacgccgcgcagtaccggccggcagacgatcaccgcctggacgctgaccctgccggacggcgcggcggtgaccactaccgacggctggggcaatgtgctgcatgtgctgacgctggataacccgcacaaggagatcaccatccgcgccagcgggattgtcgatatcgccgacgaaggggaggagacgcgtgatgaagaggccgagctgctgtcgccgctggtttttctgcgctgtacgccgctaacccgcgccgatacggcgatccgtgagtttgcccagcgcctctatcgtcccgatgcggcggaagagagtctgaatcaactgatggcggatctgctgttaagaatgccatactcccccggcgcgacccaggtgcaggactccgccgccgacgccttcgcccgcgcgaagggggtgtgccaggatcatacccatgtttttctcgcctgctgccgcgcgctggagatcccggcgcgctacgtcagcggctatgtctacagcgataacgcccagcatgtggcgatgcatgcctgggcggaagtctggctcgacggccgctggctgtcgtttgatatcaccaataatacccgtcgcctgaatcagcatttacggctggcgaccgggctggattatctcgacgcctgcccggtacggggcacccggctgggtgggggcggggagattatgttaactaacgctgaagtgcgcgaacacagccagcaggcgcagcagcaataatacgggaataaccgcaatgacctactgtgtggccatgtgcctggcggatggactggtgtttgcttccgactcccgcaccaacgcgggcgtcgaccatattgccacttttaaaaagctgcacgttttccatcaggagggggaacgggtgctggtgctgcaatccgccggcaatctggccaccacccagagcgtgataagcctgctcagcgcgcgcatccgtacccagcaggagccgaatctgatgcaggtcacttccctctacgacgccgcgatgctgatcggtaaaacgctgctggaggtgatccagcgcgacagcagcaaccagcagacctgcagtaacaccaacttcaactgcaacctgctgcttggcggccagatcgccggcgaaacccatcgtctgttccatatttatccggagggcaactttattgaagccacccgcgacacgccttatttccagattggcgaaagcaaatacggcaaaccgatcatcgatcgggtgctgaccatcgacacgccgctggagcaggcgatgtgctgcgtgttgatctccattgattcgacgctgcgcagtaatctgtccgtcggcctgccgctggatacgctgctctaccgcagcggcagcttcagcagtgccgggcagcatcgcatcaccgacagcgatccctacttcaaccgcattcgcaaggcgtggtccgaagggctgttgcacaccttccagactctgccgacctggacgccagcggagcgggaagaggagtagtcgctgtgacgctccgccggtatcgtcggcgcgaaggcgggtaaggcgctggagtcctttagtatcctcgacctggcggtaaaatttcagcaacagcggtaaataaattaacgacaggccgcacggattgtaggccgggcaaggcgtcgccgccgcccggcacaaaagcgacgccgctgtccttgtccggcctgggaaaggggcttccgggctgtggtaagcattttcctgcgttgtatctgactacgtggcgcgtctggcgaggttctctgcatttaattgtggtgcgaaggccaacaggaggtcagcccgcgaacgaaacgtgatatacaaccgaaacgcaggttcggtgaaacgtaataagaaatatgtgataccaggataattaaagcattcatgccataccgtattctgttgtaactgaggagaatatgttgcaggaggcagtatgaataatgaaaatacgtatggctacgtatatatactggtatcagataaaacaccgtatattaaaattggtggcacggattatttgccagagaagcggtgtaaggagattaatacccagccaccctattgtttatatgccccatggcgggtagcagactaccgtagcgtacctgactggcataatgtcgaaacctggctgcactatctttttcgagattctcgcgtgcggactattgcaaatcagaaagagctatttaatgtcacgcctgaactggctgcccatcatcttgccagccttgatcaacaaccgttgacgactaaacctaaaatcgaccgactttttcatcaccaggggttgagagattacctggtaaaactattcgctatcgccggttgtgaaaaatggcgacataaagaaggggtttgggtgtttagtctgttcccaggggcgcatagcggatggtcccggtattttacgcttagtatccatagccacgaagtcgcttattcaacgcggtcccgcgattgtcaaattcatatgttattagcagatgagcttatcatggactatcccgatattgttcggtgggtgacggaccataaaggagggattgaaaaaccaatttataaaacagctttatcacacgcgcagcaaatctggtttgagggtgagtttgaagagtgtcttcagttactctcgttccctgaagtccagctggccgttgctacctactgggaccgcgcattaacaaaatacgattatagtcttcaggcgaagtatcataaccggatggcagttgaggagatcttcaaacagttacaagtacaacggcagcgagaatcgagcgcaatgtaaacaccgccaacctgttgcgccatggacggtattctctttgtcctgctgaatacaaacgcgctttttggcaaagctaagtcaattaaatactttgttatttaacgtgttatctcacatcttcggtgggaatgaggcaacacggcaaggtatcggaagtgacggaaaagaagacggctgtctatgtggatgaccaacagcgcatcctgatccgccagctggcgcgcagctggctgtggcgcagcgagctgccgacctggctgctgattgtgacggtttacggcggctggtttgcctgcgtggcgggctggcggacgctgggactgtttccggccacgctgctgttgatctggtttaccgcctggtatatgtccttacagcatgagctgatccatgggcatcccacccggctggcatggtttaaccagctgttggggacgctgccgctggcggtctggtatccctatggcgtctaccgcgacagccacctggcgcaccatcgcaaccatctgctgacgcaccctgaggatgaccccgaatcgtactacgtaacggcggaaagctggcagcgcttctcagcctggcagcgccgccttatccacctgcgcaacaccttctgggggcgtctgctgctggcgccgatgatggatattattcacaccctgaacagcgcgctgtgggctttccgcgagggcgaccgccgcgctatctccatgtggagtctgcatctgttgctgctgacgggtctgctgacctggatggcggcgcagggtttttctccgctgtggtttgtgctggcggtgagctacccggcgctggccctgaccaaagtacgctcttttctcgaacaccgcgccgcggatgacccgctggcccgctcggtgatcaacgaggccgggctcccctggcgggtgctgttcctcaatctcaactaccatgcggtgcatcatgatctgccaggggtcccctggtacgctttacgtcaactgtatctgcatcgccaggcggcgtatctgcagcgtaatcaggggttcctggtgcgcgggtacggcgagtggcgacgccattttagccgccgggcggtagcggtgaacgcccatccgggctttggcgagcaggcgcaggcgggaggagaatatggctgaacgcatgacttttccgatgtatgccatccaccgtcaacagacccaggccctgtggcaggcggtgcagtcgctgctggacgaacgcggcgtgatggtggcgggggaccctccggcggctgaccccggggatctgctggctcactggcgccagccgacgctgttgctgagccagacctgtggctacccgctggtgacccaattgccggaggtgcagacggtgggctgcttccactacgctgcgcccggttgcgaagggcgccgctatcgcagcctgctggtggtccgcgaagcggatagtcaccggatgctgggggacttttttggccgtcgggcggtgtgcaatgccgagcactcgcagtccggctacaacgtactgcgtaaaatggtcgcgccgctctcccgggaggggcgttttttttcagcggtgatgttcagcggcagccatcggcaatcgctgcgcgaactgcagcaggaaaacgccgatatcgccgccatcgactgcgtgacctacgctctgctgcagcgccatcagccgcaggctctggctggcctggtggcgatcggctggagcccggccgtgccagggctgccgctgatcaccgccggcgccaccccggcggcaacgctgaatagcctgcgcgaggcgctccagcagctggtaagcgatgatcgctatcgttccctgtgcgacgccttgctgatctgcggctatagcgatatgtcgcgggaggcctatgcgccgctgctggcgtggcgggatgaggccgcggcgctgggggtcagccagctataggcgaaatgcccgggccagcgatctgcgccggggcgggctatagcggctggtcccacggctgggcgctgagatccattcgcagataggaagagagcaggtcgacagccagctggtcgctcatcagctgctcgttaagctgctggcgcagccgcgggatcatctcttcacgataggccgggtcgttgttttatggatttgtgatcggcaacacaaatgactctccaatggccgtcgtaaaagataaattaccagggttgattttaatcaaagtatgaccaactgcgctatggcggaaaaaagatcgctgcctatcgcgacccaaaagaaaaattgtgaatttaatgtttctttggtgtaaataatgaccgtgcattttccccaaccgccggggataaaatgtgatgcccgaccggcttgtcgttaaataatggcgtttattacgtctgctttttattctttacagcattaatttaattttcggctttcttctcaccctgatagcgcgggtcgaataacgtacaaaaggcgtattttttatcgccatttcgccgtcgatgttatcgccatcaattatttttatccccgcattcggccacggcaaaaggcgcgcaaatagcgttcatgatgcttttaatgtattgattttactttacttattctggctcgtggatcctgcttatccgccgcggcggagcctttgtgagagctctcacataacccggcaattgcgatttgttacactttccgccgtcaacaaaggaatgaaagtgagacgcgatgaatactttttctctgcctaaaacacagcatctggtagttttccaggaagtgatccgcagcgggtcaatcggggccggagcaaaagcgttaggactcactcagccggcggtcagtaaaattattggcgacatggagagttattttggcagcgaattaatcgtccggcgaaataccggcgtctcgctcaccgaggccgggcaggtatttctcaactggtcagaagcgatcacccgtgaaatgaaaaatatggtcaatgaaatgaatgctctgaccaacagcgcggtggtggatgtctcctttggtttcccttcgctggtcgggtttacctttatgtcggagatggtgcatcagtttaaaatgactttccccaaggcgcgggtctcgatgtatgaggcgcagctctccgcctttttgccggcaatccgcgacgggcgcctcgacttcgccatcgggacgctgagcgatgagatgaaactgcaggacctgcacgtcgagccgctgtttgagtctgagtttgtgctggtggcgaaccgggcgcggatcggcaacggcaccgtccgcctggcctcgctccagcacgagcagtgggtgctgccggagaccaatatgggctactacagcgaactgctgaccaccctgcagcgcagcggtatccgccgtgaaaatatcgttaataccgattcggtggtgacgatctataacctggtgctcaatgccgatttcctgacggtgatcccctgcgacatgaccacgccgtttggctcgagccagtttgtcaccatccccattaaagaggccttgccggtggcgcgctatgcggcggtatggtcgaaaaattaccggttaaaaaccgccgcggcgtcgctggtggagatggcgaaacactattcctcggggcagggcaaccgccactggcagccattacaaattattgcgtaactgaaagtcgttaaataatccaacacacgtcctcgctgttatcagcaggatgacgcccggtcattgactttatattaagatacagaggccataatgcatattacctacgatcttccggtatctattgacgatattctcgaagcgaaacaacgcctcgcgggaaaaatatataaaacaggcatgccccgttcgaattattttagcgagcgctgccagggcgaaatatttcttaaattcgaaaatatgcagcgcacgggttcatttaaaattcgcggcgcctttaataaactgtgcggtttaaccgcggcggaaaaacgcaaaggggtggtggcctgctcagcgggcaaccacgcccagggcgtctcgctctcctgcgccatgctcggcattgacgggaaagtggtgatgccgaaaggggcgccgaaatcgaaagttgccgccacctgtgattattcggcggaagtggtgctacatggcgataactttaacgataccctcgccaaagccagcgatattgttgaacttgagggccgcatttttattcccccctatgacgacccgcaggttatcgccgggcaggggactattggactcgaaatattagaagatctgtatgacgtggataatgtcatcgtgcccattggcggcggcggcttaattgccggtatcgcgatcgcgattaaatccattaacccgacaatccgcattatcggcgtgcagtcggagaatgttcacggcatggccgcctcctggtatgccggggaaatcaccagccatcgccacgccggcaccttagccgatggttgcgacgtcgcccgcccggggaaactgacctatgaaatcgcccgccagctggtggatgacatcgtcctggtgagtgaggatgacattcgccagagcatggtcgccttaattcagcgcaataaagtgatcaccgaaggggccggggcgttagcctgcgccgcgttattaagcggcaaactcgacagctatatccagaaccgcaaaacggtcagcctgatttccgggggcaatatcgatctctcccgggtatcgcaaattaccggttttgttgacgcttaattcaatacataagtgaggacaggatatgagtacgactgagagcattgcatccagccagacaagcctttcgtcctggcgtaaatctgacaccacctggaccctgggcctgtttggcaccgctatcggcgccggggtgctgtttttcccgatccgcgccggcttcggcgggctgatcccgatcctggtgatgctggtgctggcctatcccatcgccttttattgccatcgggccctggcccggctatgcctgtcgggggctaacccctccggcaatatcaccgaaacggtggaagagcattttggcaaaaccggcggggtggtgatcacctttctgtacttcttcgccatctgcccactgctgtggatttatggcgtcacgatcaccaatacctttatgactttctgggagaaccagctgcagatgccggctctcaaccgcggggtggtggcgctgctcctgctgctgctgatggcgtttgtcatctggtttggtaaagacctgatggtcaaggtgatgagctatctggtgtggccgtttatcgccagcctggtggtgatctccctgtccctgatcccctactggaatagcgcggtgattgaccaggtcaacctcagcgatatcgccttaaccggtcacgacggcattctggtgacggtatggctgggcatctccatcatggtgttctccttcaacttctcgccgatcgtctcctcgtttgtggtctccaaacgcgaagagtatgaagcgcagtttggccgcgagtataccgaacgcaaatgctcacagatcatctcccgggccagcatgctgatggtggcggtggtgatgttcttcgccttcagctgcctgtttaccctctcaccgcagaacatggcggacgccaaggcgcagaatatcccggtgctctcctatctggcgaaccactttgcctcgatgtcgggcaccaaatccacctttgccaccctgctggagtatggcgcgtcgatcatcgccctggtggccatcttcaaatcgtttttcggccactatctcggcacgctcgaagggctgaacggtctgatcctgcgctttggctataaaggggataaaacccgggtctccagcggcaagctcaataccctgagcatggtgttcatcatgggctcgacctgggtggtggcgtatgccaaccccaatatcctcgacctgattgaggcgatgggcgcgccgattatcgcctcgctgctgtgcctgctgccgatgtacgccattcgtaaagcgccttcgctggccaaataccgtggccgtctcgacaacctctttgtgaccgctatcggtctgctgaccatcctcaacattgcttacaaactgttctaatccggctcaggccacgcggagtacaacatgactgaatttccggtagtactggtgattaactgcggctcgtcgtcaatcaaattttccgtcctggacgccgccagctgcgactgcctgctcaacggcgtggccgagggcatcaacgcggaacgggcgtctctctcgctcaacggcggcgagccggtggcgctggcgcagcgcggctacgaaggcgccctgcaggcgattgccggggcattagcccaacgcgacctcatcgacagcgtggccctgattggccaccgcgtcgcccacggcggcgacctgttcaccgagtcggtcattattagcgaggaggttatcaataacattcgccaggtatcgtccctggccccgctgcataactacgccagtctcagcggcatcgcctcggcgcagcggctgttcccggaggtgatgcaggtggcggtctttgataccagctttcaccagaccctggccccggaagcttttctctatggtctgccgtgggagtattaccagaatctcggggtacgccgctacggtttccacggcacctcgcaccgctatgtgtcccagcgcgccctggcgctgctcgggttgccggagcaggagagcggcctggtgatcgcccacctgggcaatggcgcctcgatctgcgcggtgcgtaacggccgcagcgtggacacctcgatggggatgacgccgctggaggggctgatgatgggcacccgcagcggtgatgtcgacttcggcgccatggcgtggattgccggggaaacccggcagaccctcagcgacctggagcgggtagccaacaccgcctccggcctgctggggatctccggtctttcctccgacctgcgggtgctggagcaggcgtggcatgagggccatgcccgcgcccgcctggcgattaaaacctttgtccatcgtatcgcccgccatattgccggccacgccgcggcgctgcagcgtctcgacggcattattttcaccggcgggattggcgagaactcggtgctgatccgtcggctggtgagcgagcggctggcggtctttggccttgcgatggacgccgcccgcaatcagcagcccaattcggccggcgagcgcctgatctccgccgacggcagccgggtgcgctgcgcggttattcctaccaatgaagagcgcatgattgccctcgatgcgatccgcttaggccggatccacaccgcggcggcgctggcctgactttttattctgtagagagacgatgttcatgaaagtagatatcgatacccaggatgtacgatacgccgacgcctggcagggctttcgcggtacggcgtggcaaacgcagatcgacgttcgcgactttattcagcataactacaccccttacgagggcgatgagtctttcctcgctaacgcgacgccagcgaccaccgccctctgggagcaggtgatggccgggatccgcgtcgagaacgccacccatgcgccggtggatttcgacaccaatgtcgccacctccatcaccgcccacgcggcgggctatatcaaccagccgctggaaaagatcgtcggcctgcaaacggaccagccgctgaagcgcgccctgcatccttttggcggcatcaagatgatcaaaagcgccttcgaggcctatggtcgcgaaatggatcctgactttgagtatcagtttacggcgctgcgtaagacccacaatcagggcgtttttgacgtctattccccggatatgctgcgctgccgcaaatccggggtgctgaccgggctaccggacggctatggccgcggacggatcatcggcgattaccgccgcgtggcgctgtacggcattcgctatctggtccgcgaacgtgagctgcagtttgccgacctgcagccggcccttgagcgcggcgaggcgctggaggccaccctgcgcctgcgcgaggagctggccgaacagcggcgcgcgctgctgcagatgcaggagatggcggcccgctacggctgcgatatcgcccacccggcgcgcactgcccgggaggcggtgcagtggctctacttcgcctacctggcggcggtgaagtcgcagaacggcggcgccatgtcgctggggcgcacggccaccttcctcgacatctatatcgaacgcgatctgcgcgccggtttattgaatgaggagcaggcccaggagctcattgatcacttcatcatgaagatccgcatggtgcgtttcctgcgcaccccggaatttgattcgctgttctccggggatcccatctgggcgacggaggtgctgggcggcatggggctggatggtcgcaccctggtcagcaaaaccaccttccgctatctgcatactctgcacaccatgggcccggcgccggagccgaacctgaccgtgctctggtcgcaagcgctgccggcggcgtttaaaaaatatgccgcccgggtctctatcgccacctcgtcgctgcagtatgagaacgacgatctgatgcgcagcgattttcacagcgacgactacgccatcgcctgctgcgtcagcccgatggtgatcggcaagcagatgcagttcttcggcgcccgcgccaatctcgccaaaacgctgctctacgcgattaacggcggggtggatgagaaactgaagatccaggtagggccgaaaaccgaccctctgcgtgatgaggtgctggactacgacaccgtgatggccagcctcgaccactttatggactggctggcggtgcagtacatcagcgcgctgaacatcatccattgcatgcatgataagtacagctacgaggcggcgctgatggccctgcacgaccgcgacgtctaccgcacgatggcctgcggcatcgccggcctgtcggtagcggcggattcgttgtcggcgataaagtacgcccgggtgaagccggtgcgcgatcaccacgggctggcggtggactttgtcattgaaggcgactatccgcagtacggcaacaacgacgatcgggtcgatgccatcgcctgcgacctggtggagcgctttatgcgcaaaattcaggcgctccccacctggcggcaggcggtgccgacccagtcgatcctgaccatcacctccaacgtggtatacggccagaaaaccggcaacaccccggacggacgtcgggcggggacgccgttcgctccgggggccaatccgatgcatggccgcgaccggaaaggggcggtggcgtcgctgacctcggtggcgaaactgccgtttacctacgccaaagatggcatctcgtataccttctccatcgtgctggcggcgctcggcaaagccccgtcagcgcaggaaaacaacctggtgggcctgctggacggctacttccaccacgaggagacggtggaggggggacagcatctcaacgtcaatgtgctgaaccgggaaaagctgctcgatgcgatagaacacccggagcagtatccgaatctgacgatccgcgtctccggctatgcggtccgctttaacgcgctgacccgcgaacagcagcaggatgtgatctcccgaacgttcaccagtcaactctgagcggccaccgggtcacaggagagcctttaacgggctctcctgttatcatcttcacattaccgcaacaaaataatcaccactgttgatcatattcgcatttttgcaccacgctggcgcgcagcgaccgctaactgcatctatgtttagctcacgggccggtacggataccgcgttgtccggctcgccacgtgatggcaaccgatctcctgacctgaaagggaatgcgcccttgccggatgcggcacgggttgccgtcgcgtgcgtaccgaccggggcgactgttctccggtgttccactccttcctggcgggatttttgcttcttccaccctggccgtcctggcgctgcgccaacgtcggcaccacacggtaagtgatattttctgcgtcattccatgacgccaggctttacatcgctgaggaatatccgaatgtctttgaaactgaaaacaatgacgcttcatgttgtgatagcaggttgtatgagcatggccttttacgcccaggcagacgtgaagatcggcgtcgccgggccctttaccggccccaacgccacctacggcgcccagtactggaagggggcctcgcaggcggtggccgatatcaatgccgccggcggcatcaaaggcgaaaagattgtgctggtgcagggggatgacgcgtgcgaaccgaagcaggcggtggcggtggccaaccggctggtggatgaagcgaaagtctccgccgtggtggggcacttttgctcttcctcaacgatgccggcctccgaggtatatgacgaagccgggatcctgaccattacccccggctcgaccaacccgcagatcaccgagcgcggcatgaaagatctcttccgcatgtgtggtcgtgacgatcagcagggggcgatcgccgccaactatatgctggacgtgctgaaggcgaagaaaatcgccgtcatccacgataaagacacctatggtcaggggctggccgatgccacccgcgcggcgctggcgaagcggggtaccaaagaagtgttgtacgaaggcctttcccgcggtgaaaaagactttaacgccctggtgaccaagatcggcgccctcaagccggacgtggtctactttggcggctgccatcctgaagcgggcccgctggtgcgccagatgcgcgagcagggggtgcaggccaaattcttctccggcgactgtatcgtcaccgaggagctggtcacggccgccggcgggccgcagttcaccaacggcgtgctgatgacctttggtcaggatccgcgcaccctccccgacggcaaagcggtgatcgagaagttccgcgccagcggctttgagccggaaggttataccctctacgcctacgcctccattcaggctatcgccgcggcctggaacgccgtcggtaccgataacgccaaagccagcgactggctgaagagccacgacgtcgagacggtgatgggcaagaaagcctgggatggcaaaggcgacctcaaggtgtccgactacgtggtctatcagtgggacgacaagggcaaatatcaccagctctgatcggccacgacctgaggacgctctgtccttttgacttgcgaattgtcacatgacggcggttgaccgagaacggaacccggcggccgtctgcctggcggctggagggactatgacggcgttttttctgcaacaactgatcaatgggctgacgctgggcgcagtgtacggcttaatcgccatcggctacaccatggtgtatgggatcatcggcatgatcaacttcgcccacggcgaggtgtatatggtctccgcctacctgtgcgccatcggcctggcgctgctctctttcttcgggatccactccttcccgctgctgattttcgccaccctggtgttcaccatcgtggtcaccggcgtatacggctgggcgatcgagcgcatcgcctaccggccgctgcgcaactcgacgcggctggcgccgctgatctcggctatcgggatgtcgctgatcctgcagaactatgtccagctgagccaggggccgaaccagcaggggatcccgacgctgcttagcggcgcgttgcgcatgacggtgggcgatggggtggtgcagatcacctggaccaaggtgtttattctcgtcgcggcgctggtggggatgcttatcctgacctggattattcagtatacccggctggggcgcatctgccgcgccacccagcaggaccggcgcatggcggcgatccttggcatcaataccgaccgggtgatctccctggtgtttgtcatcggcgcggcgatggccggtctggccggcgtgctggtgaccatgaactacggcaccttcgacttctatatcggatttattatcggcatcaaagccttcaccgccgcggtgctgggcgggatcggctcgctgcctggcgcgatgctgggtggtctgctgcttggggtggccgaagcccagttcgccgggctggtgaattcggattacaaagatgtcttttcctttgcgctgctggtggcgatcctgatttttcgcccgcaggggctgctgggacgtccgctggtggccaaggtctaaggaggctttatgggtgaaattacgcgccagcctgcgcgggctatccaaaacgcgctgatcgacagcgtactggccggcctttgcgcgttaattgtctttggcccgatcgtcggcgtggtgctcaaagggtatggttttaccctcgcgcctgcgcgggtggcgattctggtggcggtggtgatggccggcaggctggcgctcagtctgctgctgcagagccacaggggaaaagcctttattgcccgctttgagggggcggatgacggggtgtacgtccggccgccgggctaccgctcgcggctgcgctggataataccgctgctggtggggctggccattgtctttccgtttctcgccacaaaatatctgctgaccgtggccattcttgggctgatctacgttctgcttggcctggggttgaatattgtggtgggcctcgcgggcctgctcgatctgggctatgtggcgttttacgccatcggcgcctacggcctggcgctgggctaccagtacctgggacttggcttctgggcgatgctgccgctgggggcggtgatggcggctctcgccggggcgttgcttggctttccggtgctgcgtatgcatggcgactatctggccatcgtcaccctcggctttggcgaaattatccgcctggtgctcaacaactgggtgagcttcaccggcggccctaacggcgtaccggtgccatcccccacgctgtttggcctcgagtttacccgccgggccaaggatggcggcatccccatccatgagtttttccacgtcagctacaaccccaacctgaaattcatctttctctacgccgtgctgtgcctggtggtgatgctggtgctgctggtgaagcatcgcctgacgcggatgcccatcggccgcgcctgggaggcgctgcgagaggatgagatcgcctgtcgggcgatggggctcaaccacgtgctggtgaagctctcggcgtttatgctcggcgcgtcgacggccggcatcgccggggtgttcttcgccagctatcaggggtttgttaacccgacgtcgttcaccttttttgagtcggcgctgatcctggcgattgtggtgctcgggggaatgggctccaccctgggtgtggtactggcggcgtttgttctgacggtcaccccggagctgctgcgcggttttgacgaatatcgggtgctgctgttcggcgtgctgatggtgatgatgatgatctggcggccgcgcggcctggtgcgcaccagccgcagcggggttgcgttgcgaaaaggagtcgcgccatgaccgacagcatcttacgcgttgagcatctgatgatgcatttcggcggcatcaaagcgctgaatgatgtcaatctggaggtggagcgggggtcgatcaccgccctgatcggccccaacggcgcgggcaagaccacggtgtttaattgcctgaccggtttttatcgggcgacggggggcagtatcgtgctgcgggcgcgggaaaaggtcaccgatgttattcaggtgctggggcagaagcttcacccggacgattttctccacccggcgcagctggggaggcggatctattacaagatgttcggtggcacccatctggtgaaccgcgctggcctggcgcgcaccttccagaatatacgtttattccgcgagatgtcggtgatcgagaacctgctggtggcccagcatacccaggtcaaccgccatctgctggccgggatcctcaatacccgtgggtatcggcaggcggagagtcaggcgctggatcgcgctttttactggctggaggtggtggagatggtggactgcgccaaccgtctggcggggaccctctcctacggacagcagcggcggctggagatcgcccgcgccatgtgcacccgtccggagatgatctgtctggacgagccggccgccggcctcaacccggtggaaacccaggcgctgagccggattattcgctttctgcgccagcagcacggcattacggtgctactgatcgagcatgatatggggatggtgatggagatttcggatcatatcatcgtcctcgatcacggggacgtcatcgcccgcggcgcgccgcaggcgatccaggccaacgccagtgtgattgccgcctatcttggcgctgaggaagaggagacgcgccgatgagccagcctttgcttgcctttaatgaggtggatgtcttctacgggccgatccaggccctgaagcaggtctccctcaccgtcaacgagggggagacggtggcgctgatcggcgccaacggcgccggtaaatcaacgctgctgatgtcggtcttcggccagccgcgcattgccggcggggagattttctatcgcggggaggcgatcagccggaaatcgacccactttatcgccagcaacggcatcgcccaggccccggaagggcggcgcatctttcccgatatgaccgtcgaggaaaatctgctgatggggaccattgccattggcaaccgctatcaggccgaggacaaggcgcgaatgtaccagctgttcccccggctggaagagcggcggggacagcgggcgatgaccctctccggcggcgagcagcagatgctggccatcgcccgggcgctgatgagccgaccgcgcctgctgctgctggatgagccgagcctggggctggcgccgctggtggtgaagcagattttccagatcctgcgcgagctgacggctcaggggatgacgctgtttctggtggagcagaatgcccgccatgccctcaacctgtcggaccgcgcctacgtgatggtgaacggccagatccgcctgagcggtagcggccagacgctgctcaacgacccggaggtgcgtaaggcatatctggggatcagcggctgagggggttattcccgcggttcgttacgggttttaatgtgctgccagaaacgttcggcggcctggttaagccgcgagccggagcggtagagccaggcgccgatcggcagcgacaggctctcatcgaggatcgtcagccggccttcgtccagctcgcgctgaatggagtactgcggcagccagcccacgccgtcgccattgaggatcatgcgcttgagcagctcgctcatggaagagacaaaggtgagagagaaggtgatctccggcgtgcggtcgatcacctggttcacctggcgccccatatagctgtcgttggcgtatttcatcagcggcagcacgccgcgatgtaaatgaaacagcgggcggccatgttcgtcgcagggggagaccaggtgcagataagaatcaaaaattttatgattaataaacggatagttcatcaattcttcattatagaaggagaggataaaatcgctttttccctctttcaggttaaatacggcgtcgttgacgttaatcgattcaacatgaaaagtcttatttttacggtcggtgtaaccggcgatgatctcgggcagtaataacaccgacagcgaaggggcggcgtcgatccttattttctgggtagtgttatttaagcctttaatacggctgatctgaaaatccatgtcatcgagcatatttcgcgcatagccgacaaaaattttcccgcggttggtcagctgcagagggttggcgctacgatcgaagatgctgaatccgagggaagcctccagcgactggatgcgtcgactgaacgaggactgagagatgttgcgggctttggccgccagggtaaagctgcgcgactcctcgagggcaatcacatcatacagccattttacttccagatttgccaacaccgatccagtcctcaaaaacgcaataaaggctatgcaattttagcatagcgcatagaaactatgcaattaacataattatcgacaggtgttaacattttttggaaagttgagatttatgaatgcatatcggcgaccctacatgagcacgatatgaaatcgcgactcacggttatttattgctttatttcattgtccaggacttatcttattaaatagccggcgacgatgacgaaagcaatgaataacccaggcctcttaccttaaatagtttgtcaggagttccatgtcacaacaaattgaatcagtaaaaatggctctgcaggagctggggattaatgcaagcggcgaattctattacaaccctgattacgatttgcttattgcacatgaaacctctcctgagctgaccggcgcggcccgcggcgtgatgaccgactctggcgctgtggctgttgataccgggatcttcaccggccgttcgccgcgcgataaatacatcgtccgcgacgaacagactcgcgacaccgtctggtgggcagactccggcctcggccgtaatgacaataagccgttatcgccagacgtgtggcgcagcctgaaaagcctggtcgcgggccagctgagcggcaaaaaactgtacgtcatcgacgcctggtgcggcgccagcccggacacccgtcttggcgtacgcttcgtcaccgaggtggcgtggcaggcccactttgtcaaaaacatgttcatcgtgccaagcgccgacgagctggccagctttacgccagacttcgtggtgctcaacggcgcgggctgcaccaatgccaactggcaggcgcaggggatgaactccgagaactttgtcgcctttaatctcagcgagcgtattcagctcatcggcggcacctggtacggcggcgaaatgaagaaagggctgttctcggtcatgaactacctgctgccgcagaaaggcatcgcgtcgatgcactgctcggccaaccgtggcgaagcaggggacgtggcgctgttcttcggcctctccgggaccgggaaaaccaccctgtcgaccgatccgcatcgtcagctgatcggcgatgatgagcacggttgggacgatgacggcgtgtttaacttcgaaggcggctgctacgctaagaccatcaatctcgatccgcaggcggagccggagatttatggcgccatccgccgcaatgcgctgctggaaaacgtggtggtgcgcgctgacggcagcgtggattatgccgacggcagcaaaaccgaaaacacccgcgtctcctatccgctgtcgcatatcgacaatatcgtcaagccggtgtcccgcgcgggccatccgtcgaaggtgattttccttgccgccgatgcgtttggcgtcctgccgccggtctcccgtctgaccaccgagcagatgcagtaccatttcctgtcgggtttcacctcgaagctggcgggcaccgagcgcggcattacccagccgacgccgaccttctccgcctgctatggcgcggcgttcctgctgcttcacccgacccagtacgccagcgtcctggcggcgaagatggcggaatccggtgccgaagcctggctggtcaacaccggctggaacggcgagggcaaacgcctgtcgctgcgcgatacccgcagcatcattagcgcgatcctcaacggcactaccggcccgctgcgcgaggagaccatcccggtgttcggtcttgcgatcccgcagagcattccaggggtagacagcgcggtgctggatccgcgtaatggctggagttcagcggataaatggcaggagaaggccgagagcctggctcagctgtttatagataacttcaagcagtacagcgataccgaagcgggtgcgcgtctggcgctggccggtccgcagctgcagaagagcgcggtcgaagcctgatccgcggccagcaggtcgacgcctggcgccgacctgctggcgagccgctttactccgcaaaggcccgcagcgcatcgccagtgaggcgataacgcacccactcatcctgcggctgcgcgccaatgctcagatagaaatcaatcgccggctggttccagtcgagcacgctccactccagacgcccgcactgacgttgtacagcatattgcgcgatggttttcagcagcgcttttccggcgccgatcccgcgatagtcgggggtgacgtacagatcctccatatagataccattgcgtccaagccaggtggagtagctggtgaagaacaccgcgtagcccaccgctttgcccgccacctcgcagatcagcgcttcggttttgctgccgctggcaaacagtgtctctctgatctcctctggcgtcgtcactacctcttggggggctttctcgtagaccgcgagttcataaatcatgtcgtagatagcggtggcgtcgtccggggtggcctggcggattgtgatgctcatgggttgtcctgtatccatagtcaaaagagagcaaaattgctgaccctgaggataagcggtattgtgaaaagaattaagtgcaatgaaatcagcaaacgatgaatattatgcatcctgtcctgcgccggattgacctcaacctgttgccggtctttgacgcggtctatcgctcccgctcggtacgcctggcggcggaagagctggcgatgagcacctcggcgctgagccatgcgctttcccggctgcgcagcgccctcaacgatccgctgttctaccgcgaaggccaccggatgtgccccagcgtctatgccagccagctggcgccctctatcgcttcggcgctgaagtttctcaaccaggagctgacgccgccggcggcgtttgtgccggccgccagcaccgactgcatgcagattgcgatcaccgatttcaccgcgttctgcgtctttccgacgctgatgcatcacctgcagcgtgaggcgcccgggctgcggtttgagctccgttatctgccccacagcccggcgctgaccgagctgctggcgggcgaggtcgacctggccctcgggttcaatacccctgacgagccagcccatcccgatcttgaggagattaactggctgcgggacgaatatgtggtcatcagccaggccaaccggacggcgctgaccctggacgcctaccttgcggcccgtcatctggtggtgaccccgtggaatgagcggcagggggtgctggactgtgagctggagcgacagggctattcgcggcaggtggcgatgaaaaccccctcgatgctgagcgcgccctttattattgagcagagcgacctgttgatggcgctgccccggcgggcggcggagacgatggcccgcgccgcccggctgaccattttcccgctgccgtttccggttccgccgtttgacgtcaagatttacgcccaccaacgcagcgggaaacgcgaggctacccgctggcttatctccctgttgcagacgctggtgggggagtccaccgcttcctgacgcgctttccagccggcagggtatttcgttaccccaggccaggttttatgccttcaacccacggcgacatatcctggccccggtcacaaaacggaaaactgactttttcgccgtcacccgcggcgtggttaggacggtgtgtgttaaatgattgtatgtaaaagtaatgttaattagttaaatgttattcatgcgtaaaatgcattagtggatgcgtttattacgcttatttcgttcccggttctgtttcagtcttcagcgacaggcgcgcgacaacgcgtggataacaaactggagacctgcatgcattcaacaacctcacagatgagtacccgtgaccggatcggcgccattctgcgcgtcacgtccggtaactttctcgaacagttcgacttttttctgttcgggttttatgccacctacatcgcccataccttttttccggcgagcagtgaattcgcctcgctgatgatgaccttcgcggtctttggcgccggctttttgatgcgccccatcggcgctatcgtacttggcgcctatatcgacaaggtggggcggcgcaaggggctgatcgtcaccctgtcgatcatggccaccggcaccttcctgatcgtgctgatcccctcttatcagaccattggcctgtgggcgccgctgctggtgctgatcggccgtctgctgcagggcttttccgccggcgccgagctgggcggggtgtcggtctatctggccgagatcgccacctcgggccgcaaaggcttttacaccagctggcagtcgggcagtcagcagattgccatcatggtggcagccgcgatgggctttgccctcaacgcggtactggagccgagcgctatcagcgactggggctggcgtattccgttccttttcggctgcctgattgttccgttcatttttatcctgcgccgtaagctggaggagacccaggagtttactgcccgccgccatcatctggcgatgcgccaggtattcgccaccctgctggcgaactggcaggtggttatcgccgggatgatgatggtggcgatgaccaccaccgcgttctacctgatcaccgtctatgccccgacctttggtaaaaaggtgctgatgctcagcgcctctgacagcctgctggtcacgctgctggtggcgatttccaacttcttctggctgccggtgggcggggcgctgtccgaccgctttggccgccggtcggtgctgatcgccatgaccctgctggcgctggctaccgcctggcctgcgctgaccatgctggcgaacgccccgagctttttgatgatgctgagcgtgctgctgtggctgtcgtttatctacggcatgtacaacggggcgatgatcccggcgctgaccgaaattatgcccgccgaagtgcgcgtggcaggtttctcgctggcctacagcctggcgaccgcggtgtttggcggcttcacgccggtgatttccacagcgctgattgagtataccggtgataaagcgtctcccggctactggatgagctttgccgccatctgcggcctgctggccacttgctacctctatcgccgtagcgccgttgcgctgcagacggcacgttaatcagggagaagatgatgcgtaaaacgacaggaaccctgctggccacgctgctgctggccgccaccggcggcagcgcgttgtccgctgaggtcaccgtgatgatctccggcggcttcaaagcggcgctggaaaagctggccccggcgtgggaaaaacaaaccggcaaccacctcgtggtgatccctggcccgtcgatgggaaaaacgccgcaggcgatccctaaccgtctggcgcgcggcgaacacgcggacgtggtgatcatggtcggggacgcgctgaccagcctcgagaaagcgggccgtacgcaaccggattcgcgccgggagctggccgactcgccgatcggcgtggtggtgaaggcgggggcgccgctgccggctatccacagcgcagaccagctgcgggcgacgctgctggcggcgccatcggtcgcgtactccgacagcgccagcggacgctatgtcagctcgacgctgttccacaccctgggcattgatgacgcgatgcagagtaaagcgcagatggtggagcgcattccggtggcctcggaagtggccaagggacggtatgcgatcggttttcagcaggtgagcgaactgctgccggtgcccggcgtaaccttcgtcggcgaactgccggataacctgcagtacatcacccgctttgccggggcggtgaccatcagcgccgaccacccgcaggaaggcaaggcgctgctgacgtatctggcgtcaccggcggcgcaggagaccatccacgccaccggtatgcgaagcgtggccgccgccgcgccggtcagccagaaggatactgttcaataatcagcttctccagctctgccgccacgtaggactgaatacggccgctgaggcggatcaggcctaccgtacgcgtgaccaccgggtcggtgagcggcacagcgcggagaacggaatgctccccggcgggcatcgacatcgcgggcacggcggcaatgccgatgcccgcttccaccatccccagcatcgtggtgacgtggcgggtttcgcagatacttggccgcgccggcgtcagatgcgccagctcccggtcaagcagcgtccggttgccggagacccgatccaggccaatataatcctgttcaaaatacgcctgccagcttaggtgcgtcttgcgcgccagcggatgatcgtgccgacaggcggccacatagcggtcgtcggcaagaggggtgaattcgatactggctggcaggtttttggcaaagcagaggccaaagtcagcctgtccgctgctgaccgcctcgatcacattcccgacgctgctgtcaatcaaccggatgcgcacctggggataacgcgcctgaaagctgcggatgatttccggcataaagtagtaggcggcggaaggcaccgtcgccaccgtcaccagcccggtgcgcgccttgctgacctggctgatatccgccagcaccgtctcgacatgggccagcagctgctccgaacgttcggcaaaattttgcccatacagcgtgagggtcacccgccgggtggtgcgatcgaacagccggttgcccagcgccgtctccagcttttcgatgcgtcggctaagggccgactgcgacaggcagatggattcggccgccagccgaaaactgccatattccatcagggcgcgaaaggcgtagagatcgttgaagtcaaaatttacgggcatggcggcatccttatcggctctctggcgccatcgccccgtccggcgaggggcgatggcgggtagcatatcgggcaggacttcgggcgtgcgggaaaccgcgcgccagggcttacaccttaagcagttttaccgtggcatcgatatcgatttcgtcttccgaaaagatcagggttgtcccctgaaaggtggtgatcgccagctttttcaccgagcgcatctctcccggctgcaccgtggcttttggccggatgctgttcatcagcagcccgaccgacagcacggcgttttctttatcgacgcgggtctcgaccggctcttcttcccggtacaccacataggatttgatggaggtcagcttcaaccgctcgccggcaatatagatatatttgctttccggaatgaccttcaccgcgtaggccgacagccctttattgttggtggtaggttcgaaagtcaccgccgcgtctttcttgataagatcaggattggcgaccttaatcacgtgaaaataacgattttcgccgttttcatctttgataaatccaaaacctttatctttaaaccacgttgtgattgttccgttcatcgccattaccgtattactcgttggttaacacaaattttgcagcgcgcagtgtaaagcacattgcctgtacaggccatgcctttgcgataagtgtgggtgataaatgacgccgccgcgagggcggattgtgcgccagcatcgtgccgctgggcaaaatggggtactatcgccagccactccttcttcgggccgcctgatgtccaccattatcgatacctttgtcgcgccgccgtgccgcgaacagatcaccctcttgtatcaggacgaacacctggtgctgatcaataagcccgccgggctgctgagcctgtcgggcaaagatccgcgcaacctcgactccgtgcatcaccggctggttcagcgctttccgggctgcaccctggtgcaccgcctggacttcggcacctccggcctgatggtgatcgcccgcaacaagggcattaacgccttgctgtgccaacagttcagccagcgcacggtggacaaggtctatacggcgctgctgagcggccacctggcggaagacgaggggatagtggaggcggcaatcgccaaagatccggcccgtttcccgcgcatggcgctctgcgcccgccacggcaaaccggcgcgttcgcgctatcgggtcatagaccgcctgtatcaggcgcgagaaggcgagagggcgctggcgttaacccgggtgacgctcaccccggagaccggacggacccatcagctgcgtattcactgccagctgctgggctatccgatccttggctgcgatctgtacggtggccgggagctgcccggcacggaatgcgctccgcggctgatgctgcacgccagcgaactgcgttttgtccaccccgtcagccatgagccgatgcatatccagcaggcgagcccgttttgatcgcccgcggcgggaaagcccggggttaccacatcagatcgtcgggcaccttaaagtcggcgtacggatcgtcttcatcctgctcatcctgactcagggcgctgtgcaacacgatgctgctggcgtcgcgctgggcaattttctcagccactaccgccggaataatcgcatattcaccttcgggcttgttatccaccgccaggcgggcaatcgccagacggccgttaatcagctgggtctgggtgggcttgtcgaccatgatttttttgatcagattattatcggtaaagttaaagccgatatcgccccgggcgaccgtaatgcggttcatctcgatcagctgcttcacctgggctttatactctttcgccagcaccgcctgcttttgctgctcgctaagctgtttatcacgctccagctgggcttttttattttcttccaccgcttcccgggcctcacgggcctgaacgcgggattttttcgccgttctctggactttagccatttttttgctgctgaccaggccggctttgagcatctgctcttgtaaggtgagttttgtcatctgcgtgtctgaaactgaggaaacatctggcaagtatacctgcattggcagaaacgacgccagactcgcgatcgcgctgggctgctgtaccatgccgcgcagcgcggcgggggattacccccggggctgaagctgataaatccaggcgctgatctgctgtccatcgtcggtggtcacttccaccggcacccgatcgtacccttcctcaaagtcgtccagcatgggccagtgcgccgccagccgatcggacaggaacagatagccgttgacccgtgggccgtgagcgtcgaggacgatccccgggaaatcggcggctgcgccccagccgcgcgcgtaaaaggtgccggtgacgtagccgggacgccactcgcccccgatcgcctccagaatatgcgcattgctgcgaccgggacagagcgtcccatagacaaatagtggtttcattttctctctctcgttcgccctgatacccgcccacagcggagcgggaaaccaaaatacggggtaatgcagcgcctggcaatggccgggtgggggcggggcactcctccgggtatctggcagttgccgggggagattctggactcagcgctactgagggtatatcgattgcggtgatatttttattattatttatatttaaggtaaatataaatattcctgacggagggattaattcgctaattaatattcaacaggaaaataataaaagggtcgcttatggaatattccttctacatgtgatgaccgagagcaataaagctaccttgggttgaattcagatattatttagggccaggcgttacctccccctgactctttcgctttatgataaacatcccttgaccaaaaaatatcatctgacttcgaaactctcgcgggcaggggagatatttcctttccctgaagcggcaggtaataaatccagccgaacacacggcggatgagggatatccgtccgggcatttggtcctgtctgcagaccaatgaaagtgaaaggcacaggaggtgcaatgaagattttccgcccattatggcgcgacggggcttttctggtcccgcagcagtttcagcaacaggcccgctgggacgcgcacgtcgccgatacggtctcccgcatggcgctcgcccacccgtggggggtattgcgcgcggagtttgacgtgagcgcgctcaccctttcccggctcaacgctacccggctgatcgtgcgtttcgccgacggaacgctgattgacaccgagctggcggatattttgccaccggtccgcgatgtatcggacgtgatgcaggacagcgtggaggttctgctcgctctgccgctgctcagcgccagcggcggcaatcttgatgacggccaggagagcgcccgcccgcgccgctggcgcgccgagcaggtgaccgtccaggagctggccggccatgaacgcagcgagctggccgttctgcggcacgcgctaacgctgcgtctctccaccgaggaaaatgcagccttcctcacctgcccggtagcgcgtctggtgcgcgacgcccaggggcagtggatcgttgacccggaattcatcccgccgctgctgtcgctggcggcaagcccgacgctggttagcgagctgggcgagctgttacatcgcctgcaggcccgacgcagacgcctgatggccatgcgtcgtgaaagcaatgcgcggatggctgattttgccgtggcggatgtttccctgttctggctgctcaacgcgctgaacagcgctgaaccggtgctcagcgagctgcatcaggacccttcgcgccatccggagctgctctatcgcgaactggccaggctggccggcagtctgctgactttctcccttgaacatcatctggaagcaatcccccgctaccgacatgcctcgccagagcaggtattcccgccgctgtttgccctgctggatatgctgctcgaagtcagcctgccctcaagggtgatcgccatcgctctggagcagggcgccgaccgggagatctggcggggcaggctacacgatgcgcggctgcgcgagggggcggatttttatctgtcggtgcgctcttcactcccccctcaccagctacagagccgctttccgcagctctgtaaggcgggtagccatgatgatgtcgccgaggtcgtcaatattgccctcagcggcatcgcgatcaaaccgctgagccatgtgccggcggccattccgctacgtctggaaaaccaatatttcgctctggatctctccaccgatgccgcccgcgcgatgctggaggccggcaactgcaccttctataccccggaatcgcttggcgacgtgaaacttgaactctttgcggtactgcgctcatgaatagctctgaaagcgatctgatcaacaaaactttttacccgggctggctgatggtcagccagttacgctgcggccagccggtgacggatggcgaggcgctctatcgccaggcctgtcgatgggtgaccgaggcgcgcgaggcgctgacggcggggggagtcagtgaagccagcgctgagcagatgctctatgcctactgcgcgctgctcgatgagagcgtcctcaaccgcgccagtcaggatgatggctaccgcaggtggcgcaaggatccgctgcaggcgcgctttttcagcactctcaacgccggggaagagctctgggaacggatccgccagctgctgcgagagcccacggcggatgcggcagtgctgacctgcttctttcgtactttacagctgggatttgtcggacagtaccgcgccgaggatgacgaacggcgtgaggacgtggcgcaagcgcttggcgcgcgggtcccgccgttcagcatgacccaggaggcgccggtggtggttcgtgcctcccggctgcgcagcggacggcggatgtactggtgcggctgggcggctggcattgtggcgctggcggcgctgtggttgaccttctcctccgtgctgtcacagatggtggcgcagatagcagggcagggataagagatgcgtgataacgcccgtcgtctgcttacgatactgaccgtcatcctggccctgtggctggtgctgggcttctggccgctgtccatcggcaaccaggtgatcttcagtctgtgcatcctgctggcgggcggcgcggcgctctggcgtcagcgtcgccgggcagtcagccgtcagcgatcggaaatcgtcctgccgcccgaggattttcagggggcggtggttctggtctgcggggataccgacggtctgtttcccgggcgttcggcgcacggcgaaacccgtcacggctggtatctccggggtgacagcgcggagcagttgccgcggctggcgcagtacctggcggcggcgcgtccggcgctggtatcgcaggtttccgtgctgctggcggtggtaccggagcaccacccctccggggagcatctggcgcagtcgctgcgcgactggcggcggagtatcgttcagtgccgaacctggctaaacggtctgccgcctgtgtggagcgtgttctgggtgacgccgccaggcggccaggccgcggaaagccgctggtttaccatcacgccggagagggctggtctccaggtgcagcagaagggacaagcgccccagtcggttgccgggtggcagcgggagggcagctctgcctcacgcctgcatcagacgctgtggctggagagcattctgaccttggccgaaaacgctcttttccggccattccgcgcccggcaggcagaacttcctccgctgaacctgtgtgccgcgggcatctgccttacgccggtggcggcggtggcgaataacctctggcaacagcaaatcgccgggatcaccacgctctccccgggcaacgacgcggcgccaggtcctcacccgctgccggatcttcttctgtcgtcactgccgcaccgccacggggtcagccgccggatgcgcgatgccggtcttgccgctggggtgggcttcctctttctggcgctggcgatgctggcttcctttatcaacaaccagcgcctggtgcgcagcgtcggcgatcatctggcggtgtatcaccgcctcagcggcacgccgccgacgccgaagctgcaggcgcagcagcgtctgcgtgccgacagccgcctgctggatgactggttgcgccggggggagccgctgcgttatcggctggggctgtatcagggggggcggctgatccccttcgttgaagccgctatcaatgactgggcgccgcccccgccgccgcgtccggtcattaagcaggttgtgcaggggccgcagacgatccgcctcgatagcatggcgctgttcgataccggcaaatcggcgctgaaaccgggttcgacaaagctgctggtgaactcgctgctgggcattaaggccaaacccggctggctgatcgtggtggcaggccataccgacagcatcggcaacgatagatccaatcaacaactctccctgaagcgtgccgaggcggtccgcgactggatgcgcgataccggcgatgtgccggagagctgttttgcggtgcagggctacggcgcaagccgtcctgtcgccagcaacgagacgccagagggacgggcgcaaaatcgccgggtggagatcagtctggtcccgcagaaggacgcctgtctgacgccgggcacggccaatacctcaggagcagagactaacggattaaaaagcgaaaccgagtaatcagcgaccccgatcgcggaggttgaacaacaatctgcctgcctgaccctgtgcgctacgggtccctgataaacaggaaacagcgatgggcggtagcgtgcctgcagccagtcaatcttgtcggctaagcgaagcctctgcggggatgaagctcgggaaaggggatggataaaggagatcagtatggatagcgctaaagacagtgccagagaaatgctggcggcgataaacgttgaaggctccggtttctggctgctttttttatttctcagtcagtgaatataaatatccctggggttaccttttagttacgaaactcctggtggggtatctgatatatcgatatgcacataaatatatttatgatgaatgagatgattgtcattaaacaaaattaaacagggcgtcctgtgaattgatttttgatagtcattacagcggagtaaaacaggaatataatggatacctcttcaataattaccggcaccacccttaaccgttaccagctgggtattccttcatgtaccgcatcgctggatgtggaagaattcagtggggcagaaaaactgagtgaactttattattacactattacgtttaccagcgcagagaaaaatattgatgccgcacagctcctgagcaaacccgccatgctgacgatgggcggcggcgcactgcagcagttggcggactgcaaacgcgtccatggtgtgattaccaccttccggcgcgtcaatcgttctgaagatcagtcgacctatcagataaccctccagccgtttctctccctgctggataaacagtttcgcagccaccgttttttcgtcaacaaatcggtgccggaggtggtggagcaggtattgcaggaacatcacctgcatgactgggagtatgagtttaatctcaagcaacactatccgcggcgcgagcaaattaatcagtatcaggagagcgacctggcatttatccagcgcctgctggcagaggtggggatattttatttcttcaccctgcaggaagaggcgcagagcgaagtggttcacttcgccgacgcgcagcgggcgctgatgttcgataaaacacttcctgtaaacagcccgtccgggatgagcgacagcggtacggaatcgatttggggtctgaacatcacgcacaacgtcgtagaggcgaacgtcactacccgggattataacccccgcgatgcgcagagcgttctccagtcggcaacagcggatatgacccggggaaatggtgaaggcatcacttacggtgaggtataccactataagcttcgccaccgggagcgtggcgataaaatcgagccgcagacggagaccgccaacttttatgcccgcctcgaccatgagcgttttctggctcaccagacgcttattaccgcgagcagtactgcagcctggctggcgccggcccaggtgctgaccgttaccgacagcctgccgtcgaccctgcctgcgcccgtacaggatccgctgttaatcaccggcaccggttttaccgccagccgccgggaggcgctgcgggtgtccctgctggcggtgccctacagcgaaacattgtgctggcgtccgccgctgctgccgcgcccgaaggtgactggcaccatgacggcgcgggtgaccagcgcgaaagcgaatgatatctacgcctggcaggatgcgtccggcctgtaccgggtgaaatttgacgctgacagagaggataaagggcagggtcaggaaagcatgccggtgcgtctcgccaaaccctacggcggcgacgtgtacggctttcacttcccgctgatccagggcacggaggtggcgattgctttccacgaaggcgaccctgaccggccgtatattgcgcatgcgctgcacgactcgcggcatgtcgatcctgtgacggagaaaaacagcacccgcaatgtgattcgtactccggccaacaataagctgcgaatggaggataagcgcggcgaggagcatatcaagctcagcaccgagtacggcggcaagacgcagctgaacctggggcataacgtgaatgcgcaaagggagttgcggggcgaggggtttgagctccggacggataaatggggggcgatacgggcggggaaagggatctttatcaccgcagataaacagtcaaccgccagcggcaagatacttgcaatgcaggataccctggacaggcttaagcaggcaggtgatgagatggactcgctatcgcgtgatgcccagtcggctaaagccgacccagcccaggttgaacaacagttagcttttatgcgtgagcaaattgatcagctacgggaggcggttgccgtgctcagcgcaccaaatggtgtggctctcgccagtggcaagcatctgcaactaaccgcacgtcgcaatctgatgctcaatgccggggcagatgccgatatgggcgttatgaaacggctgtttattggtgtgggggaagggctgagcctgtttgtccgcaagctggggatgaaattaatcgccaatcaggggcccgtggcgattcaggcgcaaaacgatcagttgcagctcctggcgcgcaaggatctggagattgtcagtactgatagcgaaattcacattgtggcaaagaaaaaaatcatcattaacgctggaggaagctatatcaccctcgatccctatcggattgagctcggtactggcggtgatgtcgacgtcaaagccgcggatttttcctatagcggacccgccagcatgaaggccgatcatccggattatccgccacttcagtccaccgtaaggcaatcgctgaaactgaacgtggcacagtcgccaaatgcgtcggacagcagctgggccggaatgccatataccctgtatgccgatggcgcattgttgaaacaaggggtgctggatgaaagaggtcagatatcagtcgatcaccaggtcgtgaccagaagttacaagctggagatggctaatggcgtcagctatcagatacccgttgccgaagcgtacagtcgccctgagcagggggaactcgctaatcgcggctttcaccaccatacctcgcaggctgcatctgatattaaccccccctcctcacatacggagcaccgtaatacttacgcggatttgctcgatggccatattgaacaggacgaaagtcaatgagtcacaatgatattgttaccccggttgctacggttgataccagccaatgtatgatcacctcgccctggtttgttcagaatacggaatacccaccggcagtggcaacgtataagccgctggtaaacggcgaggaggcctttgcggcggtatatcgagccatcgaaaaggcacaaaaatcggtggatattatctgctgggggtttcaaccatccatgtattttattcgtgacggacaggcgctgcgcatcggggaattgctctgtctgcttgcggaaaaacaggttcaggtgcgtatactggggtgggaggcgccctttaataccgccggggttgtcggcgaggcaaaccttcccggaaaggggatcctgcatcttcaggatcgcgccgggcagagtgcgacagacgaacaatatgcttttgaccgcgattggtttacccgtcattcatatagtgacgatctgctggattccagcaactttttagccagcacaatcaataagcagttcaatcagtggactgtcaatcccctatttgtgggccgcgggtttaataaagtagaacgtgcggaaatcgcctggcgggcgagatatcaggctctcgataaagggctcagtgccagcgcggtggggataatgacgctagcgccgtcccaccatcagaaaacggtgctggtggattatgaattacctgaaagcgccatcggttttgtcatgggacataatatgctcgatgagtattgggataccgatgcgcactcttcccagaatcggttcgggggcccggccccctggggacctgatcaaggcgctcgcggctttttaccccggcaggatatttccagtcaggtgacgggacccattcttgaacatctgcacgaaaattttgccaaagcatggcgtaaggaaaccggggaggaccttatcaaaaagcgtcaggcccgtgagatggcgaaacgccttaaaccgcggaaagagtgtggtaccctgatacttgcccagttcctgcgcacgcagtcgcaggaaaataaacgtgatatcgaaaaactctatctgcaggcagtcaacaatagcacgcagtttatctatattgagaaccagtactttcgttggccaccgttggcggaagttataaaaaaagcggcgcacttgcagattgataaaggacgaacgccagaaaaagacggatcgttacatttatttgttatcaccaatgtcacggaaggggggattggggcgggtacggtaaatacccagcgtatgctggaaagcctggggcgcgccaatacgattccaggcgtgacccgggcccgaatgatagagaagatcagggaggaagacccaggcaaattcgcctctctcgcctggtcccgcaatccggccacccaggcgcagattaatgaagagtttatccgccggcagaaagaatatgaagcacagctaaaacaagcagaagagttaaaagatagcgatattccaatggtaccaatacccggcctgaaaatacatatctgctcactggtggctcaggactctcccgtggataactgggtgccagtttatatccactccaagctgatgatcgttaatgacgttttcacaacacatggttcggcgaatattaatacccgcagtatgcaggtggacagtgaaatgaatattgcacatgagtggggcagtgtgacccgggatttaagacgacggctgtgggggttgcataccagtgggaaaggcgtgcaggacaatgcttctgatgcatttgatgcatgggaatatattattagtaaaaataaagaacgccagcaaaaccatcagaagcctattgccccgctgattgctttttattatgccaacaacgaactcaaggatctggattgatgcgccagttaatattattcctgtcgctgatggcatgtctcctgcacagcgcatcgtctgctaaaaaggacttatttgtgaatcctctttccgatactcacgccgccctggcgtttacctgcgcacatcagataattcctgaggcgtctgctgataccgatgtcctgtttaaatacgcccgctggctgcagaaaaataacctgctgaagcaggataaaagcgtcgatgcgcaaaccgaacggctgtaccggatagcggctgagaacgggcactataaggccagcattactctgcagaacggcgccctgcgcgggcagttttcgctgagcagccatgagcagttccggctgagccagcagcttatcgctgccggggtggcgaccgggtactatctgaccgctatctatctggaacggggcgtcgcggggctgcagcaggatccggcgcttgccctgcgctattaccgcaaggcggcggatgagggcaatccgcaggcgcaggcatatgtgggggataagctggcgccggtggacagggcgcccgatattgcacaccagatgcgtcgttgcgccgcggaacagggagagggaaaggcggcggtaatgctgggggttaacttacagggaaaaggttattatcggagagcaattgaagctttccagttaggtgtggcggctggagacacttcctcagcgcttgctttaagtcatgggtttgatggccccgaatcttcagatgaactttattatctggctcagcagaaggatccggaacgtgcccggcgctataaactgataacgaagatcctgagcaattattcctacgccagccccacggttccggaaatcaacgatatcgtgccgctgccgccggccccgctgccggaatgggacggcaagctgaagtggctggaggaatgggaggcaaatatcccgccgccagtgcctgatgcagcgctgatagaga

SEQ ID NO: 62 - DNA, 179748 bp, Unknown
  source: /note="Description of Unknown: MKP2_coc_1 Mutant Bacteria sequence"
ggcccgctcggggccgggggggcctggggtgggtaggagaggccggcggtactcggcgcgggactgatgggcgtcggtatcgcctgccatttcgcccgtcacggtcacgccgtccgcctgtatgacaccgacccgcagcgtctcgctgaggttccggcggtggccagcgccatcctgcgcgagctggaggccagcggtcaacaggatcccgccgaccgcgacgcggtgctggcccgtctgacccccaccccgacgctgaatgccctggccgatgccacgctgctgattgaagcgatccccgagcggctggcgctgaagcacgccctgtacgccgagctggaaacgctgatcgccgacgagacgattatcgccagcaacaccagcggcctgccgccggatcggctggcgcagggcatgcgccaccctgaacggttgctgatcgcccatttctggcatccgccgcacctgatcccgctggtggaagtggtgcccgggagcgccacgctgcctcatctggcacgccaggtgagcgacttttgcgccgcctgcgcgctggaggcggtggtgctcaaccgcgccgcgccgggctttgtcggcaaccggctgcagttcgccctgctgcgcgaagcactgcatatcgtccacagcggcatcgcttccccggaggtggtggaccaggtgatgcgcgcctcgctgggccgccgctatgcgatggtcggcccgctggaggctgcggacatgaccggcctggcgacggtccaggatatctgccagcacctgctgccggagctggccagcggcacggagatgatgtcgctggtggcggagaaagtggcgcgaggcgacaccggcgcccgcagcgggcaaggcttttaccgctgggacgaggcccggcaccagcgcatccagtcgcgccgggaacaccagctgcgcttcgccctgaaaccctagtatcgcgttctgtacccctacaataacaatgagagtgagacgtcgtgatgagtgtgataatagccctggccgcgctggcgttactgatgctggcagcctaccgtggatacagcgtgatcctctttgcgccgatcgccgccctcggcgcggtgctcctcaccgacccgggcgcggtcggcccggcctttaccggcctgtttatggaaaaaatggtcggctttgtgaagctctatttcccggtgtttctgctgggcgcggtattcggcaagctgattgagctgtcgggattctcacgttcgattgtcgccgccgccatccgcatccttgggcgccgccacgcgatcccggtgatcgtgctggtgtgcgccctgctgacctacggcggggtgtcgctgtttgtggtggcctttgccgtctaccctttcgccgccgaactatttcgccagagcgggatccccaaacggctgatccccgccaccgtcgccctcggggcattctcgtttaccatggacgccctgcccggcacgccgcagatccagaatattattcccaccagcttcttcggcaccaacgcctgggcggccccctggctggggcttatcggctcgctgttcattatcatcttcggtttgctgtggctggagcgtcagcgccgcaaagcgcaggcccgcggcgaaggctatgggaccgacctgcaaaatgagccgcagaccccggatgacatcgatctgccgcatccgctaatcgctatcgccccgttgctgctggtgggggtgctgaatttgctgttcacccactggatcccgcagtggtacggcgccagccatgagctcaacctgccgggcctggcgaagcctgtcgtcaccgaagtggggaaaatcaccgccatctgggcggtgcaggcggcgctgctctccggcattgtgctggtgctggtttgcggctatcgcaatatccgcggccggctggcggagggaagtcggacggcggtgggcggggctattctcgcggcgatgaacaccgcctctgagtatggcttcggcgcggttatcgccgccctgccgggtttcctggtgctgtcaaaagccctcgcggccattcccaatccgctgttaaacgaggcgatcagcgtcacggtgctggccgggatcactggctcggcctccgggggaatgagcatcgccctggcggcgatgtccgagacctttgtcgccgccgcccacgccgccaatattccgctcgaggtactgcaccgtgtcgccgccatggccagcggcggcatggacaccctgccgcacaacggggcggtgatcaccctgctggcgatcaccggcctgagccatcgccaggcctacggcggcattttcgccatcacggtgatcaaaagcctcgcggtactgtttgtcattgccacgttctatgtgaccggcattgtctgataccagattgaaggagtaatacaatgaacttacacggtaaaacggcgctggtcaccggctccaccagcggcatcggtttagggatcgccaaagtgctggcgcaggcaggcgcccagctggtgctcaatggcttcggcgacagcagccacgcccgggctgaagtcgccgcgctgggcaagatccccggctatcacgacgccgacctgcgcgacgtcgggcagatcgaggcgatgatgcactatgccgaaagcaccttcggcggcgtcgatatcgtgatcaataacgccggcatccagcacgtggccccggtggagcagttcccggtggacaaatggaacgatattctcgccatcaatctctccagcgtcttccacaccacccgcctggcgctgccgggtatgcgccagcgcaactgggggcgcatcatcaacattgcctcagtgcatggcctggtggcgtcgaaagagaaatcggcctacgtcgccgccaagcacgcggtggtcgggctgaccaaaaccgtggccctggaaaccgcgcgcagcggcatcacctgcaacgccatctgcccgggctgggtgctaaccccgctggtgcagcagcagatcgataagcgcatcgccgagggggtcgacccggagcaggccagcgcccagctgctggcggaaaaacagccctccggggagtttgtcaccccgcaacagctgggcgaaatggcgctgtttctgtgcagcgacgccgccgcccaggtgcgcggcgccgcatggaacatggatggcggctgggtggcgcagtaagccgctggcgccgcgaagatcagaacatcgccagaaagcgtttcaccgtacgcgagcgctcgaagcgccgccaggcgatggcgatatcggtcttcagcggcgccccgctaagcgggtgatagctgacgttcggctgctggatgcaggtcatcgactgcggaaccagcgcgaagccgaagcctgcattgaccatgctcagcgacgatgaaatttgcgacgactgccaggcgcgctccatatcgatcccggcgcgcaggcaactgttatacaccagctcatacagcccgggggccacctcccgcgggaagaggatcggcgccacgtcgcgcagctgctccagggccagggtcggctgcgtcgccagcggattatcgcgcggcagcgcgataaccatcggctcctcatcgataatccgcagattaaaggctttactgctctcgcacggcaggcggacgaaggcgatatccagctcggcctcgctcagggcggtcatcagattggccatattgtcttccatctggtgcagggtcaccccggggtggtcgagctgaaaacggtgcagcagcgtgaagatttgcggatggaaagcatcagaactggtaatgcctagcgacaggctgccgttcatcccgcgcgcaatgcccttggccttctccagcgccgcatcgctcatggcgaggatctggcgggcatcctcatagaaagactctcccgcttccgtcagctccaccccgcgggttaaacgccggaacagcggggtccccacttcgcgctcaagccgctgaatttgctgacttaacggaggctgtgaaatacccagctccttggcggcctgggtgaagtgccgcgtcctggcgacggcgacaaaatagcgaagataacgaagttccatatcgaaaacgtctcaaaccagcatggtttctatattggaactgtgagctgaatcgggtcaacatttatttaacctttcttatatttgttgaacgaggaagtggtatatgaatcattctgctgaatgcacctgcgaagagagtttatgcgaaaccctgcgggcgttttccgcgcagcatcccgagagcgtgctctatcagacatcgctcatgagcgccctgctgagcggggtttacgaaggcagcaccaccatcgcggacctgctgaaacacggcgatttcggcctcggcacctttaatgagctggacggggagctgatcgccttcagcagtcaggtctatcagctgcgcgccgacggcagcgcgcgcaaagcccagccggagcagaaaacgccgttcgcggtgatgacctggttccagccgcagtaccggaaaacctttgaccatccggtgagccgccagcaactgcacgcggtgatcgaccagcaaatcccctctgacaacctgttctgcgccctgcgcatcgacggccatttccgccatgcccatacccgcaccgtgccgcgccagacaccgccgtaccgggcgatgaccgacgtcctcgacgatcagccggtgttccgctttaaccagcgcgaaggggtgctggtcggcttccggaccccgcagcatatgcaggggatcaacgtcgccgggtatcacgagcattttattaccgatgaccgcaaaggcggcggtcacctgctggattaccagctcgaccacggggtgctgaccttcggcgaaattcacaagctgatgatcgacctgcccgccgacagcgcgttcctgcaggctaatctgcatcccgataatctcgatgccgccatccgttccgtagaaagttaagggggtcacatggacaaacagtatccggtacgccagtgggcgcacggcgccgatctcgtcgtcagtcagctggaagctcagggggtacgccaggtgttcggcatccccggcgccaaaatcgacaaggtcttcgattcactgctggattcctcgattcgcattattccggtacgccacgaagccaacgccgcatttatggccgccgccgtcggacgtattaccggcaaagcgggcgtggcgctggtcacctccggtccgggttgttctaacctgatcaccggcatggccaccgcgaacagcgaaggcgacccggtggtggccctgggcggcgcggtaaaacgcgccgataaagcgaagcaggtccaccagagtatggatacggtggcgatgttcagcccggtcaccaaatacgccgtcgaggtgacggcgccggatgcgctggcggaagtggtctccaacgccttccgcgcggccgagcagggccggccgggcagcgcgttcgttagcctgccgcaggatgtggtcgatggcccggtcagcggcaaagtgctgccggccagcggggccccgcagatgggcgccgcgccggatgatgccatcgaccaggtggcgaagcttatcgcccaggcgaagaacccgatcttcctgctcggcctgatggccagccagccggaaaacagcaaggcgctgcgccgtttgctggagaccagccatattccagtcaccagcacctatcaggccgccggagcggtgaatcaggataacttctctcgcttcgccggccgggttgggctgtttaacaaccaggccggggaccgtctgctgcagctcgccgacctggtgatctgcatcggctacagcccggtggaatacgaaccggcgatgtggaacagcggcaacgcgacgctggtgcacatcgacgtgctgcccgcctatgaagagcgcaactataccccggatgtcgagctggtgggcgatatcgccggcactctcaacaagctggcgcaaaatatcgatcatcggctggtgctctccccgcaggcggcggagatcctccgcgaccgccagcaccagcgcgagctgctggaccgccgcggcgcgcagctcaaccagtttgccctgcatcccctgcgcatcgttcgcgccatgcaggacatcgtcaacagcgacgtcacgctgaccgtggacatgggcagcttccatatctggattgcccgctacctgtacagcttccgcgcccgccaggtgatgatctccaacggccagcagaccatgggcgtcgccctgccctgggccatcggcgcctggctggtcaatcctgagcgcaaagtggtctccgtctccggcgacggaggcttcctgcagtcgagcatggagctggagaccgccgtccgcctgaaagccaacgtgctgcacctgatctgggtcgataacggctacaacatggtcgctatccaggaagagaaaaaataccagcgcctgtccggcgtcgagttcgggccgatggattttaaagcctatgccgaatccttcggcgcgaaagggtttgccgtggaaagcgccgaggcgctggagccgaccctgcgcgcggcgatggacgtcgacggcccggcggtagtggccatcccggtggattatcgcgataacccgctgctgatgggccagctgcatctgagtcagattctgtaagtcatcacaataaggaaaggaaaatgaaaaaagtcgcacttgttaccggcgccggccaggggattggtaaagctatcgcccttcgtctggtgaaggatggatttgccgtggccattgccgattataacgacgccaccgccaaagcggtcgcctccgaaatcaaccaggccggcggccgcgccatggcggtgaaagtggatgtctccgaccgcgaccaggtatttgccgccgtcgaacagtcgcgcaaaacgctgggcggcttcgacgtcatcgtcaacaacgccggcgtggcgccatccacgccgatcgagtccattaccccggagattgtcgataaagtctacaatatcaacgttaaaggggtgatctggggcattcaggcggcggtcgaggcctttaagaaagagggtcacggcgggaaaatcatcaacgcctgttcccaggccggccacgtcggcaacccggagctggcggtatatagctcgagtaaattcgccgtacgcggcttaacccagaccgccgctcgcgacctcgcgccgctgggcatcacggtcaacggctactgcccggggattgtcaaaacgccgatgtgggccgaaattgaccgccaggtgtccgaagccgccggtaacccgctgggctacggtaccgccgagttcgccaaacgcatcaccctcggccgcctgtccgagccggaagatgtcgccgcctgcgtctcctatcttgccagcccggattctgattatatgaccggtcagtcattgctgatcgacggcgggatggtgtttaactaataaaaaaagctctgacatggcttgcccctgctttcgcgcaggggcttttttttggtttgggtgtgagcttcgtgcaaaacacagcaacgatatttgaaagtctctggcgttgtcacttacgcttcagcacaacgtggcaatctggctgggatgaaagtatgctttgagcgaagagctacctgtcactgtgtgcgattgaatattttgtcacacgagcataacaaccctgttgagaaatctggatctaacatctatatatcagcaatatactccactttataaaccgtagatcaggagattactttgcaaccagatcgctcaagactttatcttcgccgcgtaaacgcatcagatatagatgatctcttcaggatttatgacgaccctgcaacaaatacgttcaatccagcaggcccgtatcccgatattagtcacgcacgtaatgtaatggcccgctggcttaaccactgggagaattataggttcggaaactgggctatctcactgaaagagaatcccgatagaattatcggttttggagggcttagcattatcagttatgacgatacaccgataatgaacctggggtatcgtttctctacagaatcatgggggaaaggtctggcgacagagttcgctaaatatgcggtcgggtacgggtttgatgttttaaaactggctgagatttctgcggtagtaagaccaaaccatctggcatcccaaaagatcctgacgaaagcaggtctccggttttcacgaaatattcatgacgtgaaaaatgagcccgcaagcatgctttttactgtgactctggatgagtggaacaacgcgctaagtaggggaactaccccacccattgatcattagagttcatgcgtaacgtccgctgctgacgcggatcggacgagcgactgagttgtaggtccgctatgagcgatcttcggacattgcaaatctcgcagtttgatttcatgcgaagcagcccaaggctgctctgttttataacaggtgtcaggctttaattaatgcaatcacagagagaatagtcttaccgggctcctgagaaaaatctggagcaaactgcgctgcaagagtgcttaaagaagtaatcacacctccagcctgctcagcctgcctgagcgctgcgtcttctgttctcgaagagcggctaccgatgcagtctactggaatgaatacattgtaaccagcctgaattccacccagggttgtaagtaagacagccacttcagcagtgtagccagccactataagggtttttcggccagaacgtttaatggcgtcagtaatctcagaaacctggaatggatcggctattttacgaaaaatggtgttgtgcgtatcggcatactccctgagcgaaggtaccagctcgcccggtttaccattttgagtaaccgtcagaaagtaagaaggggcggaaacaacttttgcacattttgcaagcccccctacatttgcagtcaaagactcgggagatatcgtattacatgtacttaccaggccgggatgtaaatcagcaaagataaaaacggcatcatctttttcaacgctgaacctgttatccattttgctgcttcctgataatccgggattattagattcttttatttcgttatctgcgtttgcagttgcggacatacctaaagctattgcgcccagcattgcgctacctgcattaataaaatctctacgctgcattttaactttctccattggccagtttgagaaggagcggatgggtatgatattttcactgtaaattctgctgaaaatgatactggtgtgtgctgtccaggcctctggagtggaggaaattctctacaatatctgctatctgctgattattcttatccgcaaacgcaaaatgagtgttcccgtgtattccatgctcgggaagaataaagagcgtagcctgcccaccatgtcggttgagagtatcaacgaattgccgcgcacgtatttcattaacgcgccagagttcctcaccaaaactcgcactctcagaccgtacaacgttgtccccaatgatgaccataacggggatggctgttaatgctctgaatcgctcaggggaaacaacctgcggggctgttgcttttcctacaaatgacagtgaggttttaacatttttagggaggtcattcgaaggaaacgcaaacgcccctggctcgaaagcaataatgcttcgaaccaacttcggagactccattgcagtctcccatccatactgtccgctcagtgaatgagtcatcagaatggcaggtcccgtttgtttcaacaaagcagtcatggatttcgccataaattgcctttcctgaatatccggtgagggctcaggcccggtattcggggtctgccatcttaaaaattgctcaatggcacgctcgttttgaggaaattgagagtcgctgaaaaaaaccggtttttgtggcgggagccatttacccagtctgaacgtattccatgcgatggattctttatggtcggtgggaatatctgatactgcggagcccggctctgttcttcctgccctcccacggcgcggctggtcaattataaaaaccggccagtgtgcacgggtgaacatttgccagaaaccgtcacgtccatcaggcgttgtttcccatgatttgcctgattgacctccaccatgccacatcactacaggcaggctgtgactgctctgaggaataaaatactgagcataaccatgatcgtaatgaaaagtattaccttcctcatccatatcggtttttcccgcaaacatcaggctacccatgtctgtcagcacaatggggggccgtgctgctttatcgtagcgggagatatctgctgcgttgctgaccgatggcagcagcagagctgctgccatcaatggcaagattgacgcatcaaatttttttttcatgataaggcgcttattctcggagaattaaaaatcaggtattaaagatttttgtgccaacggttttaattcgctcaggatcggtatgtgctgtaaacaacgttttaccggtatcaagctggctgattttctccatatcagcatcgctgattgagaaatcaaatacgttaaagttctcacggatgcgcggcagattaactgacttaggtataacgataacattacgctggatcagccagcgcagaacaacctgggctacgcttttattataaacctgtgcgatcgaggcaagcagtggattgctgaacaggttgttttttccttcggcaaatgatgcccaggattgtgcctgcacgttcatactctgcatgaactcaacgttttgtccctgctgcaagaaagggtgcatttcaatctgattgacagctggcgtaatacgattaaacgttgccaaatcggtcaatcggtccggagcaaaattactcacgccgatagccttgatcaggccttcatcatataactcttccatggcgcgccatgcaccgtgtacatcagagtaaggctgatggataaggtataaatccagataatccagcttaagacgatcaagtgctcgcaggaacgcgctgcgggctttttcataacccgcgtcctgtacccataatttggtagtgataaacaattcatctcgcgcgatcccgctttgctgaatggccgcgccaacggcggtttcattctcataagcagcagcagtatcaataagacgataacccgtctgaagagcaccaagaacggcttcctgacattctttcaagtcctgcatctgatagacgccaaacccgagtataggcatctgaacgccattattgagggtagtaaatttcatgagcattgtcctgtcagtccagaaagatgagataaattcccggccaatatagtttccgtttatcaaccagaagcattgctattttacaagggctcgattagcattttaataacgtatagtctaaaaaactttatctggagtctaatggatcccttttctgatgttttgaatctgctgtctgcccgcagctatgccactgcaggtctttccgccggcaatcactgggctatgtcttttcccggatataacggactcaagttcatttttataaaaaaagggatgttctggttcagactggaagcggaacctgaatggacccagctgagtgaggggcaaggcctcgtgctgacccgatatgcccgctttttaatggcgacggacgttaacatcccgccagctgagtcctctgagaaaaaaaggcctcgcgttaacgagaccgtcaactatggaggtgacgaaaacctgttactggctggaaagatggaaattgatcttacttcttcagatattctgcttaacggcctgccgcttgttcttcattttaatacgcagaccgatgacagttctgcgctgtgcacgcttatgtcgctgttctttagggaaaaggtagctaataagccaggctctgttcaggcctgtgactaccttatgcacctgatcatgattgaagtgctgagaagtggatacgaaaagtcatctgaaggctgcgtagtcatcgacaaatttagcgatgcccgtataaacaaggtacttagcgcaattcatcaggaaccagaaaacaactggagtttgcttgagctggcaacaatatctggtatgtcacgagctggcttttcaaaaaaattcagggaggtaacgggactcacgcctcttctgtatctgacaaactggcgtatgcggcttgcgagtaaatccctgagatatacccgtgagtctgtaaagctgatttgttttaagctgggctacagttcagaaagtaccttcagtagtgccttcaagcgcgtttatggcgtcgcccccagaatttatcgtgatcaacactttcaggcaggcttaaaaaaagacgattaaagcctaatcctttcgcacacaggcgattcattagttaacgaaacctcatcgctttttattagattttatctagtcaggctgtgggtatatttcatggttacatcccagcgccccgaatgacatctcacccggagggcgtgactgaaattattgaagtggttactaagttatacaatggcgctaaaaatttgtgactggcacctgctcaaccagaatacattgatgtaagccacgtccgcttttggcactcagcagacatgaaattctggaatagcattcgtacacttagaacatcgagaagcttttgaaagccgcgtcagcggcatgacagcgccagcagagaaaaacccggatggcggcgtatggcgccttatccgggctacgctctggtgccgtatttttgccgggtggcagctacgccttacccgacccggtgatttggcgctcaattcgcgcccttcgcaggcccgcgcaagcgtagcgccgccgggcaagggcagcgggtgcggagccgcttttgtgccgggtggcggctgcgacttacccggcctacggtccgtgcgacttgtcgttaatttattcaccattgttgctgaaactgccggtgctggcggcctcaaaatcgctgagacgttcccggaaggccggggcagcccgcatggatgcgggctgagggccgtgttttgcacggacgctgcctcggcccgacccgaagcctgcggggataagtcgaagggaccgcgtagcggcgattttgctggccggagcccgggggtacagggggcggcggcgactggccgccccctgtgcgctccctgcgccatgccaggcataacgcagaagattaaccgggagcgcaaaatacgctgaagccacagataacataaaagacttcccggcagtgctttccctcacccaggccttcttccggagggagagagaaccgtacggcagtcgttgccgttccatgacgctccctgcgccacggagaaccaggtgcagcaccacgaagcgggagcacagagtacgctgaagtcacgcgtgagaaacgctttcccgggctgagaaccaggaaaccaataatagtctccaccaccgccggcaagaaatcaggctccgagcccaacatgttgccgggtggcggctggcgccttacccggcctacaaaggccacccgcgatttggcgctctattcgcgcccttcgtaggcccgcgcaagcgtagcgccgccgggcaaggacagcgggcacggagccgattttgtgccgggtggcggctgcgccttacccggcctacaaaactcttctggtggcatgcccaggcccgcgcctgcgcagcgccgccgggcagttactgcgcctgctgctgcgcctgcgccagctggcggacgatcgcctcgcgccgcgcatccccttccggtagccgggccagcaacgcctgcagggccgccacggcctcggggtaatcttcattgcgcaccgcgctcagggccagcatctccagcaccggcaggctgttcggctgccgctgatgcaggtcacgcagcagcagctcgcccatccgaacctgaccgctatctcccgcccgcaccagcgcgctggcgtaatcgaaagccgccgccgggtcgtccgccgccagagcatgcgcccggccaaaggcgccgatcgccgtctcgccatcgtttaacaacaggcccagccgcccaagcagctgccagccggcgaggtcgttcggagtatcctgcaggtggctgcgcaggccaagccgcagctccgccagctcatccattcgcagcggcgccgccgtcgggtccttaacctgctgcaacagcgcaggaaaatgtcgttcagcctgctgccagagcagcacctggccaatatcgctggttttcagatacaggcccagactcaggaccaccagcagcagcgcgcccggaagcagcgcccagcggcgtagcggccgttcgccagactgtgcctggggcggaatatccgtcagcagcgtgcgctgcagctcgacgaccagcgccgggttgtcctcgccgcgctcctgcgccagctcctgcaggcgcgactggtacagggcgcggttgagggcatcgcggtctaccgcccctttgcccgaccacgggaagtacagcagccccagcgcgccagccagcagcagcgcgacgataaccaccaacaggctcatcgttcttttccttcttgcaataatgccgccagccgctggcgctcttcggcgctgagcgccgcgtcaggaatgtcgcgacggcgggcgcgggcgataatcactcccgcgcccgccagcacgaacaaccccggtcccagccacagcagcaccgtgcccgcggtcagcggcggctcatagctgacaaaatgaccgtagcgggccaccatatagtcaacgatctgccctttcgttttcccctgctgcatcagctcgtacaccttctgccgcatatcagcggcaatcatcgcgtttgagtcggcgatgctgttgttctggcatttagggcagcgtagttgggaggtgatctcgcggaaggcctgctcctgggcctcatccttaaactgccaggtatcgatggcggcccacgcctggccggtcagcatcagcgccagcaggatgaccattacccctctcatcaacccgccctccggttgtattgatcccacagcggctggagctcctcgcgccacacccgttcgttcaggtcgccggcgtgccgccagcggataatgccctgaccgtcgataagaaacgtctccggcgcgccatagaccccgagatccaggccaagcatgccgttgccgtcgtagaggctcagcctgtagggattacccaggcgctgcagccagctcatcgccttctggcgatcgtctttgtagttcatccccaccacccgcacgccctgctgcgccaggccgttgagaaactgatgctcggcgcgacaggttggacaccaggtggcccagacgttgagcagcagcggcttgccgtcaatcagcgtccgtcggtccagcgtctgatcgggggtattcagcgcttcaaggcgaaattccggcagcggtttgccaatcagcgccgactcgagggtcgtcgggtcatcgccctcggcgttgcgcatcagttgccagaacagcgcggcggccagcgccagaaacagcgccagcgggataaacagcagcttccggttcatgaggcctcctgcagcttcttacgcatccgatagcgcgggtcgagcatgcagcacagaccgccgagggccatcagcaccccgccgtaccagatccagcgaacgaacggtttgtagtacagacgtaccgcccagctgccgtcgctcagctcttcccccagcgcggcgtacagatcgcgggtcagcccgccgctgatcgccgcctcggtcatcatcatccggctggcggtgtaaaagcgtttctcggcatacagcgtcgcttccgggcgtccgctatgggtcacggcgataatgccttcgccgccggtccagttggggccgacgatattgcgcacaccgttaaacacaaagtgatagcggtggatatcgatgctgtcgccggggcgcatccgtacatcgcgctccacgctgtagttctggctaaaagtgatgccgataacggtcaccgccacgccgacgtgaccgagcaccatcccccactggctgcgggtcagcgtccgcaggccgcgccagaagccgtggcgatgagtggcccgttcgtgaacctccagcagggcgaagatcagcacccacagggccatcatcaggccaatgaccgccatggcggtgatacgatcctgcagcagccacggcagcgccagagaaagtgacaacgtcaccaccagagcgataatcaggcgcttaatctgtctggcgatgtcatcgcgccgccagcggatcagcggtcccagccccagcagcagcgcaaacggcgccatcagggcggtgaacatggtattgaagaacggctcgccgatggagatgctgccgaggcccagctccttatgcaccagcggcaacagcgtcccgaggagcaccaccagcatcgcggccatcagcaaaatattgttgccaagcaggaacgactcgcgcgaccacagggtatgttccacccgcgcccgcacccggccgcccttcagggcgtacagcagcagcgacccgccgatggcgacaatcagcagcgccagaataaacagcccgcgcgacggatccgaggcgaaggcatgcaccgagaccagcaccccggagcgcaccaggaaggtgcccagcaggcacagggagaaggcggcgatggccagcagcaccgtccaggcgcggaagctgccccgcttctcggtcaccgccagggagtgcagcagcgcggttcccaccagccacggcataaacgaggcgttttccaccgggtcccagaaccaccagccgccccagcccagttcgtagtatgcccacgccgagcccagcacgatgccgagggtgaggaacatccatgccgcctgggtccagggacgcgaccagcgcgcccaggcagtatccagccggcccgccagcagcgaggcgatggcgaaggcaaaggccaccgagaagccgacataacccatatagaggatcggcggatggaaaatcatgccgatatcctgcagcagcggattgaggtcgcggccatcaatggggtactgcggcaggccgcggctgaacggattggaggtgaagaggataaacagcaggaaaccaaaggcgatcatccccatcaccgccagcacccgggcgacggcgtcgagcggcatccggcggctgaagagggcgacggcgaaggtccagacgctgagcagcagaacccacagcagcagcgagccctcgtgcgccccccaggtcgccgctacccgataccacaccggcagcgcgctgttggagttttccgccacgtagcggacggtaaagtcattgaccacaaaggcgtgcaccagcagcaggaaggcgccgccgatacaggcgaataggccacaggccagcggccgcgccagggccatcagccgccggtcctgccgcgccgcgccccacaggggataaacgctcaggagcagcgccagccccgccgccagacacaataaaaagttgcccagctccggcatcatggctgcgcccccgttttctccggcgtcatggcgtttttcacctccggcggcgtgtaattttcatcatgtttggccagcacctgctgggcggtaatatgccgctcgccgtccagcacgccctgggccaccacgccctgcccttcacgaaacaggtccggcaaaatgcccttatagctgacgtccacgaccccgcgggcgtcatacagcttaaagcgcacgtcgagggtttgcgggtcacgctgcagggagcccggctgaacgtagccccccacccgcaggcgctgaccggtatggggcagcgcccgggtttccgttttaccgtagataatttcccccggggtgtagaacagatcgatattgctgctcagggcgtacagcgtcaggctgacggttagcccgaggccggcgagcaccgccagcacgatatacagccgggttttacgacgcgcttgcatccgcggcctccttgtcatgttcgcgggcggcagcgatccgccgctcgcgcgcctgctggcgtcgcacctcatggaacagcgcccgccgcgcccacagagtgtgcaccgtcagcaggccaaaggcggcgacggtcacggccaccgccagccagacgtacacggcatagccgcccatattcaggaaggcggcgaaagacgaaaaggcggggctcatcgggcggctcctttattcaccagcgccaccacccacggtcgacggcgctccagttgcaggatcaggttacgcaggcgcatcagggtcagggtgaccgacagcgtgaggaaggcaaagatgcagatccgcagcggcagacgcatgcttgggtcgatggtttgctgcaggttggtcgagccctggtgcagggtgttccaccagtagaccgagtaatgaatgatgggcagattgaccaccccgaccagcacgaggatcccggccgcgcgcccggccagccgccggtcgtcaaaggcgtgccacaaggcgatgaccccggcatacagaaacagcagcaccagctccgaggtcagacgggcatcccagatccaccaggtcccccacatcggcttgccccatgccgcgccgctgaccagcgccaccagggtgcagaccgcccccaccggcgccagggcggcgatcgccaggtcggccattttgatctgccagaccaccccgacgaaggccgcgacggccatcgccaggtacagccccatcgaccacatcgccgtcggaacgtgaaggtacatgatccggtagctttccccctgctgatagtccgcgggggcgaagccaaagccccaccccaggccgatgaccagcaacagcgcgctcaacgccgccagccaggggatccagcatccgcacaggcggtacagccgctcggggatcgccagttgatgtaacgctttccacatagacgcttactcacacggttatgatggccgcgcccgcaggcgcagcgagttatcgcacggtcagccgcagcgcagcggcggtggcgaacggacacagggtggcgctggcggttaagaacgccgccagcatcgccagatagccgctgaccgggagcccggcggccgccgccgggcaggccgcggtggcgaaaatcagcagcggcaccgccagcggcagcaccagcaggctcagcaggacgccgccgcgcttcaggccgaccgtcaggccaacccccaccgcgccgagaaaactgagcgtcggggtgccgagcagcaaggtcagcgccagcacaccggcgtcatgcagactcatccccagcagcagcgccgccagcggcgagacgatcagcagcggcaggccgctcatcatccagtgggcaaccaccttcaccagcaccaccgccaccaggggcgtcggcaggagcatcagttgctccagggaaccgtcctgccagtcgtcgcgaaacaaccgatccatcaccagcagcgccgccagcagcgcggcgacccacaccacgcccggcgcaatctgcgccagcagctgcggcgcggcgccgacgccgaacggaaacagggtgatgacgatcagaaagaaccagagcggattgaggatctccgccccgctgcgccacgccaggcgcagttcccgggccaacagcgcacgcatcattgcccgcctccagcctcgccgccgaggcgcagggtgcgcaacggacagcccagcggccgcagcggctggtgggtggtgaggatggcgcatcccccctgccgggcgtgctgctccaggcgacgggtcagggtttccatcgccgtggcgtcgagggcggtgaacggctcatcgaggatccacagcggcgcgtcggttaaccacaggcgggtgagcgccacccgacgctgctgcccggcggagagctggctcaaggggagatcttcatagcccgccagaccgacggcggcgagggcgctttcccgctgctgaaggcggctggccggaaagaagaaacgcaggttttcatcggcggtcagcgccgcgttaacgccgggtttatggcccagccacagcagctgacggtgaaatgactcccggaccttcgccagcggctggccctgccagctcaccaccccgctttccgggcgcgccaggccgcagaggatccgcagcagcgaggttttccccgcgccgttatcaccggcgacctgcagcagctcgccggcagcgagggacagcgtcagcgccgcaaacagcggtcgatcgtcaacgatgcaggtcagtcgctctgcatgcagcatgaaggcaaactccttgattcagacagtattttacgtcgtcgctaagtatgggttgcaccgcgcgggcgacgcaaccctgacggttactgtccggcctccggcagcttcgagatatcggcgttgcctaacgccttctcatcgtgcgccgcggtctccttacgcaccttcgccacatcgctggcgctgaccgccggcgcgttgttgccccagctggtgcggatgaaattgaccacatccgccacctgctggtcgtccaggcgccagccgaacgacggcatggtcaggttggagaccgcatctttcaccgccggcgtggtgctcccggtcagaacgatgtggataagcgaagtggcatcttcggtctggaccaccggattgcccttcagcgacgggaaggcgcgcttatagcctacgccgtcggtgcggtggcaggcggcgcagttatcgacgtacagcgcggcgccggttttactgtcgttacccttccacagatctttcgccacgctgtcttccaccggggctggggtctgtttgccgccgcgcggcgggagcgatttcaggtagcgggcgatggcggtgatgtcgtcatcagagagatactgcagactatgctccaccacatcgctcatgccgccgaagaccaccgatttatcgttgcgtccggttttgaggaactcggccagctcggcttcgctccaggtccccagaccgtcgcggttttcgccgcgcaggctggaggcgacccagccgtcaatcggcgcattgctgcccgccaggtaatcatcgccttcgctttcgctgagcgctttttcctgcatcgtcaggctacgcggggtatgacaggcgccgcagtggcccagaccttccaccagatagcggccgcgctcgagcaccgggtcaacctgcgggttggcgacaaagtcgctcggcgtcggggcgaagatgccgcgccagaacgccagcggccagcgcatcgacagcggccatgggatgtcggtgtccttgttggcgacattcaccggctccacgccgtgcataaagtaggcgtacatggcgcgcatgtccgcttcgctgatccgcgcgaacgagggatacggcatcgccggatagagcgtggaaccgtctttccgcacgcccttgcgcaccgcgtcgtcgaactcttcgaaggtgtacccgccaatgccgtgttctttatccggcgtgatattggtggagtagatggtgccgatcggcgtctccatcggcaaaccgccggcgaaaggtttccccgctttgccgttggtgtggcaggcgacacagtcccccgcccgcgccagatactccccctgcttaatcagattgctgtccgcaggcgcctcttcggcgaaggccgcgcagctcaatgccccaagcaccagggccgataaccattgcattttcatcatctgccttcctttatgcctgcaccaggggacccggatttttcagatactgctcacggatcgccttcgctgaccagtaggccagcgcggccaccgtgccggttgggttgtagcccagcccctgcgggaacgcggaggcgccgatgacgaagacgttatgcacgtcccagctttgcagataacggttaacggcgctggttttcggatcttcccccatcaccgccccaccgttcatatgggtggtctggtaggtggtggtatcaaagtggctgttggcgttttttgggctgccgaggatatatttcggcttcatcgctttagcgatcggcgccatcttatcgaacataaactgcgccatcttgatgtcgttttcctgccagtcgaaggtcatgcgcagcagcggctggccaaagacgtttttgtagttcggatcaagatcgaggtagttctgccgataggactggtgcgcgccgtgggcatccatcgacaggtgatgggtgtaggtatcggccaccgccgctttccacttgctgccccacgccggggtgcccggcggtaccgggaaaccggagatgggcttggtcccggcctggttgacccagaacggcgaaccgccgacaaagcccgccgcaccgtggtcgaagttgtcggcgttgaagtcgtcgacgccgacgccgttgccgcccgcaccgataaacggattggtataggtgtctttgtcgaaaatggccttgatggtggtcatgttctggtaggcgaagttacgccctaccaccccttcgccggtctccggattgtacggtttgccgatcccggagagcagcatcaggtgcacgttgtggaactggaaggcgccgataatcaccaggtccgccggctgttccatttcgcgcccctggccgtcgacgtaggtcacgccggtggcgcgggatttgtcgttggtcaggttgaccttcagcacgttggcgttagtccgcagctcaaagcgtttttcctggcgcagcgccggcagaatgttcacgttcggcgaggctttagagtacatgtagcaggcgtagccgctgcagaaaccgcaaaagttgcacgggcccatctgcgcgccgtaggggttggtataggagtcggaggtgttggccgacggcaggttataggggtgataccccacttccagcgccgctttttcaaacagctgcgccgaccaggtgtttttctgcgccggcagcgggaagtcgtccgagcggtccggggcgaaggcgttgccgccgcggcctttgccgacgaccttgcctttgatcgaccaggcggtcccggaagtaccgaatactttttccgctttatcgaagaacggttccagctcgtcgtaggtgacgccgaaatcctggatgatcatatcctgggggatgaagtttttgccgtagcgttcttcatagtggctgcgcatccgcagctcaatgggatcgacgcggaaatggacgccggaccagtgcagcccggcgccgcccacgccggtacccggcaggaaggccgccagctggcgatagggcaccgcctgttggctggtgttatgccggatggtgacggtgcttttcgacagatcctggaacagcttgcggcggatgttgtaggtcagctcatcaatcacctgcgggtaggcgccgtccggccaggtgtcgcgcatcgggccgcgctccagcgcgacgacgttgagccccgcttcggtcagctctttggccatgatcgccccaacccagccgaagccgacgatcgcgacatcggtttttttcaatacggtggccatgattacgccctctccccattaattgataccggcgggaaggggtagcgttcgccccgttcaacccagtccagaaagtcggcgcgcgcgccgggaaaattaatcagcgtccagccgaccatgcctttattgccgccatggatcgggtcgctgaagaacccttcgcgggtgttttgcagcagataggtgaagaacagcgaggccggcagctgtttgaactcggctttacccgattcccacaggccgagcgcctcgtcctgttgctcgctgctcagttcagcgaaggttttatgatatttgtcctgacaccacgcctcggcgtcggcgatcccgaggttatagatctgtttgggcaccagcggcagctgataacccatctctttcggcacgtcgggattgaagggcccctgcatataccagatggagccggtggcgtaaggggtattgagctggcggtcgataaactccggcacgccggcctctttggcgccgggaccgagttcatccgccgggattaagcgagcgacggcggcgttgataaacgcccactcacgatcgttgaagaactgcggcttccagtcgctggccgccgcggtgttcccggaggctggctctgaagcgggggccgcctgcgcggtcgcgctggtggccacgccaatagcccctgctcccgcgccgccgatcaccaccgtcgggatcagcgccatcgatttcaccaggaaatcacgcctggaattgttggttttctcgctcgacatcatcacattcctgtcattgaaaattactgtttttgtcgctgacaaaaccagtgaatgtcgtgctggaaccgataccattgcgcttttaaaccgcttagcgtctggcccggcccggcaagtcggataaaacatcgccagaggcgatatcatttatagggttatcgtttggatagtagacgattctcaacgaaacgcgggaaatcggagagaaattcaccggtctgtcatcgtgagaagagtgctgccataaccttgaggcggtaaaccagcggcattcacaccgcgctgagcttacccatgcgccaaaaaagagtgacttgtatcacaaatgttattttttgtttatggtacatggcagattaaacgtctgtaaatactcgtattaggaataattaaacattttgagctgttaaaaaagttaataaccgttgttaactatcttgtatctattgtccggctagcgccttcagctggcgatatcccatccacaggagaagagaagatatgttcgatcatgtgaaattcggcgttagcgactatgccgccagcaaagcgttctttttgcaggccctggccccgcttggcgtaacgttggttggcgaaggcgaaccgagctacggcgcagagctggccggcagcggcgatgcttctctatgcctctatcaaagtgcggaaaaaccggcgccgctgcacattgcctttcgcgccgacagccgcgagcaggtcgatgccttctggcaggcagcgctggccgccggaggaaaggacaacggtgcgccggggctacggccaaactaccacgccagttactacgccgcgtttgtgattgcgccagacgggcacaatattgaagccgtgtgccatctggcggggtaacgggcggctaccgctgcggaaaaatccacacatcctccgccgggagcgtcagatggcagtgttcggcatcgcgcagcgccgttccgtaggcgcgcagcggaaagtcgtcgccttcggtacggaacaggtactcccagcggtcgccgaggtacatgctggtcagcagcggtagctggaggctgttatcctgcgctgcgccgtcgagtcgcaggcgctcgacgcggatcaccgccgtcgccggctcgccgacgctgaccccctcgcccgctcgcccccacagcgtccagctggcgccttcaaccctcgcacgaccgttttccagcgccgtcaccttaccgtgcagacggttattgctgcccataaactcggcggcgaacagcgtcgccgggctgccgtacatctcctgcggcgtcccctgttgctcaatgacgccattgttcagcagcagaatacgatcggagatggccattgcttcattctgatcgtgggtgaccatcagcgccgacaggcccagcttaatgatcagctcgcgcagaaacacccgcgcctcttcgcgcagcttggcgtcaaggttggagagcggttcatccagcaggatcaccggcgggttgtaaaccagcgcccgaccgatggccacccgctgctgctggccaccggagagctggtgcggatggcggttgccaaggtgccccagccccagctgatccagcacacgctgcacccgctcttttatctccccggcggccactttacgcagcttcagcggataggccacattgtcgaacaccgttttgtgcggccacagggcataggactggaacaccaggccgaggttacgctcttcggccgggatctcgctgcgcggcgtgccgtcgtacaccgtgcggttgccgatggcgatccgtccgctcgtcggtttttccagcccggccaccgcccgcagtagcgtggttttcccacttcccgcaggccccagcaacgacaccacctctccccggccaagcgtcatggaaacccccttcagcaccgggttgtcgccataggtgagatgcagattttctaccgataactcaatcatgtaatttcactccaaagcgcagggcgatacccaggccaatcaccaccagcagaatattgataaaggagagcgccgcgacgatatcgatggcccccgccgcccacagcgacaccagcatcgagccgatggtttcggtacccggcgacagcagatagacgccggtggaatactcgcgctcaaagatcaggaacatcagcagccaggagccaatcagcccatagcgcgacagcggaacggtcacgtggcgggtgatctgcccccccgaggcgccggtgctacgcgccgcctcctccagctccgggcccacctgcagcagcgtcgaggagatgagccgcaggccgtaggccatccacaccacggtgtaggccagccagacgctgaagatggtgttgcgcagggcgcgcagctgcacgataaggtgctcccgcagccagtcggccaccggcagcgccgagagccagccgtgcttcagcgactgatcgagccacatcggcacaaacaggaatacccacaggaatgccagcccggccagcagccccggtacagcgcgcgggaccagcacgctgtagtcgagaaagcgggtgacgttgtccgctttgcggtgcatggcgatgccgacaaacagatagcagatcaccgccagcgcgccgccgatgatgccgatagccatcgagttgacgatcgcccgcagcaggttgggctgctgccagatattgtggaacgtcgccagcgacagctcatcccacagcgacacgccgacgccccagttggagataaaagcgcgcagcgccacgccgagcagcggtacgccgatggtcaccgtcagccaggccactaccaccgccccggcgacccagcgccatttgcccagcggcagcgcccgcgcctgggacgccttgcccttcatggtgacaaagcggttggcggtgcgcatcagccgccgctggagcatcaccagcgggatggtgatgcagatcagcactaccgccaccgccgccatcagatggtaggagggggtgccgagcttgttagtcagcttgtagagataggtcgccagcaccatgttgccctcggggtcgcccagcaccagcatcagaccgaagacttccagaccgaggaaaaagagcaacacgcaggcgtaaagaatggatggccgcaccatcggcagactcaccgaggtcatcacctgcagcggcgtggcgccgacggtgcgcgccgcctcttccacgtcggagccgacgctgcgcagcgccgaagagatatagagataggcatgcggaacgtgagttaagccggcgatgaccacaatgctgaacatcgagtagatattccacggcacaaagccgatcagctgctgcgcccactgggaaaagaagcctaccggcccggcggccaccacgtagccaaagcccagcaccatcggcgagacgaagatcggcaccaaaatcagcggctcaatgatccgccggccgggtaaatcggtgcgcaccatcagaaacgccaaaataccgcccagcggaatggcgataatcaccaggccaaaggccagaataaaacctgaccttaatgccagataaaaatccgggtcggtaaaaataaaggcgaaggcttccagactccacgatttggagcgggaaaagaacggtgccgaaagaaaactctgcaccacaataaataacagcgggacataaatcaccagcgccgtgatgcacaccaccacgccgcgcggcagcccctgccactttctgcgtaatacgttcatggttcatcccttcggtcaggtgaataaacccgccgggtgtgaataggggcatcggcgatgcccctgaggaggattatttcgcggcggcgctgcgccattgtttaataaactgcagacgtttttgcggctgtaaataatcgagcagcgtttcgttgaccgggatcggttttaacgctttgcccagcagcgcggtcataccatcgatatcatttttacctgcaatatcgcgacgaattgagggaatatccgcctggctggcgaggatctgctggcctttttccgacaagacatagtcgagccacaattttgccgcattgggatgttcgctctcctggctaataaacgagacgcgggagagcaccagcacgtaatctttcggataggcaatacctaaagagggatcgtttttcgcccgcgcttcggcataagagccaagaatgttatagccgatcaggttttcgccggaggagacgcgctccatcattgtgccggtggaagactgcaccgtcaggccgcctttggcgatattcgccaggtcggcaaaatagttcgcgtcggcctggctgtcctgtaccgccagcataaagccgaggcccgatttttcgatatcgtaggtggtgactttgcctttaaatttatcggcctggctggcgataagttttgccagcgcggtatgcgaatccggaacctcattctgcgggatcagccgtttgttatagataaacaccaccggctcataggtagtgccataggctttttgctgccagaccgcccagtcgggtaattgcttcacctccggcgaggcatattgttccgcgtattcggtggctaatttcagcgcggtatccatcgatgagctccacaccacatccccgctgccgcccccggcggcctgttcgctgatatagcggttatacagctcggtactgttcatgtcgttatattcgactttgacgcctgggtattgcgcttcaaatcccttaattaacggcccggccgctttggtatcggtcgtggaatagaccaccaccttgccctcttttacggcggcatcaatcgttttttgataatccgcgggatagcccgcaggcacctccgcccaggcggcacaggcgaaaacggccgtcagtgaaaccactaaaccacttattttcttatacatgataccaacctttaatcatcaattaataaacacaaatttaacatatagtggtatcagctccccttgcaacgacggggatggcttttttctggcttttgtgacactggcagaatttaaaaatgtggtgtttatggcgttaattaaaacgcgatcccggcccggttttttatcgtgtgtcgtatacgcaggcgctggcgcagcggcatgtcgccgggagacgccgcccttgaccttctgcgccgggcggcgcagcataaaacggcaaacataacaaaataacaacagactacaggagagaatcagtgcctacaggacaccgctttctggcgacggatctgcatcagtttgtcgtctcactgtttacccatctcggcagtaccccaggggaagccaccctcgtcgcggaccatctgatcgccgccaatcttgccgggcatgactcccacggcgtcgggatgatccccagctacgtcaaatcccacgccggtggttttctgcagctcaaccgccacgccacggtgaccaaagacgccggcgccgtggtcaccctcgacggcaacgccggcttcggccaggtggtcgcccacgaagcgatgcagttaggcattgaaaaggcgaagcagcacggtatggcggctatcgccctgcgcaatgcgcatcacgtcggacgcatcggctactgggccgaacagtgcgccgccgccgggctgatctccattcacttcgtcagcgtcatcggcgacccgatggtcgccccgttccgcgggaaggacagccgcttcggcaccaacccgctgtgcgtggtgtttccccgcgcgggccatccgccgctgctgctggactacgccaccagcgccatcgcctttggtaaaacccgcgtcgcctggcataaaggcgaagccgtggcccccggctgcctgattgacgccgagggtcgacccactaccgacccggcggtgatgcagacctcgccgctgggcgccctgctcaccttcgcccagcacaaaggctatgccctggcgacgctgtgcgaagtgctcggcggcgcgctctccggcgggcaaaccacccatcaggagagcctgcagaccagcgtcgacgccatctttaactgcatgaccacggtgatcctgcgcccggacgcgttcgatgccccggacagccaggcgcagacggaggcctttatcgcatggtgtaagcagtcgccgcacgatgccgatgccccggtgctggcgcccggcgaatgggaggccgccaaccgcgaagcgcggctggcgcaggggatcccgctggatgccggcagctggcaggctatctgcgccgccgcgcgcgacgtcggcctgagcgaatcgcacttcgaccgctgccgccctctcgcctagccgcgttttactcccgcagagcgtctgacgtcggcgctctgcgtcatcgtcattagtgacgaggtcatgctcccgtcatcaatctcttttcatttttcaatacagatcaagagtttaaattctggcacaagacctgcatagcgcaacaggcctgcgtctgcatcaccaccaggcgataccgcgatcgttgcccgtcgggcccggcgcgacagcgatcctcagttcactgttaacaggtctgttactgatgaaaaaaatcacgagcgtgtgcccctactgcggggcgggttgcaaacttaaactggttgtcgacaacaataaaatcattcgcgcggaggccgccgacggcgtcaccaaccagaaccagctgtgcctgaaaggctactacggctgggattttcttaacgatacgcagctcctgacgccccgtcttaaacaaccgatgatccgctaccagaaaggcggcgccttcacgccggtcagctggcaggaggcgattcgctataccgccagcaagctcagggagatcaaagagaagcatggcccacgtgccatcatgaccaccggctcctcgcgcggcaccggcaacgaaaccaactatgtgatgcaaaagttcgcccgcgcggtgctgaacaccaataacgtcgactgctgcgcccgcgtctgccacggcccctccgtcgccgggctacagcaggcgctgggcaacggggcgatgagcaactcgattagcgacatcgaaaactcgaagtgcctgctggtttttggctacaactgcgccgactcccatcccatcgtcgcccgccgggtaatcaaggcccgggacaacggcgccaaaatcattgtctgcgatccgcggcgcattgaaaccgcgcgcattgccgatcgtcatctgcagctcaacaacggcagcaacatggcgctggtaaatgccttcggctatgtgctgctggaggaggagctgtacaacaaaacctatgtcgaacgctataccgaagggctggatgcttaccgcgaggcggtgaaggattacgccccggaagcggtggaagggattgtcggggtcagcgcgcgggaaatccgggaggcgatgcgcatgttcgccgccgccccatccgccaccatcatgtggggcatgggggtcactcagtttggccaggcggtggacgtggtgcgcggcctggcaagcctggcgctgctcaccggcaacctgggacggcccaacgtcggcgtggggccggtccgcgggcaaaacaacgtacagggcgcctgcgatatgggcgtgctgccgaacctgtttcccggctatcaggaggtcaccgaccccgccgtgcgggcgaaattcgccgccgcctggggcatcgacccggcgctgatggacgaccaggtcggcacccgcatcaccgaggtgccgcataaagcgctgaccggcgagatcaaagcctattatattatgggcgaagatccgctgcagaccgaagccgacctcggcctggtgcgcaaaggcatcgaggcgctggactttgtcgtcgtgcaggacatcttcatgaccaaaacagcggaaatggccgatgtcctgctgccggccacctcctggggcgagcacggcggcgtcttcacctgcgccgaccgcgggttccagcggtttgaacaggcgatccctccggcggggaatgtgaagcgcgactgggagatcatcagcctgctggccagcgaattgggctatccgatgcactatgagaacaaccagcagatctgggacgagatgcgcgagctctgcccgctgttctacggcgtgacctgggagaaaatgggcgatatgggccatgtccagtggccgtgcccgaccctcgatcatcccggcacgccgtggctgtatcaagacaaccgcttcgacaccccctcgggtaaagggcagctgttcgccaccgcctggcgcgcgccggcggagcgcccggatgacgagtggccgctggtgctctgcaccgtgcgggaagtcgggcattattcctgccgctcgatgaccggcaactgcgccgcgctgcagtcgctggctgacgagccgggacgggtgcagatgaatcctgcggatgcgcaacgactggggatcaccgacaaacagctggtgtgggtcagctcccggcgcgggaaggtgatctcccgcgccgacctcagcgatcgcatcaatccgggggcggtctatatgacctatcagtggtgggtgggcgcctgcaatgagctgacccaggataacctcgatccgatctccaaaacgccggaaaccaaatactgtgcggtgaaagtggaagcgattgccgaccagcaatgggcggagcgctatgcctggacggcctacagcgacatgaaagcgcgactgaaagccgctgccgacgtctgacctcagggagcgcagcgcgctccctctgccgctgccggtgggttacgccgccggcagctgtttctccaccagccccacccacatggcgacgccggggccgatcagcgcatcgttaaagtcatagctggcgttatgcagcggcttcgacggggtttcgccgtcggtgcctatccagaaataggcccccggacaggcctccagcatgcaggcaaaatcttcggaggccatcgacggcgcctgattccagcgcaccgcttgcgcgccgagagtggcgacggccacctcgcgcacctgctgcgcctgcagcgcatggtttttggtcaccggataacccgggaaccagctaatctcgccctgcacatcggacacctgcggctgggtcgccacatagctttcgatgagctcccgcacgcgggcgcgaacgcgattgctcagacagcggaaggtaccgcgcagcaccacggtgtccggcaggacgttgatcgcctcgccgccgtttatctgggtgatgctgaccaccgcggaatcctgcggcgacaagcggcgggaaggaatggtctgcagcgccattatcagttgcgccgccgcgacgatcggatcggccccgctctccggcatcgccgcatgacagctctttccgcgcagggtgatctcgaaggcgtccagcgaggccatcatcgcgccatcgctgagcgccacttcgccaagagggatccccggccagttatgcagcgcgtagatggcgtccatcgggaagcgctcaaacaacccctcctccaccattttgcgcgcaccgccgaggttctcttccgccggctgaaagacaaagtggacggtgccgctgaaatggcgggtctgcgccagatgggcggcggccgccagcagcatcgcggtatggccatcgtggccgcaggcgtgcatcaccccgggacggcgtgaacggtagctgacgctccccagctcggtgattggcagggcgtccatatcggcgcgcaggccgataaccggcccggggccgttctccagcgtcgccacgacgccggtgccggccagcccgcgatgcacctgcagcccaaacgaggccagtagctccgcaacgcggcgcgaggtctcctgttcctgatatccgagctcaggcgcggcgtgaaattcacgtcgccagccaacggcttcggcgatcagtgacggcgatacggccatgtattactcctttcctgcatagcgtaatgctgaataatcggtcatgcgtcgcgtttttccccgtcgctcaccggcgtcggggcgctgccgctccctccgttatatcctgtcgttaccacgctgacaacgtcacgaaatgcggcggcggcgcggcgtacagcccacctgccgccctgcggcccttttttggtagtgatttcaacggtgacaacggccagtcgattaattattatgcaactcaggacggcaatttgccgaaggatccactactgacctctccgtcatcggaaataaaatgtttaacccagaccagaatcgtcttgcccccacgctggcgatgatcatggccgcgtcgcttgtgggatttatcaccggctatacggtgccgttaatcagtcttgagctggcgcagcagcagatcgcgccgctgtacgtcggcctgctggccgctctgccgcccgccggcatgatgatctcctctttcctctctcctgcgctgtgccggcgcattgaaatgggcgtgctgctgagcggcagtctgatcctgctggcgctggcgaccatcgcctcatgcatgactaccgatatgacgctgcttttgctgccgcgcctgctgaccggcctggcctccggggtcattatcgtactcggcgaaagctggatcaccggcggcgcggcgggcagccagcgcgctaccctcaccggtctctacgcctcggcctttaccggctgccagctggccgggccgctgctgatctccgtcggccccgcctggcagacatcagcgctgatcgcgattgtcgcggtcaccgccgtctgcctgctgatgctgcgccatctgcccaccggcactcgtgaaagcctcggggagcgcgccagctggcgcagcctcggcgcctttctgccggtactggcctccggggtcttctgcttcgccttctttgacgccagcatcctcgccctgctgccgctgtacggcatggacaaagggctgaatgaagggctggcggtgctgctggtcaccgtggtgctgaccggagatgcgatgttccagaccccgctcggctggctggccgaccgggtcgggattcgccgcgtgcatctgagctgcgcggtggttttcagcctgtcgctgctggccctgccgctgatgctcggctcgcgcattcagctgatggccatttgtctgctgctgggcgccgcggcgggcgcactttataccctgtcgctggtgcgggcggggaaaaccttcaatgggcagaagctgattatgattaacgccctgttcggctttttctggtccgccggcagcgttgccgggccggtagtcagcggcatgctgatcggcatcactggttacgatggcctgatcgtcaccctggtggccagcggcgtgctgttcctgttgattcagtgtctgtgcaaaaacgagaaaaccctgcttgccagtgagcaggaagatgacatggacgaggcgacggagtccgcacggtagtcctcacgggctggcctggcgccagcccttttttatggccctcaccggagggtatcctgttcttgctggctcactgctgttaaccattgccggccccccagccgagaggaaatcccatggaaagtaataccttacatcgtggcagattgatcgatcatattctgctggttgtcgaagactttgaggcaagcaaaaacttctataccgccgtactgtcggcgctggagatcccggttatcaccacctccaacgaatacttgctggccgacgaactggtggtggcctcacgccacagcccggaggctgccgggaaactgactgggcgccaccacctggcattccaggccagagatcgtgacatggtggacgctttttaccatgcggcactgacccatggcggacgtgataacggcgcgcctggcgaacgacactatcatcctggttactatgccgcttttgtgctggatccgcaggggaataatattgaggtggtgtaccatggcaaggctgagcgcagcgccgggtctgttgcgatcagcttcacgcagtaagcgggcgaaagtcacattttcttacctgcgcaattcccataataaatgtgggtgttatcatttccttgataaataattcatacccatagctgaggcgtcgatgctggaaaacctaatcatctgataatcagacttccgaccatcactggccggactgattatcactgcgctgaaatcgaatgcggacactggcgagtgttcgcctattttgcccatgatgatgacacaggtttcccggtatgaatgtttcccctcaggagcaagcgactttattcattctcgtcccctgcggacaaacgctccacatccacgcgatggcagcgagacccctccctcgcataagaaacgtcacccccagccagttaacccggtgcgttatccctctgccatgctcgatcactccctctgcatgccgttgcgttgccttacccaatgaccgtcgtcaggcgaattttatctttcgatttgtcattccgcggccagcctgtgacgacagtcgcaagggatccacatcaaccaggccccgataccagggaaaccgtcaccgaccagggagtcttcgcgtatgaaattagcgttgggaccgtacatccgttttagcagaatcttgttatttccgctggcgatggttatctatgatttttctgcttatctgactaccgatctcattcagccgggtattatccacatcatccgggaatttgaggctgatgttgcgttagccccggcctctgtcagcctctatttagccggggggctggcattacagtggctgctggggccgctctccgaccgcattggtcgccgccccgtactactgaccggagccatcatctttgctttggcctgcttcagcatgatctttgtcacgtcgattgatcaatatcttatcgcccgttttatccagggaaccagtatctgcttcatttcgacagtcggttatgtctccatccaggaggcttttgatgaaaaagagtctatccgcattatggcggcgctgacatccatcgttttgctggcgccggtaatcgggcccctggcgggcgctggcctgatgaatttcctgcactggaagttattgtttgcgatcatcggcgccatgagcttgctgccctgggcgttactgatttttaacatgccagaaacggtcacctctcagggccgggggtttcgtccgggagaggtattttccgagtttgtccgcgcctttaaacagccggtggtgctcacgggcgcgctggccttgtcattcagtaacctgccgataatcacctgggtagcactctctccggtgatcctgatcgatgacggcgggatgtcgcgcggcgtctatgcctggacccaggtgcctgtctttggcggcgttattattgccagcatcatagtggcccgttttatcaaggatccgacctctccccgctttatctggcgcactatcccgatacagctgaccgggttgttggtattactggcgggaaatattgcatggccccatacctggtggtggtccgtttcaggaacgagtctctatgccctcggaacaggcctgttgttccccgtattattccgttttgcgcttttttcccactccctgccgaaagggacggtttcagccaccatcaacattgtggcgctcagttttatggcggcctcggtggaagtagcgcgctgggtttacttccaggctggcggcagaattgcttttcactgcctggcgctgatagcgggaatcgtcgtcatcatgctggtctcgcgcttgttaaaactccgtcagcaacatctccttcagccagcctgaaggtttaggcctttttgcccgcaacaggagaacactatgttttcatacattatgctgggaacgaacgatctgccacgcgccatcaagttctatgacccgttaatggcgctgctggggcacgtcaaagccggccgtaacgaacagggggcgtcctggggcacctacaacggcaatcacacctgcgggctgtgcgtgggcgttccttttgaccaacagcctgccggggtgggtaatggaacgatggtggcgcttaacgcccgctccgtcgcacatattgcggaactgcatgccctcgccctgcaactcggcggacgtgatgaaggcggtcccggtcaccggccgcagtatggcgacggttttcacagcgcctacgtccgcgatcccgacggcaataagctggcgtttgtttactatgcgtctgcagattgaatggctgcagcggaggtggcttttgcaggcggagaaaagggtgtcaggacggccaacttcgccgtccttattcaccgaggaataaaaaagccagcagctcaagcgctgcggcttatcttcccggcaagttatctaccgcaaagtgataacgtaatccggcgtcgcgcatacagcgtttccgccgccagctgaaaatcatattccatcgccttcagctttttcgtcttgagctgttttagtgaaataccctcgatatgccctgtcgcgaccaaccaccggatttcagccgtactcagcttgagctgttttttcagtattgatagcaggctgatgcgaaatggctgactgactctgacgcgcaccgttatccgctgacatgccatcaacgtaaccgaccattgctcgtgaatacgaaaatcaggttgccccgacggctcggcgcggttgcgcttcagcgtcgcgaggtcagcggcataatagtgaaccatggctgcatcgttctgcagcaggcgctgaagcagttcacggtttatcttgctgacgtgctgcctggaaaacagggcgatattccaggtgtaatcgcagcgcgtgcatttatagatgctccagatatccagcagcttcttttgcgaattcacccggatggcgccggaaggcgcgaagtcgcgttttacattgcaggcggggcagcgtttggcaatgtgctgataccccacgggcgtgaccgtccatgtaactgtcataacgtaccttttttaacccatacgaaaccgagtccgtcattaacggaccatgatttttggcgtatgaaaaatagttaatcgctatttttcagtgggttaaaaaaagatttccaacgttattttcctggagaagtcctaatcgacaccctgagattaacaaaggggttatcgcgggatatatgagcccagtcaatgtttgcgcggatgattaaaagcttcgtcaatacacccggaatgctcagcgggctggcatcgcgccagcccgcccggtttacagcaccttgctgaggaacgcggcggtgcgtgggttggtcggcgcgctaaagatctgccccggcttgccctcttcctgaatcacgccctggtcgatgaagatcacccggtcggccacttcgcgggcaaagcccatttcgtgggtcacgatcaccatggtcatcccctcgctggcgaggtttttcatcacctccagcacgtcgcccaccagctccggatccagcgccgaagtgggctcatcgaacagcattatcgacggcttcatcgccagcgcgcgggcgatggctacccgctgctgctggccgccggacaggctcgagggccaggcgtcgcgcttatcgcttaagcccaccttcgccagcaaggcttccgccaggtcgaccgcctgctggcgcggcatattgcgcagattcatcggcgccatgatcaggttttccagcaccgtcatgtgcgggaacaggttaaagcgctggaacaccatgccgacgctttcgcgcatcttgttgaggtcggtggtccggtcgtgggcggcaaagccgttaaccaccacctcgccttcgctgaccgtctccagggcgttcatgcagcgcaggaaggtgcttttccccgagccggatgggccgatgatgcacaccacttcctgcggtttaatatcgcagctgatgccgcgcagcacgtggctgtcgccgaagcgcttatgtaagttattaatgtgaatcacttttgccaaacctcttttccagacggttaaccagctgcgccagcaggaaggtgatcacccagtagaccagagagatggtcaggtagggttcccagtaggtggcgtaggcgccggagacggtgcgcgcggcataggccagatcggccaggccgatcgccgaggccagcgacgagtctttgacaatggcgatggcgttattgcccagcggcggcagaatgcggcgaaacgcctgcggcaggatcaccttgcgcatggttttccaccacggcatgcccagcgcgcgggaggcctccatctgccctttgtcgatcgactggatgccggcgcggaaaatctccgacacataggctccggcgttaagggtgatcgccacgatgcaggagaggaacgccccgtagctggcgcgcagttcgcgggcaaagtcggcgctcatcaggccgctggtcaccagcaggccgtcgcgcggattgataaacagcggcaccagcgcaaagtgcaccaccataatctgcacgaacagcggcgtgccgcggaaggcgctgacgtaaaagcgcaccggaaactgcaccaggtagcggagaatatatttccacggcccgtgctcggccttcgccatccgcccgagaccgagagttaacccccacagcgtcccgaggatcacgcagataatggtacatttaatcgtcatcagggcgccgtccacaaacagcgggccgtactcctcgatgatctcccaacggaatcccgtcatagtccttccctaaaaaatacggctatcgcctgggcgatagccgtggtcactgaaaaaggtggattattgcgctggcagcgtcggcacgttgtcgtcgaaccaggttttatagattttggcgtaagtcccgtcagcaacgatcttttgcagcccggcgttgattttgcccagcagttcactgttgcctttcgccaccgcaataccgaaatactgacgctcaaatttggcatccggcaccagcttgaactgcttctccgggtgctgtttgatgtagtacttcaccaccccgacgtcgcctaccgcggcgctgacgccgtcctcaaacagctcctggagcatcagcggggtattgtcgaagcgcttgatcgcggtgctgtttttacccagcacctcagaaaccacgatatcgccggtgctggagttcaccaccccgaccttctcgtttttcagggccgccagtgaatccacctgcgagtcctgagcgacgacgatagactgttcggccgggaagtacggcgcggagaaatcgaccatctgtttgcgtttatcggtgatggtgatcccggagatgatgatgtcgcggtcgccggtgttcagcgtggcgaagatgccttcccatggggtattgaccagcttaacgtcaaagccttcggctttggcgatggctttgatgatgtcgatgtcgaaaccttccagctgtttctggctgttttcaaattcaaacggccggtaggtgccgccggagccgacggtataggtttccgcagccgcctgtccggcagccgtcagcgcggctatcatgcaacacgctttgagcaaattcttgaccatgagatttcctttttatgcatttattttgcataaaaatacacacactcacttttatatgcaaccggaaaccttcccgctggtgaattatcttctcaatggccccgtttaccgccggatttaccgatagcccgatgcagatcgttgattcgtttcagggatttcaccgttttttgtggcgtggtagaggccaccgacaggacaattatctcgagacagaccagcaccgtaccgtgcagcggcatccggctactgtccccgccgcgcgggacgtcgatcaccacctgcgcctcctggctgaagcgcgagtccaccgcctgggtcagcaggatggtcggaatacccagccgcttcgcctcgcgcagggtggtcaacccttcgcgatggggggatttttgccccatcatgatcagcacatcgccgcgctgcaggccgataagctgttcggcaaggctaaagcccgtgcggttcatcacgtacgccggcaggccaatacggctgaacaaccgggcggtgtattcggcgaggatccccgaggcgccgataccgaagatccccacctggcgcgcgtcgctgagcaataccaccgcctgagccaccgccgcgcggttgtcggcccgcgacaggacctcgcatacccgctgatggccttcaagcacaaaatcaatactggagttgacgtcgctggagagcgcggtaaccgtcgagcgcatcttttccgccgaggtgaccgaggtgccgaaccagcgctccatggtctgcttaagctcgcgcagcccggcgaagcccagcgcctggatggcacgcaccaccgtggcgtcggaggtctgggtcgcggtggcgatctccatcgccgtatgctccagcaccacctcgcggttgtcgttgatatagctgaccaccgcccgcagccggggggagagctggtgcgcccgggcgcgatagcgttcgccgaacagatcgactttgcccttctctttttttaccgcgcttttcatttggcctccgccgggatcggcctgccggcaatatgcgactgcacctgggccaccatcagggacagcgcggcgtaggagttagagatcacctcttcccgcggcagcaaaatatagtgcccggtgcggcaggcgcgcataaagtcgcaccagccgggcatcacgccttccatcgcctgcagctcatcctgcggcttaccgccggtatccgaccgccaggtggcgaagacaaaatcagcgtctagctccggcagctgttccgcgctgacgtcaatgcgctgaccatcggggatccgctcaatcagcggcggaaagcggaacccggcgtcgcgcagcacccggcccagcgcatgatacgaatgatgcaccgtgaccttgccgttgttcgcctggatcactgagacgctgtactgcggtgggttgaccatcgctttcagctgcttgatttgctcctgatagcggcgctcgaggatcgccagccgcggctgggtgccggtcagctgcgccagcttgcggtaaatctccggggcgctgccctgcagatggtcgatgctcaccgtcggggcaatcttctccagttgctctaccgacacatggcggctgggctcagtgatgattagatccggcctggcggcggctaccgcttccagatcgatatcggcggtgccaataaagcggatatcgctgttgtcgatatcgacgccggtgagctgggcgctggatcgcaggtagtggctgccgtccgggcgcgtccggccgtggctggcgatcggcggcgccccgagctcaatcagcggaatggtaatgtcgagatcgtgcatcgaaacgatacgctgcggatgcagcggcacggtgaccgtgcggcctaaatcatcggtgaaagtttgagtttgtggggcggcggcgctgacggcccccgtcagcaacagcagcaatgagacgaaccaacgcatactaccttcctggttaaagggcatcacggcgacgccagagcaagataacgaagaacgggcaccccaccagggcaatgacaatccccgccgggatctgcagcggggcaaacgccagccggccaagggtatcggtcgccagcaccagcaaggcgccaatcagcgcgctgccccacagcagcgatacctggccgccgcgcagcacaaaacgcgccatatgcggcgccatcaggcccacaaaacccaggctgccgacgcaggagacgctggccgaggtcagcagcaccggcgcaaaaaagcgcagcaccgtcagctgctgcagacgtacgccgaggccgatggcggtccggtcgcccagcagcgccacgtccgccgcccgggcggtacagaacaggatgatggccccgggcagcgcccagcaaaaagccaccgccagcagcggccaggtggcggcctgcaggctgcccgccagccagatcatcgccgtctgcacgtcgcgtacgtcggcggtggtcataaagatgccgaccgcggccgccaggctccaggagacgccgatgccaattaaaataaagcgcggccgcgaacagtcgcgggccagcgtcaggaccagcagggccaccgctatgccgccgaccatccccgccagcggccgccagaccaggcctaccgccgggaaaaacagcaccagcgccagaaccacgatgcttgccccctctttgacgccgatcagccccgggtcggccagcccgttacgggtgatgctctgcatcgccgcgccggccagccccagcatggccccgcacagcagcgccatcaggatccgcggcaggcggatatcaaacagaataaagcgcggctgctcgcccatctcctggggcgccagcagggctcgcgccagcgtcgacgcgggcagcggatagctgccgcggctaaggctgtacagccccagcgccagcagcgtcagcactatgctggcggcaatttttaacgccgcaggacgcagcagcagatgacgggaggcgaaagccagcggccgaaaaccggcccggtgaacggcgcgcgtcatttaaaaaacctcgcggcgataaagataaacaacggcgcgcccaccagggcggtcatcgctccggtggccagctcctgcggcgcgaccagcgtccgggcggcgatatccgccagcaccagcgccagcgctcccaccggcgcggccaggggcagcgccaggcggatgtcttccgtcaccagacggcgcaccatgtgcggcaccaccagcccgacgaagccgatcggcccggccaccgccaccgccgcgccgcacagcagcgcaatcgccagcaggcccagcagccgggtctggacgagattaacgccaaggcccagcgccaccttatcccccagcgccagcacgttgaggcgtggggcaatgagcagcgcgacgccaaggccgatcagcgctggaaccagcgccgtctgcagcgtgctccagttcagtccggccaggtcgccggccagccaggtgcgcatcgccagcagcgtctgttcatcgagaattaatatcgccgccgtcaccgccgacgcaaaccctgacagcgccactccgcacaatgtgatgcgcagcggcgtcgccccgccgcgcccggcagaggccagcgccatcacgccaccgaacagcagccccgcgccgcaggcggcggtcagcgggcgcccggcggggaaagcgccgaaggacaggcccagcgccgaggtcgccaccaccgccagcgaggcgccggcgttaagcccgagaatatgcggctcgccaagcgggttacggatcaccgtctgcagcagcagcccggcgacgccgagcgccgcgccggtcagcagcgccgccgccagccgcaccagacgcagatcgacgataatccgctgctcaaagttacgcggatcgtactccagcagcgctcgcagcaccgtctgcggggcgatccagcgggcgcctaagccaagatgcaccagcgaggcggcgataagcagcagcgttagcagaagcagcgccagcagggggcggtggcgacgccgcgcggaaagcaggatggccacgctcattgtgccgctgcctggcggtcgcgaaacggcataaagaagggtttgccggtttgcgggttgatcgacatctgcacgtcaacgtcaaacacgcgtttaatcagctcagggctacagacatcgttgtcgctaatcgtgccggcgatgcgcccctgtttaaggaataccagcagatcggcgtagttcaccgcaaagttaaggtcatggagcactgtcaccaccgtgcggccatgttcgcgggtgagggtctggagcagctcaaggatatcgacctgatagcgcagatcgagccaggtggtcggctcatcgagcagaatggtggccgtttgctgggccagcgccatggcgatccagcagcgctgacgctggccgccggagaggctgtccaccggcagatgggcgaattcggcggtaccggttaagcgcagcgcctcctctaccgccagctcatcggcctcggaccactggcgcatcagcccctgccacgggtagcgcccgcgcgagaccagctcgaaaacggtcaatccttccggggtcaacggcgattgcgggaggatgcccagctggcgcgagacggctttcgtcggcatctggtgaatggcttgcccgtccagacgcacgcagccgccgagcggtttcagcattctggcgatggtcgagagcagcgtggatttgccggatccgttcgccccggccagcaccgtcattttgccggtgggaatggtcaggttgatatcgtcaacgatcagggtctggccgtagccggccgacagggcatccagtacgatcccctgctctgcaggtttcacccgctgtggcataactcgctcctgcgccgcagcgttccagacgatagctggacattctgcagttaaatcaaaataaatctcattctcttttgatcatgacggggatgaatgtagtagtcaatactcgccatcgtcttcagacggggacgctgactacagcgaggctgtgccaacgcaatataatttaaataaaataatatcagatagataactacagaacattccctactggaggtgtttaaaacgtcctgttcctcgccgctgaatttttatcttgcataacgtttactactacatcccttcatgattgaatgattctcaattacacatctgaaggcgcattcagacgctaaacagagtgcttttattattcagggcaatgattttattggcttaatctgaccgcaaaggcagattcgttcacgagaaacagataatgactcaaccccatgtcgcctgcaggacgttgccagggcgcgcgcttttttcgcttctttttttagcctcaccgggattaatggccgccgacaatcgcgcggcgaaaagtactaacgacgcggaagagactatcaccgtagtggccgacggcgcgcagcaaagcgccaccagcggctatcagccgctcagctccgccaccgcgacgctaacctcgatgccgctgttggatattccccaggtggtcaataccgtcagcgatcgggttctcgaagatcagcacgccacctcactcgatgaggcgctgtataacgtcgctaacgtggtgcagaccaacaccctcggcggtacccaggacgcctttacccgccgcggcttcggcgccaaccgcgacggctcgatcatgaccaacggcctgcgcaccgtgctgccgcgcagctttaacgccgccaccgaacgggtggaagtcctgaaggggcccgcctcgacgctgtacggtatcctcgaccccggcgggctgatcaacgtcatcactaaacggccggagcggcagttctccggttcggtttccgggacctccaccagctttggcggcggcaccggcagtttcgacgtcaccggccccatcgaaggcacaaatctggcgtaccgactgatcggcgaatatcagaatgaggattactggcgcaatttcggtaaaaacaaaagcagctttatcgccccttccctgacctggtttggcgagcgggcaacggtgaccgcgtcctattcgcaccgcgactacagcgcgccctttgatcgcggcactatcttcgatctgaataccggccatgcggtgaacgtcgatcgcaaaacccgcttcgatgaagcgtttaatattaccgatggctattccgatctcgctcagctcaacgccgagtatcgccttaacgacgcctggaccgcgcgcttcgattacagctacagccaggatcactataacgataaccaggcgcgggtgatggcctatgattcggcgaccggcaacctcacccgccgggtcgatggtacccacggttcaacgcagaagatgcactccacccgcgccgacctgcagggcaacgtggtagtgggcggcttttataacgagctgctgaccggcgtcgcctatgagaattacgatctgctgcgcaccgatatgctgcgctgtaagaacgttaaaggctttaacatctatcatccggtctacggcactctcgacacctgtaataccgtctccgcctccgacagcgaccagcgcattcagcaggagagctatgccgcatacgtgcaggacgcgctgtacctgaccgacaactggatcgccgtcgccggcgtgcgctaccagtactacacccagtacgccggtaaaggccgaccgtttaacgtcaataccgacagccgcgacgagaattggacgccgaaagccggcctggtctacaaggtcacgccgaacgtctctctgttcgccaacgtcgcccagtcgtttatgccgcagtcgtcgatcgccagctatatcggcgagctgccgccggaagagtccacctcttacgaagtgggcgccaaatttgacctgttaaacggcattaccgccaatatcgcgctgtttgatattcataagcgtaacgtgctgtacaccgagagcattggcgatgagacggtggccaaaacggcgggcaaagtgcgttcccagggcggggaagtggatctggcggggtccatcaccgataacctcagcgtgatcgccagctacggctacaccgacgccaaagtgctggaagatccggattacgccgggaaaccgctgccaaacgtaccgaaacataccggttcgctgttcctgacctatgatattcataacgtctataacagcgataccctgaccgtcggcggcggcggccatgcggtcagcaagcgttccggcaccaacggcgcggattattatctgcaggggtatgcggtggcggatgtgtttgccgcctataagatgaagctgcagtatccggtgacgctgcaggtgaatgtgaagaacctgtttgataagacctattacacttcctcgatcggcaccaataacctcggcaaccagattggcgacccgcgcgaagtgcagttcacggtgaagatggatttttaagccggaccatggcgtcgcgccggatattcattgccgggcggcgctgcgcttgcaccggcctacctttccgtgacatttgtcgcagttcgtaggcccggcaaggcgcagccgccaccgggcaaaaacaggcgtctggcgccggatgcccattgccgggcggcgctgcgcttgcgccggcctacgtttccgtgacatttgtcgcagcgccaccggggaatgcgttcagcttaccagtccgcctcctggccgaggatgcgcaatatatcctgacgatgctgcagcagctgcgggttatcgcgatgacggggaaaagccagcggcagcgcaaactcggcgataatccgccctggacgcggcgacatcaccagcacccgctcgcacagcagcagcgcctcttcgatatcgtgggtcaccagcaggctggtatacccctgctgctgccagagggcgatcagctcccgctgcatactgatgcgggtcagcgaatcgagtttgcccaacggctcgtcgagcagcagcagacgcggttcgttcaacaaggcgcgcgccagcgccgcacgctgtgccatccctccggacagctgccgcggccacgcctcgctgaaggcctgcagcccgatgcggtcaatcagcgcgtctgccttcgcctccagcccctttttgccctgcgcctgcgggcccagcagcacgttctgccgcaccgtcagccacggatagagcgtcggatcctgaaacacaaggatccgctccggccccggggcgccgggcgccgcgccgtcgatctgcatctgtccgctctgcggcgcttccagccccgccagcagccgcagcagagttgatttaccgcagccggaagggcccagcagcgccacgctttcccccgggcgcagctgcaggctaatattctccagcaccggtaccgtctgtttgccaagcgtaaacgcatgatgaagatggctgatggataccgccgcgccgcgcgctatcgtctcggttaccattgcatccctcctcgctgccagctcagcagccggtcacgcagcataaataatccgcttatcaggccggagcataacaaggccatcaccagcagcgcggcatacatattcggataggccgcccagccctgggcccactggaggtaaaagccgatccccgacttcaccccgaccatttcggcgacaatcagcaccgaaaacgacgcgccgagccccataaacaggccgacaaagacgttcggcaacgcggcggggatcgccacccgcaggatcaggaaacgctggctggcgccgagggtccgcgccacgtcgtaccacgccttatcaatgcccatcactccggaccaggtcagcaccgtgaccgggaaccaggtgctcagcgcgatcaaaaacacgctggcgccgaagctcgagggaaaaataaacaggcacagcggcagcagcgcggtggacggcaccggccccagcagacgtaacaccggatgcacccagtagccaatccgttgcgaccagccgatggccagaccggtgatgaacccgctgctggtacccagcagcacaccgagccccagcagccccagggagtgcagcaggctgtcgagcaggcgcggccagtcgtcgtgtagcacctcgatcagcgcctgcggcggcgcaaagaatggtaccggcaacacggcagttttggcggtcagcccttcccagacagcaaacagcaccggcagcagcgccagccacttgccggcatgccgcacacgcgcgccgcgcgcccgccagtagcgatagctcagccccagcagcagcaagccgccgccgagggtgaattgcgccagcgcccagccttcgctaaacggccagcgccgcccagcgtcgggccaggtaagagtaaacagaccgcccagcagccacagcgcggcggccagcagcccttctccccacagcggcgcgcggccggtggggcgcgccagagcctgctcaggcgaatacgttggcatagatactctccgcgaactgatggggatcggtacccggcttgatcacctgcacccgctgcaggtcgaccgcatactgcgtcagctctttcacgaacgcttcgcccaccgcgtgatggccgtggccctgcccgtgcaggatgccgctcacctccgcttcactggtattcagggcatgggcgaggaaggattgcgccacgctttccggatgcgcagcggcatagctgtgcgcctcaaggatcgcctgggtgagcgccgcggcggccggtttatggtcccgcgccaggctcccgctcacccccagcacgcagcagctgaggttggcataatccccggtcatattgctggcgatcagctgatacttaccggtctccagcagacgatagctgaacggctcgctgccgctgatggcggcgatttcgcgcttgtccagcgccacgctgagcagatccgccgggtagactttccactgcacgtcgctgatcgggtcgataccgtggcgcttaagcagaatggcgaagaagtttttatccggtccggccatgtcggtgacgccgatggtttgacccttcaggctctcgaggccgccgaacggcgagtctttagccgtcagcaggttcagacagccgccgtgggtcccggcggtgagcttgacgtcaaagccctgctccagcgccttcagccagcgcagcgccatccccaccccggcgtcggccttaccggtggcgatcgcctccagcagcacatcggtggagttgccgaagttaacaaactcaacgtcgaggttgtatttactgaatatcttctgctgctcggcgacggcgaccggcgcgaggcataccgcgcttttgttgatcgccagcttgatcttgtagggctctggcaggcgcagcgccggatgggcatcgccgccggccatgtccgccatatcatgagcccacagcggcagagagaccccggccagcgccaggccgccgctgagctgtaaaaaacggcggcgggaaaaagtggttctggtcatggcgtcacctcggcggcgggcacgctaaaacggcggtcaaaggtcggcttcacgtccagccgggtgcggatcaggccgttggcgagataaaagtccgccgttgcctgctgctgggccactgtttcctcggccagcggctgccactgcgactggcggttggcaaactgcgcgcgggcgatctccgccgggaagcggatgatctcccccaacgttttgccgtagctgtcgagattggcgtaggcccagcgctcggcgccggccaggcgctggagataatcctgcagcgcggcgcgtttttgcggatcgttaagcgcggaatccgttgccgcgaggaaggtattccccggcagcagccctttgccgctcaccaggatctgcccctcgttggtcttcaccatttgggtggtgtagggctcccaggtcgcccaggcgtccaccgaaccgtttagcaacgccactttggcgtccaccgggccgaggaacacccactgcacctccttcggtgaaatccccgcctgctccagcgctttcagcgccacgaaatgaccaatcgaccctttaccggtggcgatgcgtttgccttttaaatcagcgccgctttttaacgtgctgccgggggataccagcaccgcggtccccgccgggttgcttttatccacggcaatagctttgaccggcgcaccgttggccagggcgaagagcaacggcgcatcgccaatgatccccgcgtccacggcgcccgcgttgagggcttccgccagcggcgcggcggccgggaactcggcccacttaatgtcgtaagggagattttgcagggcgttggccgcctccagctgcgaacgcatgccgcctttttgatcggcgatacgcagggtaagccgctcctgcgctgtcgcgtagccgcccagcgccagcagcatcagcgcggccgccacccggcctgaaaatgatagacgcatcgtgattatccttgtgattgaaagacgaagttgccggctgccagccaggcgctgtcgctctgtggggtatgtacccgtccgcagagcacattgcggtagtggcgttccagcgggttctgtcgactcaggccatgattgccggtcagctcgagcgcaatattcaccgcctgaatggcgttgtcggtgatggtgactttcgccagattggcttcgatagcggaaaagcgcagcgcggcggcctgctccagcaggctgcggttgaccagcagcagcccggcgatctgcccgactttctcctgcacccgtggcagacgagagagcggatggccgagaccggcgggcacccgccccgccagccacctcaccagccagtcgtgagcggcgtgggcaatgctgtcatagatcgccgccagcagcgccgtctgccggttggcgaacaggcgaaacggttcggcctgggcggcgggtggcgcatcggtcggccagacatccaccgcgtgctctgccgccacccgcacgtggttaaaaataacttcatggctgccggtggcccgcatcccggcgtgatcccagcttttcaccacgctgatgcccgggctgtcgccaggcaccagccaggtgcccaccagaggcgggttatcatcgcttctggcccacaccgccagccagcgcagcccttcaatgccggtggtataaattttatggccgctgatgtcccagccctccgcgcgacgggtcgccacggtgtccggcaggccgccccgcgctggggagcccagctccggctcgacgcgcaggctgttgatgaggccaccgtgttcgacagcatcgtgaaaaacctgctggcgcagcggcgcgtgccaggcgtcattttccgccagccgcaaatggtggagatactgcatgcagacgatcagcgctgtcgccggctctccccaggcgatggcggcgatgacctgctgcagctgggccagactggcgcccgcgccgccgcaggatggcggcacggcgagacttaaccagccccccgcacgcagatggtcgatattacgccagggaaactcgccgctggcgtcaaggctggccgcctgctccgccatctgctggcgaagcgccgtcagctgccgggcccagtcgtcgcgctcaggatggatcacgatgcgcgctccgccactgcacgccgggcggctttttcccgggcgatcggcaacagcgcccggccatagtcggccgcgtcgttcagcggatcgaagccgcggatcaggaagttacgcacgccgaggtcgtagtaatcgagcagcgcatccgccacctgctccggggtgcccaccagcgcggtggagttatgtccgccgcccaccagctgggcgatgccggtccacagacgtttgtccaccactctgccctgcgccgcagtagcccgcagccgctgggcgccgatgctgtccggtttggctttgaacccgcctccgcgctgcgccgcctgctcggtggcgacgtgcaggatatgctcggctttctcccaggcttcggcttcgctgtcggcgataatcggccggaacgagacgctgaagccgatatcacgctggtgtttcgccgcttcggcgcgcacccgctggatggtctcgccggtttgcgccagcgactcgccccacagcgcgaagacgtcggcatgtttgccggcgacggcgatggccgcttccgacgagccgccgaagtagatgggaagatgcggcttttgcagcgggcgaatggcggaccaggcctgctcggcctgatagaaatcgttgtgaatatccaccggctgctcgctggtccacacctggcgcacggtgtcgaggaaggcgtcggtgcgggcgtagcgctggtcgtggtcgagataatcgccatcccggcgctgctcggcatcgttgccgccgctgatgatatgcaccgccaagcggccccccagcaggtgctcaagggtagcgaatttgcgcgcggcaagggttggggaaacaaaaccgggacgatgggccagcaggtactgaattttctgcgtcgacagtcccgccagggccgtcaccagaaagccgtcgggttgatcggaccagtggccgaccagcagacgatcaaacccggcggcttcatgggtttgcgcaaagcgaacgatatagtcgcggtcaaagatcggccccaccggggcaatcgtttcggaagagaggcggtggccaatcatgccgagaaactgaatgctcatgaacaactccttgcgtcagggtaatggagtggccgcgacagcggcgctggtcattaccctatacagagcgtgttaatgagcaaaatgcatttttatcatatcttaatatgcttaattagcattaaacaaaaatgcattttgctttcagtcggatacggtcagctgctgcatcactttgctggcaaaaaaggccagcggcggctgcaggttcgccagatactgggcgtggatcagccacagtgagaccgcaggctgaaaatcgctgaggctgaggaccgcgacctcgtcccgccacgggctgctggccagcgccgccctcggcaccagacccagccccagcccctgcgccaccagcgctatctgcagctgcgcgcccgcgctctcgacgttgagcgtcaaccgcaatccctggctctgcagctcgcgaatgagcccggcgcgcaggccacagccgtcggggttaaggatccagccccgttcggcgcactcccgcagggatgacgcgcgcaaattcaaacgccggccgacgatcggcaccacctccaggggacacagcaggcgcccgctgtagccctcggcgaagctttgctgggcgggccccatcgccagcatgccgtccagctcgccgttttccagccggcgctgcagctgtccgctccagccgcaggtgatctgcggcgacagtccgggaaactgctggctcagcgccgacagcgccgccggcagggcaatctcgctgagactctgcggcacgccgagacgcagcgcgccgcgcggctcgccttccggatccaacaggctgtagagttttttcgtctcacgcttaatgctcagacactgctcgtacacccggtgtccggcggcggtcagggtcagcgggcgggtctggcgctctaacagcgtgacgttcagctcctgttccagacgctgcaggcgccgggtgatggccgactgggtgatccccagatattccgcggcctgattgagggaggaaaactgcaccgtggccagcaaagcgtcgatatcgtcaatgcgcataggatccttatgttaaatttgcatattaatatatgcgtaaattgcatttaaataatattaacgcctctgttagcgttttgaccagtccctctgacaggaaccgcacatgactgcaccacgactggaaaaattacgccatttcattcatgaggtagaccgcctgcaccgcgaacaccaccagaccgccccgctgcttgacgccgtggcgcagcggctggcggcgctggtgcgttacgacgactggctgccggaagagtacaccctgccgcatccgcaccattatcagcagtatctgctgcatgccgactccggggagcgcttctcgattgtcagcttcgtctggggaccggggcaagcgacgccgatccatgatcaccgggtgtggggggccattgggatgctgcgcggcgcggaggaaaaccagcgttaccagctggatgccgatggcataccgcgcgcgctgggcgccgccacgcttctggaagcaggccaggtggagaaagtctccgctgacgatggcgatattcatcgcgtcagcaatgcgctggcggatcgcgtctccatcagcattcatgtctacggcggcaatatcggcgcggtgaagcgcgccgtgtataccccggaagggcagcagaaaccgtttatctccggctactctaaccgccatttacccaatatctgggattcctcccgcgaacatcaaggataaccactatgtccacctacgcttatcgccaggccgccgggatccgccaggcgctgctcgaccgtcgtgaactggcgctgatcgacgtccgtgaagaggccgatttcgccaccgctcatccgctgtttgccgtcaatctgccgctcagcaaactggagctggaggtccgccggcggataccgcgcttcaccaccccgctcaccgtctacgacaacggcgagggtctggcggagatcgccatcgaacggctgcggtcctggggctatcaggatgtggccctgctggccgagggtctcgccggctggcgccgcagcggcggcgagctgtttcaggacgtcaactccgccagtaaagcctttggcgagctggtggaaagcgtgcgtcacacaccgtcgctcagcgcccaggaggttcaggcgctcatcgacagccggcaggaggtggtgatcgtcgacgcccggcgcttcgatgagtaccagaccatgagcatccccggcagcatcagcgtgcccggcggcgagctggccctgcgggtagagagcctgacgccctccccgcagacgccggttatcgtcaactgcgccggacgcacccgcagcatcatcggcacccagtcgctgatcaacgccggcgtgccaaacccggtccatgccctgcgcaatggcactatcggctggacgctggccggccagacgctggcgcaccagcaacagcggcaatacgatccctccgcccgcgcctccggcgcccgggccgctgaggtggcgcattttgccgaacgggccggggtggcggtcatcgatgaggccacgctgcaacgctggcagcagcagagcgaccgcaccaccttcctgtttgatgtccgcagccccgaagagtacgcggcgggtcactatcccggcagcctgagcgcgccaggcggccagctggtgcaggagaccgaccacttcgccagcgtacgaggggcgcgcattgtgctgctggatgacgatggcatccgggcggcgataaccggctcgtggctggcgcagatgggctgggagacggcgcggctgagcgcgctgtcgaccagccagttgagcgaacgcggggtgcctgccgccgaggtgccgcccggcccgcaggcggaggagataagcccgacgcagctggcgcaacagctggaagaacccggtacggtggtgctcgattttaccaccagcgccaactttgtcgctcgccatatccccggcgcgtggtggctaacgcgctcgcagctgcgccaggccctggaagcaatccctcccgcccaacgttacgtggtgacctgcggcagcagtctgctggcccgctacgcggtgccggaggtggcggccttgaccggtaaaccggtgcagttgcttaccggcgggacgctggcgtggatcgccgccggtctgccgctggcgcatggcgacagcggcctcgccgtcgagcgccgtgaccgctatcgtcgtccgtacgaaggaaccgataattccgcccaggccatgcaggcctatctggagtgggagtatggcctggtggatcagctggcccgcgacggcacccacggttttcgggtgctctagcgcgagcccgcctcaggcttcgcgcatgatccacgaatactgaaagctcttcggcgccggaaaatgggtccggcgccggtaggagcccagcgactgcggggtgcagtaggtacaactccccagccattcaacgctcgccggcaccacccccgcctctgcgaagagcgcttcggcaaaggcgcgcagatcaaaccacagattatcgctgccacgcgcggcggctttgagcggatcgctgaccgggcccgaacgggaatggaacagccgctggcgatggcgggccacccggtcaccgccgggctggtccagcagttgctgatagaatccggcggagacttcgtaacagcaggggtgaatatgcggccccacggcgatgaccagatcggccaatgccaccccctgctggcgaaaacaggccagactgttgtcgacaataccgctgaccagcccctgccagccggcatgcacgctgcagacgtagcgaccgtcgcgcgaggcgatcagcagcggcagacagtcggcggtcaccacccccaccttttgcccggctaccgcggtaaacaccgcgtcggcgtgcgggcgcgtcggcagcggctgctgataatgatgaacctcattaccatgcaccagcttcaccggagccagctcggcatagggaaaggcggcggtttcatggacatcaagaaaagcgtggcggatgccagggatcgcattgagcaaacgggaggtgtaagccatagggacgataagcgtcagggaatgatgtcttaccttaggccaggggacgcggacaggcaaggcggcggcccggcatttttttaccagaccgccggatgcatatcagaccatggccgcgcgctgctggcgatgcatcagccagaacaccgccacgccggccagcacaatgcccggcgccgaggccgccatcaccccgacggcgccggtgccgagggccagcatcttgccggccagcagcgggccgctcatcgccccaagacgccccaccgccacggcggtgcccaccccggtggcgcggatggccgcgggataaaaaagcggcgccagagcgtaaagcacactttgtccgccggtggcgaacagcccggcgacaaaccccgccagcagcatgccagtcagcgacgacgcgctgcccagcgccagcagcgacgccagaatgccgctgtagatcaggagcgacatccgcagcggggtgagcttatccattagcgcccccagcagcagcgtgccgcaggcggcgccgatctgcagagagaacatcacccccgccgcctggctggcgcggaatccctggcccaccagcagcatcggcagccagttgatcagcatatagaccaccagcagggtgaaaaaataacccagccacaacagcagcgtagcggcggcctggcccggggcaaacagggtgcgcagcggcacgctggcctccgcgcgctgaaacgcctgcgactccggcagccagcgcatcagcaacgggatcagcagcagcgggaccacgccgccaatccagaaaataatctgccaggccgcggcgagaccggaaaagcccagcgctgccgccagcgcggcgccaatgggtacgccgcagtacatcaggcttaccgcccggccgcggaaacgtgagccagcggcttccgaggttaaggcaatcaggttcggcaatgccgccccgagcccgacgccggtgagcaggcgcgccagcagcagcgtcgggaagctccatgccagcgcggtggccagcgagaacaggccaaacagcagcaccgaccccaacagaatgcgcttacgcccgtggcggtccgccagcatgccgcccaccagcgcgccgggcagcaggccgaggatcccggcgctgaagatccagcccatctgcattttatccagcgcaaaggcctgcgccatgccgacggcggcgatccccgccgcctgcagatccagcccttccatcagggccaccataaaacagagcccgatggtgaccaccaggcgcgagggggttgcagtcgttatcttggtcatagggtaccttggcgatagccgaacaaacggagcaggtgactggcggctgatgctttgtcagccgcacgttcttagttatttattgcggttaagcagatccagcgcgacgtcgacgatcatatcctcctggccgccgaccatccgccgcttgcccagctcgacgagaatatccaccgcgctgaggccatagcgcttggccgccgcttcgctgtggcgcaggaagctggagtagactccggcgtagcccagcgccagcgtttcgcggtcgacacgcaccgggcgatcctgcagcggccgcaccagctcatcggccgcgttcatcagggcgtagagatcggtgccatgctgccagccgagcttgtcggcggcggcaataaacacctccagcggcgcattgcccgcccccgcccccatcccggccaggctggcgtcaatgcgatcgcacccctcttccaccgcgacgatcgagttcgccaccccgaggctcagattatgatgggcatgcatcccggtggcggtctccggcttcagcaccgccttcagggcgcggaagcggtcgcgaatgtcgttcatgttcatcgccccgccggaatccaccacatagatacaggtcgcgccataagattccatcttcagcgcctgctgcgccagcgcctgcggggagatcatatggctcatcatcagaaaaccgacggtgtccatccccagctcgcgggcaaaggcaatatgctgcgcggcgacgtccgcttcgctgcagtgggtggcgacccgcaccacccgcgccccggcctgatacgctgctttcagatcgtgcagcgtgccgatgcccggcagcagtaaggtggcgattttcgcctggctcacgacatccgctgccgcttcaatccaggcgatgtcgctgtgggcgccaaagccatagttgaagctggatccctgcaggccatcgccatgggccacttcgatggagtcgaccccggccttatccagcgcgctggcgatctgctgcacctgcgccagggaatactggtgacgaatggcgtgcataccatcgcgcagcgtcacgtccgagatataaagttttttaccgttcatgctgtcgctcccgccgcgctgtgcattgccccggccatttgctccgccgtcgccagcgccgccgaggtcataatatcgaggttgcccgcgtacgctggcagatagtgcgccgccccttccacttcgaggtacaccgcggttttcaggccggaaaaacagccgacgccgggcaggttgaccggcctgtcctcggggataacctcaaactgaacctgctgcttcagccggtagcccgggacgtaagcctgcaccgctgccgccatttcggcgatcgaggcggcaatcgcctcctgcgacgccagctcgctcaggatgtagacggtatcgcgcatcatcagcggcggctccgcagggttcagtacaataatcgctttgcccttgcccgccccaccgactttttcaatcgcctgcgaggtggtttcggtgaattcgtcaatattggcccgcgtgcccggcccggcggattggctggcgatcgaggccacaatctccgcgtaatgcaccttcgccactcgcgagaccgcggcgatcatcgggatggtcgcttgcccgccgcaggtcaccatattgacgttgccctgatggagattgtccgcgaggttgaccaccggtacgcagtacgggccaatcgccgccggcgtcaggtcgataacgcggatccccggcttcgcttcgcgcagcgcggcatcgtttttgatgtgcgccccggcgctggtggcgtcaaaaacaaaatcgatgtcggcaaattccgccatctgcatcaggccgcccaccccttcgtgagtggtcgcaacgcccaggcgccgggcgcgggccaggccatccgactgcgggtcgatgccgaccatcaccgccatctccagatgctggccgtggcgcaggattttaatcattaaatcggtgccgatattcccggagccgataatggcgactttacgtttacgcatcacgatctccttctccggcggcaacgaagcgtgccgcgactgagccaataccttcgatatgggcgacaaagctgtccccctcgttaatcgtcaccatcgggcctaacgccccggtcagcacgatatccccggcccgcagcggttcgccgagactcgccagcttgcgcgccagccagactgcggcgttcagcggatgccccaaacactcgctgccgcggccgctggagaccagctcctggttgcgggtcatgtgcatggcgcactgcttcagatccagtcccgccggacgctgcgccgggccgccaatgacgtacaggccgcaggaggcgttatcggcgacggtgtcgacaaagccgattgaccagtcgcgaatccggctgcccaccacctccagcgccggcaatacccattcgatggcgttatacagttcatcaaaagtggtatcggcatgcggcagatcctgcttcagcaccagggcgatctcggcctccaccttcggctgcagcacgcggccaaacggcaccccggcgttgtcgccgtagcacatgtcggcaaacagggtgccgaagtccggctgattgacgcccagctgctgctgcactttgggatgggtcaggcccactttgcggcccaccacccgccggccatgggccacgtggtgctggacgttcagacgctggatggcataggcggcgtcggcattgtcgacgccgagaatatcgcgcagcggggcgatcgcctggccgctctgttccgcgtcgcgcagctgccgggccagcgcgtcaagagaaaaagtcatcatttactccttaagcccgtgcgaggaaattgagcaccagctgattaaaactgtcggcatgttcccactgcgcccagtggccgcagtcgcggtaaatatgcagttccgaaccggcgatcccggcgagcaggcgcaacccggcgtccatcggcacgaagcggtcattgcgtccccagacgatcagagttggcgcgctgatttcgcccagccgcgggccaaagtcaggaaactgcttcgggttggcttccaggctcttgacgaagttgtccagatggtcgcggcgtgacagcatattgttgagacgcgcctcgaacagcgcctcggtgaggtcgcgggtgtcgaagacgaagatgctcatcatctttttgaggttttcaatggtcggctcgcggtacagggcgttcagcagcttgatgccctcggtcggcatcggcgtgaacaggctcatgccgccggtccccccgcccatcagcaccagcttagccacccgctccggccagctcaaggtgaaggccaccgcgctatggccgcccatcgagttgcccagcagatggactttatcgatccccagctgatcgaccacgcttttcagaatgcgggcgttgagatccgaacgcgagccgctgttgacgatagcatcgcttttgccccaccccggacagtcgaggagcagcacgcgatagcccgcctcgaccagcgggtcaatattgcggctgaagttggcccagccggtggcccccggcccggagccgtgcagcatgaccacggtctctttcccgtcgccgcagtcattgatatggatacgcagcgtgcggcccccctcgtcgacattgaggaatcggctggtggcggcttcagtttgcggttgatagctcatgttagtctcccggtcaatcaaatctcggtggtggcgctcagcgagccgaatccggcgatccactcggggatcggccggtaatagcggccttcactgcgccagcggccaaaagcggatagcgcggcaaaagcggccacccaggtcttaatttcgtgcgtcgatttgccggccatcgccgacagctcgtcattgccgatcgcgtccagttcgctcagccgcccctgctccagcaggctcataaagcggttgtcccagaccggattgaggggatggagcgagtgcgggtcttcggtaaaccgtcgggcggcattgatcacccgctgctggcgccgttcgcgttcgtccggcggcagctgttttccgccgccgagcaggcgatcgcgcagatgagcgtcggccttcgccagctccggcaccggcggctggtgcgagagtccgcccgagccgaggatcagcacccgcttattgagggtattgagaaagcggcccatcgcctcacccagcagccgggtgcgttgaaaacccggcagcggcgcggcgacgccgttaataaacaccggcagcaccggcacgcggtccaggccacccagcagaaactccagcggctgggcgaagccatggtccacctgcatgttgtacgacaccgccaggtcgataccgctgttgatcacggcgtgggcgcaggcttccgccagctcggcgggcaccggcaggtcgccggcggcgctggcgaagtcgccaatcgcagtggcgccgacgccgaggcagaacggcggcatcacgtcatagaaaaaaccgttgtagtgatcgggggcgaagagcaccaccagctcgggatcgaattcagcaatccaccgccgggcgtcggcaatcaccccgttcacttcatcgaggaccgcctgctccgggtccacgaatcccaccagcggagtgtgggagagacagtgcaaataggcatgcatatcaggccaccttctcttcagcgtgggcggtatccccggttgcgagggccattttttccgccagagcggtcagctgcgcgccgagggtttgcgggatggcgagagcggcgacaaagcggtccggcctgaccacggcgatggcggtgttatgcagtgcaaaccagcttttgaggcggttttgcgtatcgcccacccgcagcgtgccgggggcgttatcctgctcgcgatggatctgcacctcgggcaccacctggataaagcgcacgccaatcgcgcgccagcgggcgatctgcccggcgtcgagcccccactgcgggttgcagccccagccgataatggcgaaattcgcgccgatgacgtcgtcgagcagcacgctctcgccgctctccagcgtcacctgcggttgaataaacattttgcccaccggcgaggttttgctggcgccgtcggtcagcagcgccccctcgcggtactgcggcatcggcttaaagcgcatttcgaggaagtagcgcttcaccggcggcaggtagttcagcagccaggagaggccgtcgcgcgcggccccctgccagcgcttcggcggcgccagcacatggccggcggtaaccgacaggtcaatcatcgctttcgcgtggtcgcggcgctcctgctggtagctgtcgagcagcgtctctcccgctttgccattgaccaccagcgccagcttccacgccaggttgaaggcgtcgcgcatgccgctgttatatccctgcccctgccagaccggcatgatgtgcgccgcatcgccagccagcagcacgcggtcgatgcgaaagcgctcggcaaggcgggcgttatgcgtatagacccgctggcggatcagctcgacgcgatccgggtccggcagcactttgctcagcaggcggcgcatattgtgcggttcgctgagctgagcttcggtttcgccgggcatcaccataaattcaaagcggcgcacgccgtggggcagcgcggcggaaacgtagggtcgcaccgggtcgcagcacaggtaaacgtgcggggtggccagcgggtcgttagcgatatcgatgacgatccactgattcggcgcggttttaccttcgaaggggatgttcagcgtacggcgaataaagctggcgccgccgtcgcaggccaccagccagtccgcgcgcaccgtctcccgctcgccgtccggtcctttaagatttaacgtgacaccgtcaccggtctggctaaaggcttccacttcgcgggagaagaggcagcggacctgcgggaaacgctgcagaccgtgatacatcaccgcatcgacctgcggctgaatgaaggcgttgcgccgcgaccagccaaattcatcggtcatcggctggatatcggcaaagcagcggccttttggggtgagaaaacgcatggcgtgccacggcgtggtatgcggcagcacgtcattcaccagccccaccgcctgcatcgcccgcagggattcatcgtcaatgccgatggcccgcgggtaatcgatcagtgtggcgagcttttccaccaccagcacgctgatgcccatctggccaaagtagttggccatcatcagaccaaccggaccggcgccaacgatggcgacctgagcggtatgctgcacggcgggttgaatatcgggtgtagatgttgtcattctcagcgacctcacgactcggaaactgcccggctgacaggcaatttgttaatcatgtgtaaacgtatttttataatgggctgagtatagggcgggggttttcggctacaatcaaaacatcatcgaatgtgcaccaggtgcacaacgctgtttttaaagcattttaatggaggatttatgcgtgacgatgggtccgcagcgtacaaaacggtgcgcggattaagccggggtttattgttattaaaattgttaaataaattcgacggcggcgcgacgccgggcctgctggcggagtttagcggcctgcatcgcaccaccgtgcgccggctgctggagacgctacaggaggagggttttgtccgccgcagccgctccgatgacagcttccggttgaccattaacgtccgccagctgagcgatggatttcgtgacgaacattggatttctgccctcgccacgccgctgctcggcgagctgctgcgcgaggtgcagtggccaacggacatcaccaccctcgacgtcgacgccatggtggtgcgcgagactacccaccgcttcagccgactgtcgtttcaccgcgcgatggtcggacggcggctgccgctgctgctcaccgcctccggactgacgtggctggcctttgcccccgacgcggaacgcgacgccatcgtcagcatgctggccgcccgtccggaagctgagtatcagctggcccgcgaaccggaacggctggcggcgatcctcgcccgcacccgccagaacggctatggcgaaaacttccgcggctggcggcaggaggagaaaatcgcctcgatcgccgtgccggtctgcagtcagctgcgggttatcggctgcctgaacctggtctatatcgccagcgcaatgaccattgagcaggcggcgcagaagcatctccctgcgctgcagagggtggcgggacagatagaagcccgcatggaggatgaagaagtgtggtacgaaatgccctgatcgcgatgagggtaaccgcgatcaaccattgcgcccggcttcgttatataatttaatacacaacgaattttcacgccattcgggccacaccatgtcaaaacaccccttactgctgggcctgacgctgctcagcgccagcctgttcaccggccaggccttcgccgaccgcaccgtcaccgaccagctgggtcgccaggtcaccctccccgaccacgtcacccgcgttgtggttctgcagcatcagacgctcaacctgctggtacaactgcatgccgccgaggatatcgtcggcgtcttaagcagctggcagaaacagctcgggccgcagttcgcccgctttatgccgaagatcgcgcagctggcgacgccgggcgatcttacccaggtcaatattgaaagcctgctggcgctgcgtccgcaggtggttttcgtcgccaactatgcgccgccggcgatgatcgcgcagatccaacaggccgggatcccggtggtggccatctcgctgcgtcacgatgccgccggggaaaaaaataaaatgaaccccaccatggctgacgaagagcaagcctataacgccgggctgatggaggggatccgccttatcggcgaggtggtcgagcgccagcccgaggccgaggcgctgattcactacaccttcgaggcgcgcaagcaagccaatgcgccggtggccgatattccccagaaccagcgggtgcgggtgtacatggccaaccccgatctgaatacctatggcgctggcaaatacaccgggctgatgatggcgcacgccggggcgctgaacgtggcggccgccagcgtaaaaggcgcccgccaggtgtcgctggcgcaggtgctggagtggaacccccaggtgatcttcgtccaggaccgttatccgcaggtggtcaaacagatagagaacgacccgcagtggcagacgatcgatgcggtgaaacatcaccgcgtgtggctgatgccggagtatgccaaagcctggggctatcccatgccagaggccctggcgctgggtgagctgtggatggcgaaaaaactctatcctgcgcgctaccagagcatcgatgtggacagtaaagccagggattattatcagcgtttttaccgcgtggcgtggacgccagatgcccgctaactctcagccctggctggtgcagggaagcctggcgctggcgacgctggcgatcgcggtcgcctcgctctgtttcggccagtacccgttaagcctgagcgccgttggccacaccctggtccatctgccgccaggagaaggggtgatcgggcagatcgtctggtcggttcgcctgccgcgcgtggtgatggccctgctggccgggggcgcgctggggctgtgcggcgccaccttgcagggcgtgttccagaacccgctggtggacccgcacatcatcggggtgaccgccggctccgcctttggcggcacgctggcgatcctgttgggcgtcggcagtctgctgatgatggcctcgacctttttcttcggcctcgtcgcgctggggctgatttacgccctcgccgccctgcaggggcgggacagcacgcttgggctgattctgtccgggatcattctcagcggcttcttcgccgcgctggtcagcctgatgcagtacctcgccgacagcgaagagacgttaccgaacatcgttttctggctgctcggcagcttcgcgaccgccagctggcataaggtactgcttatgtccctgcccctggcggtggctgccggggcgctgtggaagctgcgctggcgtatcaacctgctggcgctggaggaacgggatgcccgcagtcttggcgttccggtggccgcgctgcgtcgcggcgtgctggtttgctgcgcggtgctggtggcagcccaggtggcggtcagcggcagcatcgcctggatgggtctggtggtcccgcacctcgcccgtctgctggtaggggctgaccatcgtcgcctgctgcccaccgccttctggctcggcgccgcgctgatgctggtggtggacgatctggcgcgcacgctgacccaggcggagatcccgatcgggatcgtcaccgccctgctcggggcgccgctgtttaccgtgttgctggtgcaatcccgacgccggagtacgacctgatgaacagctcattatcgctgcaagcgctacgctacggccaccgtcagccgctcttcgccccgctcacgctggcctgccggcccggtgagatctgggcggtgctgggcgccaatggccggggaaaaagtaccctgctggataccctgaccggcgtgttgccgccgctgggcggcgagatgcagtgcgagggcggcgtggccctggttccgcagtcgtttcgtcccgcttttcgctggcgcgtgagcgatgtggtgctgatgggccgggcccggcacgtggatctctttgcccagccggacgaggaggatgcccggcgggttgagcaggcgctggcgcagctggggattgccgccctggccgaagatgacttcggcgccctctccggcggccagcagcagctggtgctgattgcccgcgcgctggtcagcgccagccagaatatcctgctggatgagccctgctcggcgctggacctcggtaaccagcaggtggtgctgcagctgatcggcgacctcgcccaccgccaggcgcgcaccgtcctgttcaccacccatgatcccaaccacgccctacaggtggccagccatacgctgcttctgctgccggagggccggtggctggcgggtgagaccgccgacgtgctgagcgaaacgcatctccggcaagcgtacggcctgccggtacgcctgatccgccatgccgcctccgcgttccctctgctggcgccggggtttacgctgcgtcgctgaacggcataaaacccgcctgccggagatacccctgaccaacgtcgccgaggataaagcgatacagggccagcgcggcgggatcggccctgagacgcgccagctggtaatcgcagcgaatattccacggcgccgcgatggtcagggtacgcagatcgtcgcaggcggccagcgcggggccatagtgcgcatagccgataaacagatccgccagattctggcgaataagccacgcgccggctatctctcccggcggcacgctcagtgagtctctgccgccgaccagctgctgcgcccgcccggccatcgcgttgcccaaccctggatagcgtgcctcaattcgggcgaacagctgccaggtataatctcccgacggatcgcagcccggcgtggaggtcgccaaccgcaggcggggcgtgctgagcagcgccagccagtccaggccatcgttgtccggcgaccgccgggcggtcagcatcagctggttgctggcaaatccctggcattcctgcgccagacccgcctgcagcagcgcctgcgggtgcgccgcgttggcggaagcaaaaaccgcgcacggcgacccggcttcgatccgctcgcgcagcaggccggcagggccaaactgcgcatcgaccgccaggccagtgtgctgccgaaagtgcgccaccagcggcaggaaggcgcttctcaggcttcccgccgccagcagcgtgagagtggtatttgccataggatatcgctataaaccggataatatagcgctatattacccggtttgccgtcgcgtcagtagcgaatttctgccagcgcccgcagctgctcgggggtggctaccggtaggtcaaaaaagcgcagataggcagggatcatttcaaacagcatgtcggtcccgcgctggatgtggcactgtcgtgcctgagcggccctcagcagcggggtgtactcctgagtcatgacgacttcccccacccaggcgccaggcgccagacggtcaacgtccagcggcagcggatcgctggccttcatccccagcggggtggcattgaccaccagctcgtgtccggcaggatcgggctgcatcagggtgatatcgagctgcggatagtgctgatgcagccgcccggcgagggcgtgcgccaccttgggccgggtatcgtacagggtcagggcgctgacccccgccgccgcgagggaggcggcgatagccgatcccaccccgccgctgccaaccaccagcgcccgcgtcccctgcgggttaaaccctttacgacgcaggcccagcacaaatccctcgccatcgaacatgtctccgctcaggctaccgtcagcctcgcggcggatggcattgcaggcgccagcgatggccgccgtcgggctcaggcgctgcaccagatcgcaggtggcgattttatgcggcatcgtcaccagcgcgccgatgatgttggtcatcgtaaacagcggcggaataaacgcggcgtagtcctccggcctgacccccatcggcaccaccttcacgtccacctgctggtcaacgaaccacgggttgtagatcatcggcgccttaaaactggcggtcggatagccaaggtgcgctatcagccgcgtatgcccactaatcaccatgccttgctcctttgcttactgcgataactcgatacgtttgacgtcgccgaggataaacagataggccaccacgcccaacagcgcggcgccgccgatgtagatcaaggcgtagaagaaattgccgaacccggcaacgataaagccgatcaccagcggggtgaggatccccgcgaggttggcgcagaagttaaacaggccgccggtcagaccgcccagccccttcggggcgatatcggagatcagcgtccagccgagacccaccatcccctggccaaaaaaggcaaacgacatcaccaggatcaccgccaggtcgctctccagccagttggcggtgatgatgcagctggccatcagcaggccggcaacgatcggcagcttacgaccgaggttggctgacccggtggctttcagcagcttgtcggagagccagccgccaaacatcaccccgccggcggcggcgacaaacggcaggatggagaaaaagccgaccttcagccagggcatatgccgctcggtggccagccaggtggggaaccaggtgagaaagaacaccagcacggtattgccggcaaactggccgatactggcgccgatgatctgccgtttgctcagcagctggcggaccagcggccagctgaacgccacctgctggtcggtcggggcgctgaggccgccgccgttttcgatatgctcgcgctcctgctggctaaggcgcggatcttcatgcggttcgcggtagcagcgccaccacaccagggcaaacagaatgccgacggcgccaacgctgacgaacagcacccgccagccgaaaccgtccatgatccagaacagcagcggcgcaaagcaggccagcccgagatactcccccacggtgtacaccgccgtggccttcgcccgctcctgctgtgggaaccaggcgctgaccacccggctgttgaccggaaagcacggcgcttcgctaatgccgagcccgaagcggcacagcagcagcgtcttcagccccaccgccatgccgtggaacagggtaaacagcgaccacagggtcagtgacaaaaagtaggtcactttgttgccaaagcggtcgagaaacaatccgccgggtatctgcgccagagcataggtccaggcgaaggcggagaagaggattcccatgatcgccgggtcgatccccagctcagcggtgagctttggggcggcgatccccagtacggtgcgatcgagatagttgatcatggtgccaatggccaacagcgcaagaatgccgatacgccgccgggagcggcgcacggtgacggctggctgggcggcagccgtcgggttagggctatatgagctcatagtcggttcctgtctcgggtacagaggatgttgttattgtgtttaacgcataatgaaccatttgattcaggctaacaatactgcatcgccgccagacggacggccgcattcgctgcgccatagagcgcatagccagcccggcgctcggttaactcaaagaaaaagcggccggcggtaaacggccgggtgtaaagatgcaggaaatctcccccctgcggatcgcggtcatagaggagctgctggcgctgaagctgcccgacgtccagctcgccgccaaagcgcgccagcagatcgtcataataattggccgggatcggcagcgtatggcgggcaacctcggcaagctggtcgcaggcggccggcagatcgcggcaggcaaaggcggcatgctgcagccccgccccctggtagcaggcgacggagcgggcgatctgcgtcgcccggctctgcgaaatattcagcgccagacggatatcgccctgcgggctgcgcaccgccaggctgcgcaccagtccatacgggtccggcagcgtctgctcatgctcaagggaaaaaccaaacaccgtacggaagaacatcacccagttatcgcggctgtcggcctccattcccagcgccagatgatcgataccgagatagtcctcgcgcaccgtcacgccatcacgcagatgaaaatcgcgctcgtagatagcctccccggcgtcgatgagatagataaggctgccgtcgggggcgcagatcgccgggatcggcgtttcgttcggcccggcgtcgccctgccaggtggcataccccagcgcgcgggcgcgggcgacaagcgacgcgctgtgctcgacccgcagcgccatcgcgcagagcgataccccgtggcgttgataaaaatggtcggcccagctgtgcggctgatggttgatgacgatccgcgccccgccgttgcgccacagcgtcacctgtctggagcggtggcttccctcgtgctgaaaacccagcgcctgcagatgttgccccaggcgctgcgcctcggcggcgctggcggcaaactcgataaactccagcccgtgatagaccggcagcggcggcggtgaaaacagatcggcatcgcacgtcgggagccgacggcgggtttgctcctccagccacagcagcgaacgataaccatctttggccgtcgcgccgttcggcgaggcgcgaaaaccgtcattgaagatctccagcgaccaggggccgcggtagccacagcgggtgatctgctcggcaaacgcctccagcggcagctccccctgtccgggaaagcagcggaagtggcggctccactccagcaaatccattttcatatacggcgcatcggcgagctgtacaaaggtgattttctccaccggcaccgacggtagcgcgtccagcgtgtcgccgcgggccagaatatggaagctgtcgagcaccaggcccaacgccgggctgtccacccgccgcacccgctcccaggcctgctgccagcggttcacatgggttccccaggccagggcctcatagccgatagcgatcccctcctcttccgccagcgtggccagcgcccgcaggtccgcgacctgcaattcgctatccgccgagcagtccggctgtacattgctgcacaacagcagcgtttcgcagcccagctcgcgcatcagagcaaacttgcgccgagcgcgggccatattcgccgcaaactgcgcccgactggcgccttcaaaatcgcgaaagggttgaaaaagcgtgatttttaaccctaaatcggcggcaagctggcggatttccgccggcgtccccgtataatagagcagatcgttctcgaaaatttccaccccctgataccccgccgccgcaatagcgtgcagcttctcaggcagggtgccggaaatcgaaacggtggcgatagagcgcagcataaggtcctcgggtcaacagctgacgtaagccttgaatatgtatcatttggttcatttgcgccataccaggttgctaaattgtgatcattatgtgtattttttgtcacccaagaaaaaggagttgccatgaccgtcgttgcccatgatgaagcacaatccctgaaggcgcggatcttcagcgccgctatcgctgtctttgctgaacacgggctgtcaggcgcccgcatggagcagatcgccaccgaggcgcagaccaccaaacgcatggtggtttactacttcaaaagcaaagaacagctctatcaggaggtgctgcagcatgtgtatgcgcggatccgcgaaaccgagcagcagctggggctggagaatgtgccgccggtggaggcgctggtgcggctggtgcgctggagcgtgcgctatcacgccacccatgcggactatatgcgcgtcatttgcatggagaatatgcagcgcggcaagtggttaaaaagctcgggtgaactgaagccgctgaatcgtaccgccctgtcgattctggaagacattttactgcgcggccagcagcagggcgtctttcaggcggggctcgacgcgcgcgatgtccaccggttaatcagcagcttcagcttttatcaggtgtcgaacttctacaccttcagcagcctgtatcttgacgatccgctacccgccatcgacgatgaagcgatggtggctcaccattgtgacattgccgtcagggcggtgatccgcttcgtgatttcctgacccgccggcgcaagagatcagtgcccggaaagcgcatgaatgactttctccatagcctccacggtgagcggcgaacgctggattttgcggttcgccagcgaggtgcgcagcacaccggcaatgacaatgtgtttcggctcctgacccaggtcacgcatttccagcacgactttacccaccacgcggcacatttcctggtacaggtcgtcgtctttcgctttatttcccatagaatttagctcgtattttatcattatcaatcaaatcattattgatagatttcccgcacaacgcaaaccatcgccactttaaaggttcaatgacgcattttaccggctcatgatggcgaaataatccatttcttttactctttttcatagccggtgacgaaaaagtgtgttgcgtagatttttgcataacgtgccggttttgttacgcgttttgtccataatttgaaacgaggtttttattttcctttttgatttcggcagcgtataatgcgcttcgattctttcttgaatggtttcagcgcattggactgcatgataaaacgcataacaccttgccacatttcatgggctgaaccgccagcacacattcttctgcacgcttcagggttgtcacctatccttagggcgtggcttagcaactttcgtaatacaggtttggctccccggcagtgcgcccgcggagcgagaattccatatccttcacaacttaaagactaaaactgtcatgaaaaagaccaaaattgtttgcaccatcggtccgaaaaccgaatctgaagagatgctgaccaaaatgctggaagccggcatgaatgtgatgcgtctgaacttctcccacggtgactatgcggaacacggtcagcgcatccagaacctgcgcaatgtgatgagcaaaaccggtaagaaagccgctattctgctggacaccaaagggccggaaatccgtaccatcaagctggaaggcggcaacgacgtctccctgaaagcaggccagaccttcaccttcactaccgataaatccgtcatcggcaacaacgaaatcgttgcggtaacctatgaaggcttcacctccgacctcgccgtcggcaacaccgtcctggtggacgatggcctgatcggcatggaagttacggctatcgaaggcaacaaagttatctgtaaagtgctgaacaatggcgacctcggcgagaacaaaggcgttaacctgccgggcgtctccatcgccctgccggcgctggctgagaaagacaaacaggatctgatcttcggttgcgaacagggcgtggacttcgtcgcggcctccttcatccgtaaacgttccgacgtcgtcgagatccgtgagcacctgaaagcccacggcggcgaaaacatccagatcatctccaaaatcgaaaaccaggaaggcctgaacaacttcgacgaaatcctcgaagcgtctgacggcatcatggttgcgcgtggcgacatgggcgtggagatcccggttgaagaagttatcttcgcccagaaaatgatcatcgaaaaatgtatccgcgcgcgtaaagtggttatcaccgccacccagatgctggactccatgatcaagaatccgcgtccgacccgcgctgaagccggcgacgtggctaacgccatcctcgacggcaccgatgcggtgatgctgtccggcgaatccgcgaaaggtaaatacccgctggaagcggtcaccatcatggcgaccatttgcgaacgtaccgaccgcgtgatgaccagccgtctggacttcaacaacgacaaccgtaaactgcgcatcaccgaagcggtgtgccgcggcgcggtagaaaccgctgagaaactggaagcgccgctgatcgtggtcgccacccagggcggtaaatccgcacgcgctgtgcgcaaatacttcccggatgccaccatcctggcgctgaccaccaacgaaaccaccgctcgtcagctggtgctgagcaaaggcgtggtaccgcagctggtggaagagattgcctctaccgatgatttctatcatctgggcaaagacctggcgctgaagagcggcctcgcgcgtaaaggcgacgtagtggtgatggtttccggcgcattagtgccgagcggcacgactaataccgcttccgtacacgtgctgtaataatttacaggttaattggttttttttaataaagcgcctcgcggggcgcttttttttattcattgattagctcttcctattaaaaatgcaaatcggaatttactatttaataagggattatctaagatgaatccgatggaagcgcgctgttttcactcgcctttttcagcgattctgagcaattcgatgcttctttgagcgaacgatcaaaaataagtgcgttcaggtaaaaaaaatattctcatcccaaaaaactttgtgtaatacttgtaacgctacatggagattaactcaatctagagggtattaataatgaatcgtactaaactggtactgggcgcggtaatcctgggttctactctgctggctggttgctccagcaatgctaaaatcgatcagctgtcttctgacgttcagactctgaacgctaaagttgaccagctgagcaacgacgtgaacgcaatgcgttccgacgttcaggctgctaaagacgacgcagctcgcgctaaccagcgtctggacaaccaggctcactcttaccgtaagtaagagttctggtaataaaaatggcgcactctgtgcgccattttttttgccctcagcatgagggctattgggtaagcagaccgttgtcagacgaactattctgcgccgacagcgacgtcgccgtgctacctgccccagccgacaccaccaccggataccccgcccttctcgacatcgcttttttcaactgcaggtcatccactgctttatcctctgcgaaggcgtgaaacgccgctggcagcgtgtaagcgatggtccgggtgttttccccttcggtctgcgaaagcggcctgtggacttcgacatagcgtttaccatccggctcgacggcaaacttcaccggctgattgataatccgtaccggcgtcccggttttcacctggctgaacagcgctttgatgtcatcagcgttcatccgcatacagcccgagctgacgcgcagaccaacgctgtctggggcgttagttccgtggatgagatattcaccgttaccgtaggccagacgcagcgcatagcggcccaggggattgttcggtccggccgggaccaccgctggcagcgtcacccctttctccagcgagcgcgcgcggatgccggcggtaggcgtccaggtagggttagggatcttctgccccacgcgggtggtcatctccggcgtttccagacctaactggccaatgcccagcggatagacctgcacctgattctctcccggcgggaagtaatacagccgcagttcggcgaggttgacgacaatgccctccctcggcacgtcgggcagcagcatctgagaagggataaggacctgagtgccgggcttcggctgcaccggcgcaatcgtatcgttggcttcgaggatcagcatcgccgcggtatcgaaatggcgcgcaatcgcctgcaggttgcgatctccctcctggaccgtccagtactgattctgaccaatcagccgactgttggcgggaggaagcgggtaatcaacggcccaggcggccgtggaggcgccaagggcgctgagaagggctaaggtgatcatcgttttgcgtttcatactgagattccttctttcgctgataaaacgccaggagactgaacggcggcagggtcagcgccctgccggacgtaacagaatgaaatctacctgtttattctagctaatatttgccgctttcgcgcgtatcgcgcggatcatggcttcgaggccttgcgagcgggagggggtgagatgctgggtgagcgccattttttcaaaccacggacgcacgtcgaactcggtgatgtcctgagcggtcatccggtcatagaggataaacaccaccgctatcagacccttgacgatcgccgcatcgctatcgccgcgcagggtgatcacgcctgtgggatcctggtccatcacgatccagacctggctttgacagccctgaataatgttctgcacgctatgttcttccgggcttagcggcgccatacgctggccaagctcgatgatatagagatacttctcttcccagttggcgcaacggctaaagttacgcaacagtttgtctttgtccggtagtgccgccattgtcccgtcctttaccctaacagtttgcggatccgctggaggccggccaccaggcggtccacctcttccgtggtattgtacatcgccagcgatgcccgacacatagccggtacctgataccgggccatcaacggcatcgcacagtggtgtccggtgcgcacggcgatcccgtagttatcgaggaagctgccgacgtcataggcgtgatgctgaccgaggttgaaagcaattacccctttacgctgcgccgggccgtaaaggatcagatccggtaccgcgcgcagggcatcgagcgcgtagcgcatcagcgtctgctcatactcggcaatctgcgttagtcccagctggctgacgtaggtcagcgccgcgccgaggccaatgatccccccggtattcggcgtgccggcctcaaagcgccacggcgcctgattccaggtggtgccctccgtcaggctgacggtggcgatcatcgacccgcccccttcccaaggcgccatcgtctgcagcagctcggaccgggcgtagagcacgccgatcccggtcggcccatacagcttgtgggcggagaaaacataaaaatcgcagcccagcgcctggacgtccaccgggtggtgcatcaccgcctgggcgccatccaccagcactttcgcgccatgctgatgcgcaagagcaatcagcgccgccagcgggttttccgtccccagcacgttggagacctcggttatcgccagcaggcgggtgcgcgggtcaaacagtcccgggacaacatccagttgcagcgtaccgtccgggttcagggggatcacccgcagctcagccccgacgcgggcgcagagcatctgccacggcacaatattggcgtggtgctccatttcgctgatgatgatgttatccccggcgccgacgttggcgtttccccagctgttggccaccaggttgataccctcggtggtgccgcggacgaacaccacttcctccgccgatccggcgttaaggaaggtggccgcctgctgacgcacggcttccatccgcgcggtggcttccgcgctgagggtatggatgccgcggtgcaccgccgcgtagccgtggcgatagaattccgcttctgcgccgatcactgcctccggcttctgggcgctggcggcgctgtcgagatagaccagcggctgaccgttgacctcccggttcagtaccggaaaatcggcgcgaacctgttctactgaaaatgtcatactgtgcctcccggcaaacgctgtccaatacgcgccagcacctgctctctgagcgcgtcgctgcggatagcctcggtgagctcggcggcgaaggcgtagaggatcatctgctgcgccgcctgctgttcgataccgcgcgagcgcagatagaacagctgctcttcgtcaatgcgccccaccgtcgccccgtggctgcatttcacgtcatcggcgtaaatttccagctgcggtttggtgtcgacctccgccagccgcccgagcagcagattattgttggtcatctgaccgtcggttttcagcgcgagcggcgcgacgttgatcagcccgttaaacaccgcccgccccttatcgctgacgatggttttgtgcagctggcggctggtgcagtagccgacctgatggtcgagccaggtgcggctatcgcagacctcatttttcaccggcatcgccagcgaattgaggcgcaggttgctgttttcgccgcccaggcgggtgctggtctggtgacgcagcacctggccgccaagcaggaaactgctgctgaaggccgaggcgtcgcggcccagcagcaggtcgttatgggcgaagtgatagctgcgggcattctcaaatgccagcttgatatgctggaggtgcgcgttatcggccaccgtcatggtcaatcgcccgccggtgaaatgcggctgctcattgaggctcaggtaatgctcgacaatcgtcgcctccgccccgctctccagcgccaggtgatggcgatagtgggcggtattcagcgcatcgccggccaggccactggtgatatgcatcagcagcagcggtttatccaggcggcggttgcgcggcacgcgaatgcgggtcaccgtctgggccaggctttcggtcagatggagaaacacctccggctgcagggcatccggcagatgctggcgctgattatcgacactgacctccacgccgctggcggcaagatcgtcgctcagctgaggatgatagcggccatcgataaacaccagccgccaggcgtccagcggcagcgccagcgcatcacgctgttcagcactgagagaggccccctcatcggcgacaaagcgaccgttaagtagggcatccagcggagtgtatttccagtcctcgtgcttgcgcgtcggcagcccaaggcgcagcagctgctgcagatgctgactggcctccggggtacgcgggccgccctgcgcttcaaacagatggtgccactgctgcagcgcgttactgctgttcggtaagccagccatagccctgctcctccagctgtttgaccagagagaaatcgcccgacttcacaatccgcccctgatacagcacatggacatagtccggcttgatatagtcaaggatgcgctgatagtgggtgacaatgataaaggcgcgtttgccgtcgcgcagggcattcactccctgcgagacgattttcagggcatcgatatccaaccccgaatccgattcatcgagaatgcacagctccggctcaagcaccgccatttgcagaatatcgttgcgctttttctcaccgccggagaagccaacgttcaccgagcgggtcaggagatcttccggcatctgcagcagcttgatcttttcttccattaagtcctggaaatcgaaacgatccagcgcctcctggccacgatagttgcgcacggcattcagcgcagtctgcaggaaaaactggttgctgacgccggggatctctaccggatactggaaggccataaagataccttccccggcgcgatcttccgcagcgagttcgagcaggtttttgcccttaaattcgacgcgaccgccagtcacctcataatcttcacgcccggccagggtggccgaaagcgtacttttgcctgagccgttcggccccataatggcgtggacctctcccgggcgcacctctaggttcagcccgcgcaggatcgctttatcttcgacggcgacgtgtaaatcttgaatacttaacatcttttttccttaattatcagccgacgctatgttcaaggctaatggccagcaatttttgcgcctctacagcgaactccagcggcagctcggagaagacgtctttacagaaaccgttgacgatcatcgagatggcatcgtcttcgctgatcccgcgctgcaggcagtagaacaattgatcttcgccaatccgcgaggtggtcgcctcgtgctccagctgggcgctgttgttgcggcattcaacatacgggaaggtatgcgccccgcagtccgggccgatcagcatcgaatcgcactgggtatagttgcgggcgttggtggcggtcggcatgattttgaccagcccgcgatagctgttctgactgtgtccggcggagatccctttcgagatgatggtcgagcgggtgttcttgccgatatggatcattttggtgccggtgtccgcctgctgatggccgctggtcagcgccaccgaaaagaattcgccgatcgagttatcgccgcgcaggatgcagctggggtatttccaggtgatggccgagccggtttccgactgggtccatgacattttgctgttctccccttcacacagggcgcgcttggtgacgaagttgaggatcccgccggtgttgttatcgccggggaaccagttctgcaccgtggagtatttcacttccgcgtctttatggatgatgacttcaacgaccgcggcatgcagctgatagctgtcgcgcaccggcgccgagcagccttcaatatagctgacgtagctgccttcatcggccaccagaatggtgcgttcaaactgcccggtcttttcggcgttgatgcggaaataggtcgacagctccatcgggcagcggacgcccttcggcacatagataaaggtgccgtccgaagccaccgcggcgttcagcgcggcaaagaagttgtcattccccggcactacggtgcccagatactttttcaccagttccggatggtcgtggatcgcctcgccgaaagaacagaagatgatcccctgctcggccagcttttctcggtaggtggtcgccaccgacaccgagtcaaatatcgcgtccaccgccacctcgcgcccttcgcgtaccggcacgcccagctggttaaaggcttcttccacctcgctggtcagaaaggtattggccccggtctgctgcaccgcgccaggctcggaggcgcaggtctcatcgcagttgccgcaggagggcgcggaatagtagctgtaatcctgataattcagcttatcgtaatgcgctttcagccagtgcggctcctccatttccagccacgcccggtaggcattcagacgaaactccaacatccactgcggctcattgcggcgagccgagatagcccgaacgacttcttcattaatgcctttggccagctcatcggtttgcaggcgagtaaaaaagccctctttgtagttgagcgggccgccggtccaggttttgacatcgtcagttgcttcagtattacgcgacatagttactccgcctgcaccccaaaactttcgccgcagccgcactcatgctgcgctttcgggttatgaaatttaaagatttcatttaaaccttcccggacataatccagctcggtgccgtcgatgaacggcatcgcctgcagcggcgcaaacagcttcgccccgtcagattcaaagagcagatcgtcgggcgccggctcggcaatcatttcgagcacatagccaaaaccagcgcagccgctggttttaatgcccagccgcagccctttcttatccggctgcttgcgcatcagatcgcgaatatgcgcggcagcggccggcgtcatggtcagtccctgccagctgaaatcggcgggattaaaagttcctgcttgtacttccatcgatagacctccaggttggcgccatcaaggcataccgccatgttagtgataatgattatcacttcaacccttctgcagcaggggtattgcctcatttagtgctttttataagcatagaccctcgcccggggattatcagggcgtgcaaatagaacttaatcgattgatttataatatgttattttgaaatcattctatctccgcacgcaatggcaaagatgtatcgaaaataccgatttatgcaatagcggcagaccaccttgctggttatcctttgcagacgagcataaagtgacaacgtaacagaaagaccatgccagcgcggggcgcggccccggccatgcgctagcaaaaagcgggtagtgaaagcgcccgccggtaacgcttcaggaaaggaataagcgccgctcgcctggccgcgttcgggaaataaaaaccaaaataaaacgggcaaacggggctgccaggcgggataccggctggctaggtgcctttactcaccagccgggcggcctggacaaagacctcatcctctaccccgtcccccttctgtctgcccagcctcaccagttcatccacgatactcccctgattaatctgcttttgggtcgccactaagctaatgaccgccgcgccgatggccatgccaatcaatgccgtttgttcatctttatctttcatggtgtcgctccgtctgtcctcctcagaaaggctagcaaaagataccatctgctcaatttcaaattcaccttctttacgtctgacgcaaagcctgcggcagggcacctggcaggagaaaaagaaactaagcggctgattgcaatggcataacactaatgaacaattaacagacttgtgagtcttgaaattattttttagactcattggtctgttaattatcaattgcgtaaaatcttatgcctaattcgaccttatttttcatcaccctttgtctctctcgcgtcctggtgaccttcttcttctggatggcaggcatctacggcgtctttcatttcgcggagatcgttcaggagatggtaaccgtcggcctgccgtggccggtcttgttcgcggcgggcacgattttttgccagctggcgggttcggcgctgatcgtttttaatcctgccggctacggctggattggatcggggatgctgattgtgtttacattactcactattccgctgggacacgccttctgggccttcagtgaaccccggcgcactgaggaattccatattgcgcttgaacacattaccgtggtcggaggattaattatgagcgcgctgtttgcaggctatcggcgatgagcgaaacccctcgtcagaaaggtcggccaaaagatccattgaaaacgcaggcgatacttcaggccgcccgtaagctgtttctggaacagggcctggaggtgacaacggccgaaatcgcccgcgtagccggggtggcgaaagccaccctgtatgccaatttcagcgataaagaacatctgatagaggcggtcttacgccaggaatcggatctcaccatcagcgaccatgatttcgcccagcgccatcatctgccgctgatcgaggtactgacggcgtttggctatcgctttgtccgctttatcaaccagcgggaactgaccggctgggaccgactgatcgcctcggctgccgtgcgtcaccccgatctccccggccgcttttacgccgccgggccggggcgcgcgcagcagatgctggaagcgatcatcgccgaggcgatcgaagccggtactttacgagcctgcgatccgcaggaggctgccgacgaactggccggtttatggctgggaatgaccagcctggcgataaaacttggcgcaagacctccgctgtccgacgacgaaatcaaacagcgggttgagcgcgccctggacgtctttctgcgcgcgtattccctggcgccgggctgatctctccttgaccttttcagcgctgtcgtctggcgtaaggctgatttattgtgcccaatccgcgcccggcgcaaaaaataatgtccttgccggttagcattaaaagaaaataacaaccacagagtgcaacgcagattattccatgagggaatagtgggaatgctaatatttcatttcctcgccggtttttagaggcctatagtttttttacctgcagaacatccactaaggttaaaaaacataaggacataataatgattgtttcagcccccagcgattatcgcgaagccgctcgtcgtcgtctgccccgcttccttttcgattatattgacggtggcgcggtggcggaaaacaccatgaacgccaacgccgccgagcttgcctcggtagctcttcgccagcgcgtactgtgcggggccggcgaaccgacgctggcgaccacgatccttgatgccccatgggcgatgcccgtggcgctggggcccgtcggcgccaccgggatgtacgcccgccgcggcgaagtccaggcggcccgcgccgcctcccgcgccgggatcccgtacaccttatccaccgtgtcggtctgctcgattgaagaggtggcgagccacgccagcggcgcgctctggtcccagctgtacgtactgaaagatcgcggctatatgcgtaacgcgctggagcgcgcctgggccgctggcatgaaaaccctggtatttaccgtcgatatgccaatccccggctcgcggtatcgcgataaccgctcagggatgtccgggccgcacgccaccctgcgacaatatctccaggcttgcacccatccgcgctgggcgatgaacgtcgggctggcgggcagacccctgtcgtttggtaatatcgaagcctacaccggccacaaaatgaccatggacgactatatggggttcatcagcaacaacttcgacccgtccatcgcctggcacgatctggagtggatccgcgacagctggcaagggaaattaatcatcaaagggatcctcgatgccgacgatgcgcgcaatgccgtgcggctgggcgccgatggtattgtggtgtcaaatcatggcggcagacagctcgatggcgccatccccaccgcccgggcgctgcccagggtggtggatgcggtcggcgacgatctgacagtgcttgccgattccggggtgcgctccggcgtggacgttatacgtctgctggccctcggcgcgaaaggcgtgctgctcggtcgggcctatatttatgccctggccgcggcgggcgaagcgggcgtggcgcatctgctgcgcttatttgccgaggatatgaaggttaccatgaccctcaccggcgcgacctcgccatcggccatcagcctcgattgccttgatcgcctcgaacaggatcaacaccacactcatgcggtgccggtatccttacccgcctgaccctgcccgggacctggcctggccatgtgcctcgcccaggtccggcaaagtggaattacctctgaaggtgcaactctgtctgttgtaccgtgttcgccgggcggatgcggaaccagatcgcgtacatggccggcaggaagataagggtcatgatggttccccccagcgtcccgccaatcagcgtataggcgagcgttccccagaagaccgaatgagtgagcggaatgaacgccaggatcgccgccagcgccgtcagcagaaccgggcgggcgcgctgcaccgtcgcctccaccaccgcgtggaacggatcgagccccgcctgttggttatgatggatttggccaatcaggatcagcgtattgcgcatcaggatccccgacagggcgatcaggcccaccagggcattgatgccaaacggctgattgaacagcagcagcgtcgggaccacgccaatcagccccagcggcgcggtcaggaaaaccatgaccatcgccgacagcgaacgcacctgcaggataatgatcagcagcgtgagggcgatcattatcggaaataacggcaccatcgcccgggtggccttgccggattcctcaatcgaccccgccgtctcgatgcgatagccaggcggcagcgagtcgataatgggctgcagcggcttcatcagcgcggtggagacatccggcggctgcaggttctccgcaacatctccgcggacggtgatggtcggcgtgcggtcgcgacggcgaagcagcgggtcctccatcctgatcgacacgtcgccaatctgtgacaagggaacccgctgcccgccgctgcccaccagggtgaagtcggcgattttcgccggatccagacggatgtcgcccgccgcgcggccgatcacctgcacggcgcgaatatcttcccggacggtggtgatcgggatccctgacagcaggaactgcagctgctgggcgacggactgggagctgagtccgctcgcctgcagccggtcctgattgaggctgaaatgcatcaccggtacccgcgaaccccagtcggtattgacggtgcgcatcagcggactggcctgcagcaccgatttaacccgctcggcgatgtcgagcagagcgtgcggatccggccccatcacccgccaggcgaccggataaggcgaataagggccaaacaccagctgagtgacgcgcacccgcgcctccggcgccaggccattggccaccgcctcccgcagccgccgcttgagcgcctcgcgggcaccctgcccgtcggtcaacaccaccagtttggcgaaggagggatcgggcaattccggagccatcgccaggtaaaagcgcggcgcgccctggccgatatagctggtgacaatcttcgcctccggctgccgctgcagccagtgctcaattttcgccgccgcggcgctggtctggctaatcgacgacccgtaaggcagctgcacttcaaccagcacttccggacgatcggaggtggggaaaaactgctttttcaccacgctcatgcccaggatcgccacgataaacagcgccaccaccccggcggccacgcgccatttgtgagcaataacccgggtcagcagccgacggaagcgctgatagcgcggggtgtcatacagcgcggcgtggccggccgccgcgggctttctgtccggcaacaggtgcacccccagccagggggtaaaaatcaccgccacaatccaggaggcaatcagcgcgataccgacgatccagaacacattgctggcgtactccccggcggtggactgcgcaaatccattgggcataaagcccacggccgtcaccagggtaccggccagcatgggcgcggcggtatggctccaggcataggccgaggctttgaggcggtcatacccctcctccattttgaccaccatcatttcgatggcaatgatggcatcatccaccagcagccccagggcgaggatcagcgagccgagagtgatgcggtcgaagtttttgccggtcgccgccatcaccacaaacaccacggcgagggttaaaggcaccgccgccgcgaccaccacgcccacgcgccaccccatgctgacaaagcacaccgccatcaccaccagcagggcgacaaagaatttgatcatgaactcatcgaccgcggcgctgatattcaccgactgatcggtcaccttggtcaacgacatgccgagcggcaggctctgattgatgctggccgtttcggcatccagcgctttccccagcgccagaccattccagccctcacgcatcaccacgcccagcagcagcgccggttcgccctgatagcggatcaggaaggtggcgggatcttcataccctcgctcaaccgtggcgacatcggccagtttcagcgttctgcccccggcaataatcggcgtgtcgcggatctgctgcaggcggtcaaacgccccatcgaggcggataaagatctgcccgccccgggtctcaatggccccggcggcggtcagcacattctggctgttcagcgcggcaaaaatcgcctctggcgagagacccagagtggcgagacgatcatgagaaaacgagagataaatgcgttcagcctgttcgccgaggatattcacttttttcaccccggatacatgcagcagctgctggcgcagggcttcagcgtcacgcaccagctgccgcggcggctctccccgcgccttcagggcaaagatcgcaaaggtgacgtcggcgaattcgtcattcatcatcgggccggagacgccggcaggcagatttttcgcctcgtcgccgagcttcttgcgcgcctgataaaactgctccggcacctcggaaggcggggtctgatcctgcagcgacagggtgatcaacgccatgccagggcgggtataggtctccgtgcgatcgtaccactttaactcctggagccgtttttccagcggctcggcgacctgatcctgcatctcctgcgcggtggcgccgggccagacggtaatgaccgtcatttgcttgaccgtaaagggcggatcttccgctcgcccgagtccgaagaacgccaccagcccggcgacggagataaggataatcaaaaacagggtcaccgaccgctcgcggacggccagcgcggagagattaaaacgcccggcgctcatggctggctcccggcggcattatgctcgcgtcgttccgccagacgcaccgcctcgccctggtgcagaagatgggcgcccagggcgacgatcggctcgccgggcttcagcgggccggtcacccgcgcggtttcatcatccaggccgagcacagttaccggttgccaggagacggtggtcggacgagaggcaatgcgccagacgccagggccgttacccggatcgtagaccgacgccaggggcaccgccagcacctggcctggcgcctggtcgttgccgatgcgcagggtcacggtagaccccagcggggcattcgccagcgcgccgttcagtacatagcgcgcttcaaaggtgcgggtggtggcgtcagccgcgtccgaaagcaggcgcagggtcgccgtgaccggctgagattcgctgccatagcgtgtcgccagcgcctcgctgccgaccgccgggcgcagcgtctccggcagttgcacccgcgcttcgcgctgccccgcccgcgccaggcggatcaccacctgcccggcgctgaccacctgtcccggctcagcgagggtttccaccaccacgccgtcagcatccgccagcagtccggcatagccggtggcgttttgcgccacattggcctgcgcctgggccgcgctgaggtcggctctcgccgcctctgctgccgcgttaatctggtcgaattccgcggcagagatggcgccgctcgccaccaggccgcgatagcgggccagatcgttggccgcctttttggctcgcgcccgcgcggcatctacggcccgctgttgggactgcgcctgcaaggctagatcagccggatccaggcgcagcagcagctgaccgcgcttgacgctctgcccggtttccacccgccgttcaagcacttttcccgccaccctgaagccgaggtcgctttgggttcgggccactaccacgccggtaaaggcccgcgagccgacctccgcgcgctcgacggtcgccacccggaccagcggcggccggatgcgggggtcgtcatgatcggcaggttcgccgcagcccgcgagggccagcggcaggaggcagacggcaagatggacggcgttgagcctgagcatgggtcaccttaatgaaaagaccggatggtgaccgcattctcagactagtgactaataaagtcaatagtcactaatcagggggagagacttctcaggatcagggaggcaagcagcaccgccgcggtgggcgcggtgtcgagattgtattgcaactgcaccggattgatgaaaggacacatcaccatatacaccgccagggtcgcttcatccagcggggttttgcgctcgaactcacccgcctggcggccttcgacaaggatttgaccaatcagctgctgcagatgaccggcatactgttccgttgaaggccatttatcgcgcgccgcgacggcggcgatgtcgtacagtttgcgatcctcaaaaaacagttcactgccggcctcggtcagcgcccggaacaggcggcgcagtttctcgctggcggacggcgcatcggcgatggcctcgctgacggccaccatgatcttctccagccggctggcgcaaatcgcctcgccaatcgcctgcttggagtcatagaatttatagatataggctttggaaaagcctatcgctttggcgagatcggtgaccgtcgttttctcatagccatagcgactaaagtgcgccatggccgcgtcaagaatctggtcccgaacgctgtggtcatggggaccacggcttgcaggggtgggggtatttttcgtcatccgtttagcttaatgcgatcgttatcgtttgacaacgagtgacgttattatgatttggtcacaataacgccccggtttgcgatccgcttcgccgcgtcacgcctcggtgtttatcgcgccggcgggcagacaacccaggccttgcagcgtctgatacaccgcgctgtcgagcggggtatgcggttccgcgcctaaaaaatcaaccagtttatcgttgcgcaggcgtaccggcagacgccagagatagtgcatctcgaccatttcgcgcagggtggcgttgaagggcgccgccagcttcaccagccaccagggaaaagacttcactaccgccctgccgccatagcgggcgaccacccgctggatcgcctgactcatttcgctgccgtccgggtcccagtggccctgcatatgaaagcgggcgaacggctcaagctcgcgcctgcgggcgagcagcgcggcgatggtggcggcgacgtcgggcagccaggcccactgatgccccacgccgatcgcccccgggtagctaatgatgcggggaagctgaccaggcttgaccagcccctgagaaaaccagttatttccggcgcgtggaccaaaaaaatcgcccgcccgaacaatcaacgcccggccgccgcgctgcacgtaatccttcagcgccagctccatcgccacccggatggcgcctttgcgggtcaccggctgttgtgcggcctcttcagcaatcagtggaaaggaatccggtccatagttgtagaccgtgccgggcaggactacaagcgcccgctgccgttcggcagcctgcagggtgttgcgcagcataggcagtacctgttgccgccagtgccggtagcccggcggattcaccgcatggacgatgacgtcgcaaccggcagccgccgccgcgacctggccgccatccagcgcgtcgccggctatccactgcatgccatctgcgggaccgcaaatctgagcgccgcgcttcagcgcccgaacctgccagttgtctgccaccagccggcgcgccacttccccgccgatgcccccgcttgctcccagaataagtaccttgccgctgctgttcatcctctttccccgttcgctaatggatgcttgacagcctacctgcggctcatatcaaatgaaattgcataccatcgtcgagcggctatacatatttgtatgaatacctctattccctgggagtggtaccgaacctttctcgccgtcctgcaggaaggctctttatcgggcgcatcgcgtaccctgaacatcactcagccgacggcggggcgccatattgccgggctggaaaacgccctcggccaggccttatttacccgctcgcaaaccggcctgctggcgaccgacgcggcgctggcgctgcgggtgcacgccgaggcgatggacaataccgcccgggcgctggaacgcacggcggctaacttcagtcgcgacagagccgagctgcgtggcgtggtgcgggtggccgccagcgaggtggtcggcgccgaggtgctgccgccgctggttgcccggctcaggcaggcgtgcccgaatatcgtcatcgaactgatgctctccaatcggtttcaggatctgcttcaccgggaggcggatattgcggtgcggatggtcgccccgcagcaggagcagcttatcgcccgccgtctcggcaggatcgagcttgggttacatgccaccgccgcctacctgacgcggcagggcctgcccgcgactctcgacgatctggccagccacgcgctaattggttttgatagcgccacccctctcgtgcgccgggcgctgcaggcttacccccgttttcagcgcgaggcgttcgcgatgcggaccgatagcgacctcgcccagttgagcctgatccgcgccggagcggggatcggcatctgccaggtgcctcttgcggatggcattattcccctgcagcgagtgctggcggccgacttttctctgtatcttgatacctggctggtaatgcatgaggatctgcgccacagccctgcctgtaagcgggtatttgattttctcgcccaggggttgcaggcgtatattcgtggcccactggcgagctgacccaccccatcgcgcggtcatttcattgcctgcggaaatagtcactcattgacactgtaaatatggcattgtataaaaccccgccccaataatgagtttcatttgcattactcccatttgctggtcatccactcgcctgtttacaaggatagcgtttaatgaagaaggtcctttgcgcgttaggcttgatgttcaccgccgtcagttccgcgctggcaacaacctaccccctgacgattgaaaactgcggctatcaggagaccttcacccggccgccggagcgcgtggtcgcgctggggcaaaatacggtcgaaattctgctgctgctcgggctgcaaaagcaggtggtcgccagcgccttttggccgaccagcgttttaccgcagctggctgagcaaaacgcgaagattaaaaccttgacggtggaaattccgagcctggaatcggtgctggcgcaaaatcccgatttcgttcccgcccagttgccgctgctgctggggccggaaagcaaagtcgccaggcgtgaagatctcgccaccgtcggcgtgaacagctacgtctcaccggggatgtgcgccaccaaaaaggccaccggcgatatgtacggcagccggcaaaagctgtgggatatgacctggctgtatcaggagattagcgatttttcccgcattttcaacgtcgaagatcgtggtcaggcgctgattgccgatttcaaaaaacgtgaagccgacctgcgccaggagtttggtaaaagcaaaaaggatctctccttcgtcttctggttctccagcgcctcaccttcggccgatgcctatgtcggcggcaaaaacagcgcctccggatttatcgccagcgtgctgggcggacataatgcgattacctccgaaaccgagtggcccacggtgagctgggagagcattattgccgccaacccggatgtgatcgtggtcgccagcctggatcgtaaccgctgggcgctggataaggccgaggagaagatcaaattcctcaaaagcgatcccgccgtcagccagctggaggcggtgaaaaaaggccatatcgtggtcatggacggtcaggcgatgaatccgaccattcgcacgctttacggcgcggaacaggtgggcgagcagctgagaaaaatggggctgaactgatgagcgtcgccgcgattgagacgcgccgcagcatactgctcaccggctggtgtgtactggcagcgatcgtgctggcgctggtgatcgctgttggcgtcagcgttggcgagctggccatcccgctgcagcatgtcttttatgctatcagcaacagaaccggcttaaccgctgagccgctcaaccgtatctatgagagcgttatctgggatttccgcctcagccgcgcgctggtcgccgcctgctgcggcgcaggcctcgctatctgcggcgtcgtgctgcaaagcctgctgaagaatgccctcgcggaaccctacgtcctcggcgtctccgccggggcctccaccggtgcggtgtcgatcgtggtgctgggccttggcgctggcgcaatttccctctcggccggggcctttgccggggccttcgccgccttcgcctttgtcgccttgctgactaacggcgcgcgcggcggcaatgagcgtacgattcttgcgggcgtcgccgcctcgcagttatttaacgccatcacggcctataccatcagcacctccgccagcgcgcagcaggcgcgcgatgtgatgttctggctgctgggcagcttcagcggcgtccgctggcccgaattccagttggtcatcgtggtggtgctcgcgggtctggcggtctgcctgtggtatgcccgggcgctggacgcgttcaccttcggcgacgatgccgccgcctcgctggggattgctgtgccgcgcgtgcgcctgatcctcttcaccactgcggcgctgatcaccgccaccatcgtcagcatggccggctcaatcggctttgttggcctggtggtgccccacgtgatgcgtttcttctttggcccgctgcaccgaacgttgctgatcgccagcgcgctggcaggggcgatattgatggtactggcggacattgcgtcgcgcctgctgattgccccgcaaagtctgcccgttggggtagtaaccgccctggttggggtgcctttctttgccgtgattatctaccgctcaaggaataagtgatgagtatttgcgctgaaaatatcacctggaaggcaggcaaaaaggtcatcgtcaataatgtctcgctgcgggtgccgcgaggcgaaacggtcggactactggggcccaacggctgcggcaaatcctccctgctgcgcgttctggcgggcctgcgccgcccggatgcaggtcgcgtcaccctcgacggccaggatatcgcccggatggcgaaaaagcagctcgcccgccgcgtggctttcgtcgagcaacacggcatgaccgaggccaatatgcgggtgcgcgacgtcgtgcgcctgggacgcattccccaccactctccgttctcaaactggagcgctcaggatgacgaggcgattgccgccgcgctgcagcgggtagcgatgctggagaaaagcgaacagggatggttaagcctctccggcggcgagcggcagcgggtgcatatcgcccgcgcgctggcgcagagtccgagcgaaatcctgctggatgagccgaccaaccatctggatatacaccatcagatgcagttaatgcagttgatcagcgagctgccggtaaccagcattgtggccattcacgatcttaaccatgccgcgatgttctgcgattcgctgatcgtgatgcagcaggggcagatcctcgccagcgggacgccggaggagattttgtccgaagcgctgctgtgggacgttttccgggtgaaaaccaaaatcgagatctccccttaccacggcaaaaagcacattcatttcatcgtttaggttgggcggatatgcctcttttctccctgcgccctgcggcaaccctctggcctccggtgttactgggaagccagttcgtttttaatattggcttttacgcggtcgttcctttcctcgccctcttcctgcgcgacgacatgctgctctcaggcggacttatcggcctgatcctcgggctgcgtaccttctcccaacaggggatgtttatcctcggcgggacgctggccgaccgctatggcgctaaggcgatcattctcgccggctgcgtcgttcgcgtcgccggttttctcctgctggcgtgcggggcgtcgctgtggcccattatcctcggcgcctgcctgaccggcgtcggcggcgccctgttctccccgtcgatagaggccctgctggcgcgggccggcaccctcagccaggccaacgggaaacgcagccgcgccgagtggtttgcgctgtttgcggtatgcggtgaactgggagcggtgatcggcccggtggccggaggcgtgctgagcgggatcggctttcggcatatcgccctcgccggcgcgggaatatttcttctggcgctggcggtgctctttttctgtctgcccgccgacgggcacacgacaacaacgcgcagacgagtcccatggtggacgcctttgcgccagccgcgctttgtcgcgtttattctcgcctacagctcatggctgttgagctacaaccaactgtacctcgccctgccggtggagatccaacgttccggcggccgcgagcaggatctggcgccgctctttatgctggcctcgctgttgattatcaccctccagctccctctcgcccgcttcgcccggcgaatgggcgccgtgcgcatcctgccggtgggctttctgctgctgtcggcttcctttgccagcgtggcgttattcgccgccgccccacccgccgaaggttggctgcggttaatgccggcggctggttttgtcacgctgctcaccctcggccagatgctgttagtgcccgcagccaaggatctgatcccgctgttcgccgaggagtcgacgctgggcgcccactacggagcgctcgccaccgcaggagggtgcgcggtgttagccgggaatttactgctcggtcatttacttgaccaggcgctcattccctcgccgcaggcggtttatccctggcttctgctggcgctgtttccgctgtgcagcgccgtcgccctgcgggcaatctgtcgcccgctggcggcaacatgacgcagagcgggcaacagcccgctctggaagtgaaccgacgataaagtacatcgcctggggaagataacgggcgcgccccgccttactttgccgccagctcgcgacgaataatctcggcgccggcgctcagggcgtgcagtttgccggtcgcgacatggcgcggcagcggcgccataccgcagttggtggacgggtagagtttgtcggcatcgacgaacgccagcgccttgcgcagggttccagccacctcttccggggtttcgatcgcatggctggcgacatcgatcgccccgaccatcacctttttaccgcggatcaactccagcagatccatcggcacgcgcgagttgtggcactcgagagagataatatcaagggacgatttctgcagctgcgggaaagcctcttcatactgtcgccactcggagcccagcgtctttttccagtcggtattggccttgatgccatagccgtaacagatatgcaccgctgtctcacacttcagcccttcggtggctcgttctaaggcggcgatcccccagtcgttgacctcatcgaagaagacgttaaaggccggctcatcgaactgaataatatcaacccccgcagcctctaactctttcgcttcctgattgaggattttggcaaattcccaggccagcttttcccggcttttgtagtggttgtcatacagcgtgtcgatcatggtcatcgggcccggaagcgcccatttgatcggctgactggtgagctgccgcagatagcgagcgtcctccacgaagaccggtttctggcgctccacggcgcccaccaccgttggaacactggcctcatagcggttacgaattttcacgatctcgcgtttggcaaaatccaccccgctgaggtgctcgatgaaggtggtgacaaagtgctgccgcgtttgctcgccgtcgctgacaatatcgatcccggcccgcagctggtcgtcgagggataaccgcaaggcgtcgcgcttgccggccagtaattcttcgctggacagtttccagggcgaccacagggtctctggctgcgccagccaggaaggtttcggtaaactgccggcggtcgatgtcggaagccatgttttcatagtcattagccttttatatgggtttagcaaagcgcgaaattagcagaccattgctcaagcaacgtcttgtgcgggttgataaaatgttgttgtgtaaatttcccctgctcaatcgccaacaggctgcgctcttcccggtcatagacgatttttgttaatgaatgatccaggtggctgagattgggctgatagtattgccccgccggggagttggcattgtagatctccgggcgatatattttctgaaacgtctccatcgtgctgatggtggcgatcagttccaggctggtgtaatcgctgagcagatcgccggtaaaataaaaggccaacggcgcgacgctgttttttggcataaaatagcgtacctgcagacccattttgctgaaatagcgctcggtcagcgagacgccttcctgagcatattcaatgccgaggaccggatgttcgttaccggtgcgatggtaaacatctttactggagacgctcaggcaaatcaccggcgccttgctgaagttggcgcgccaggcgctggattgcacaaaatccttaaagatattgccgtgcagctcgccaaagttttccggtacgctgaagcgactctggtccttattatgttccagaagcagtacgctaaaatcgtaatcccgcacataggaggagaagttattgccgacgataccggcatgacgctccccgctctttttatcgacaatatgcgtttgcaggatctcaatcaccgggaagctggcgctatcctgagcaatattcatctcgacagaaataatatccagttccaccgcatagcgatcgttatggggattatcccagtgggccaggctattaaaacggttattcatcatgattaacgtattgcgcagattttcctcacggttcacccctctggctaaattagcgaagttggtggtaatacgcgtattttccgcagggttataattttcatcaaaccgggtgcgcttaatcgtataggtaaatttattattcatggcgattgtccatcctgatggcgggcataaagcgaacccggcggaatactctccaccagcctggcgacgcggagtcaggccgggcgcgcttcaaccggtaaatgttgttgattcgttaatgaacctatttttgccagagtcagcgctggagggaaagcgacttaaattcaatgcaacatgagccatcctcatgttgctccaggcggtggccgatggccgacgcaggccgacaatattagtcaataaacgtttgttcaatggaagtaggcagggtacactctttaaccactataagatgggcttacctgcccgccgtacccgtttagctggagcttttgtcgtacagaatgattgttgatatcagtattatgtcgatgtgcatggccgtactgctgattatgagcgtactgctgaattaagaggctcccgaacgcaatgacactcgctctcatctgacctccacattcgcgaggaaaaaagaagattcagaggattcgcgccgcctgggattgttccgcctgccggcaccctctactcttttgggacttgcttattgaggaatcccggatgaaaaaagctctgcttgccctgttcgctatcgccaccgttaccgccgccagcgcctttgcggctgataaaaccgacgtcccggcgcctgtcgtcgataacggagtccgcccgccgatggagagggatcgtggccccctgccgccgttcccgccgcagcttccgccgcacagaccggtgctgttttcagccacggtagcaaccgatacgccagcggaaacaattaacaaactgaccgcgctgatccccgccggccaggcgaaacactacgaagtgcacgttgaggtggtgccggttggcgagggaaccgacagacaatagcccaggggatatctacgctgtcatctgtcagcaataaaaaagctgccgcatttcgcggcagcttttatgtacttatttacagctgagcagctgaaaattagctacgcactttccggtaaataaacagtaccaccagcgcaccgataaccgctaccacgaagctgccgaaattaaacccatcgaccttaccaaaaccaaacagggtactgatccagccgccgaccacggcgccgatgatccccaaaataacggtcacgataaatccgccgccatcttttcccggcataatccacttggctaaaataccggcaataagtccaaaaatgatccaggaaagaatacccatggttaaccgtcctcttgttacctttaagcatttagtattgaaaagagtagcataaataacgagagtggatcggtaataatataaatattagataattccctgccgacgcccggctgatcttgtgacaacctctctggctctggcaggccggctctcgcttattaccttaaaaaaagggaggctattcgcctcccgccatgcggcttatattaccgcggtggttagtcgtgatgaacaacataaccgcgactgttcgtcgaagatttcaatttgccagacctgatggcgcgtcccgacgtgcagcgctttgcagacgccgcgcacccggcccccgcgcgccgaacggatgtggttggcgttaacctccagccccaccaccttttgttcgccttcgctgcacagatagcctgccaccgaccccagggtctccgccagcaccaccgacgctccgccgtgcagcaggccaaacggctgctgtgtgcggctatcgaccggcatagtggcctccagcgtatcgtcggtaacggtctcaaagcgaatatcgagcagccctaccatgttcccctcaccgagccggttgagctgctccagcgtggcctgacgtttccaaatcatccgattatctccagtaacgcctgcagcgggtggcgaacgccgctgccttcaatacgcttcacctgactgcggcaggagtagcccgtcaccagacagcggtttcgcggcagccgctgcatcgcctgctgccaggagagcgcgtaaatggccaacgagttggcgtggtttttcacttcatgaccataggtgccagccatcccgcaacacccaacgctgacgttttccagcttcgcgccgaagtgggcaaaaatatctgcccactgctttgtcgccgccggtagcgcggtcacttcggtacagtgaccgaacaggtaccagggctcaccgcccagatcgggacgggcgtcgctggttagggccttcggcaaccactcatggactaacagcacctggaaatcgccgcgcttgtcgccgagcgtctgcttgtactcatcgcggtagcagagcaccagcgccggatcgacgcccaccagcggcatgcccagctgcgccacgcggttgaggaagtccgccgtcttctgcgcggtgcgcgcgaagcgggtgaggaagcctttgatatgctgcgccttgccgttcggcgagaacggcaggagcaccggctgatagcctaaggcctcgaccagacggataaagtcggccaccacctgggcgtcgtagtagctggtgaagggatcctgcaccaccagcaccatcttcgctttctgctcggcgctcagcgcttcgagctgctcaagggtcatattggcggaacggtggccggccatctgctgcttcagcgacggcgccgagagcagcggcagatcgaccatcccgatatgcttctccgacagctttttcagccaaggctggttaataaaaaagttaaaggtcttcggcgcctgcgccatcagcggcgcataagattcgaccgaggccaccagatgatcgcgcaccggccgcagatagcggctgtggtacagctgcaggaagcgcgagcggaactcgggaacatcgattttgatcgggcactgggtcgaacaggctttacaggccagacagccggacatcgcctctttgacctcatgcgagaagtcatattcgcctttgcgcgcatgccagctgttgcgcgtgcgcgccaccagcgagcgcaggctgacgccctgctccggcagcgccttctccagctggttgggatcgacgccgcggtcggccagcaggcgcagccattcccgcaccagcgtcgcccgccctttcggcgagtggatgcgctggttgctgactttcatcgacggacacatcgggctcttgacgtcaaagttgaagcacagcccgttgccattacactccatcgccccacgccagctgctgcgcaccgcgatggggatctgccgatcccaggtgccgcgcttcgccgcatcgactttcatcatcggcgcgtcgataccttccggaggacagattttccccggattcaggcggttatcgggatcgaagaccgctttgatcttgcgcagctcggcatacagcgtctcgccaaagaaggccgggctgtactccgcgcggaaccctttgccatgttcgccccacagcaggccgccatacttcgccgtcagcgccaccacatcgtcggagatctgcttcatcagcacctcctgctgcggatcgcacatgtccagcgccgggcgcacgtgcagcaccccggcatcaacgtggccaaacatgccgtagctcaggccgtggctgtcgagcagcgcgcggaactcgacgatgtaatccgccagatgttcgggcggtacgcaggtgtcctcggcgaaaggaataggcttggcggcgcctttggcattgcccaacaggccgacggccttcttgcgcatggcatagatgcgctccacgccttcaagatcgtgacagacctgccagccaatgacgcccgcctcgctggcggccatcagctcgtccagccgctggcacagggtagcaacctgctggtcaatcagcgccgcgtcatcgccggcgaattcgacgatattgagcccgagcatctctttatccggtacgtcggtgatcagttcgcttaccgagtgccagacgatatcctcgcgcgccagattgagaactttagaatcgacggtctccaccgacagggctttcgcttcgaccataaagggcgcattgcgcagcgcagagtcgaaggagtcatatttgacgttgaccagacggcgcaccttcggcaggcgggtgatatccagccgcgcttcggtaataaacgccagcgtcccttccgaaccggttaaaatacgggtcaggtcgaactcgctcatctcatcgttaaagacgtgacgcagatcgtatccggtgaggaagcggttgagtttgggaaacttatcaatgatcaggtcacgctgcgccttgcagcgctggtagaccgtgttgtagatccggccaaccgtcgagggggtattgcccagcgtctccgccagcgccaccggcaccgcctgggtatcgaggatatccccgcccatcagcaccgcccgcaggccgagcacgtgatccgacgttttgccgtacaccagcgatccctggccggacgcgtcggtgttaatcatcccccccagcgtggcgcggttgctggtggatagctcaggcgcaaaaaagtaaccatagggtttaagaaactggttcagctgatctttgatgaccccggcttcaacgcgcacccagccctcttcggggttgatttcgataatgcggttcatatagcgggacatatcaacgataatcccgccgttcagcgcctggccattagtgccggtgccgccgccacgcggggtgaaaatcagcgatttaaaacgcggttcggcggcgacgcgcgccagcagcgccacgtccgccgtggatcgaggaaaaatgaccgcatccggcagcagctgatagacgctgttgtcggtggccatcgttagcctgtcggcatagctggtggcggtatcgccggtaaaaccctgttgctccagtacctgcaaaaaattcagcaccagttgaactacccctggcgcctgagaaatttgtgggatcatcacgcttgaccctgcctgactatgttgtgtttgaaaatattgtgttggtgctaactaaacgtttgcgtagcgcattcaactttttatcacatttttttcatatgcgcccacgtgttttctgtgcaaaatcagcccggcaaaattattgatattattatcagtatatggatttacgcggcgccagctgtttggcgcgactggaaaggtaaaatttctctatgattaatccccatcagcctcgggacattccgcaaatactgctgtcggtgctgttcctggccctgattatcatatcctgcctgtgggttgtgcagccgtttattctgtccttcgcctgggccggtacggtggtgatcgccacctggccggtgctgctgcgtctgcagcgtgtgctgttcggcaaacgactgctggcggtgctggcgatgaccctgttgctgtttctgctattcgttattcctatcgctctgctggtcaacagcctggtggataacagcgttccgctgatcaaactcatcagcagcggaaatgtgacgctgccggatttcgcctggctcaacagcgtaccgctggtcggcgataaactgtactccgcctggcacggtctgctggatatgggcggctcggcgattatggccaaggttcgtccctatattggcaccaccaccagctggtttgtcggtcaggcggcgcacatcggcaagctgctggtctactgcggtttgatgctgctgttcagcgcgctgctctactggcgcggcgagcaggtggcctatggtttccgctacttcgccacgcgcctcgcggccaaacgcggcgacgccgcggtgctgctggccggccaggccgtgcgcgccgtggcgctgggcgtggtggtcactgccctcactcaggcggtactgggcgggattggccttgctgtctccggcgtgccctacgccgctctgctgaccgtggtgatgatctttacctgtctggttcagctcggccctttactggttttggtgccgtcgattatctggctttactggagcggggacaccacctggggcaccgtgctgctggtgtggagctgcgtagtcggcaccatggacaacgttattcgtccggtgctcatccgcatgggcgccgacctgccaatgatccttatcctcaccggcgtcattggcggcctgatcgccttcggcatgatcggcctgtttatcggtccggtgctgctcgccgtctcctggcgactgtatgacgcctgggtgcatgaggtgccgccgccgccgaaagaccctgacgtcgtccttgaagagctcagtgagctggaggccggtcgcaagtaatgcctggcaggcggggagacccgcctgtttctttgcccgcatattgttaagcaaaatttattgatcgccggcaatgcgctggccccgcgtgcccttcacctcgctttcctcccccggtccttcacaacaatttaactattgagaggaatctgatcgacggcaaaggccccgctgcctactattagctcacggttataaatcaacaccttgatttataagcatggaaatcccctgagtgaaacaacgaattgctgtgtgtagtctttgcccatctcccacgatgggcttttttttgccctgcgcatcacgacaccagatagcctgacaccggtaaaaaaaatccccggcatcgctgccggggatcggtcctgtcagggcgaacttattttttcagttccgccagacctaaccaggtttgtaccacggtatccgggttcagggacaagctatcaatcccctcttccatcagccaggcggcgaaatcctcatggtcagacggcccctggccgcagatgccgacgtatttaccctgtttcttcgccgcgcggatggccatcgacagcagggctttcaccgcgtcattgcgttcatcaaacagctcagaaaccacaccggaatcgcggtccagaccgagcgccagttgggtcatgtcgttcgaaccgatggagaagccgtcgaagtactcgaggaactgctccgccagcaaggcgttcgacgggatctcgcacatcataatgatcttcagcccgttctcgccgcgcttcagcccctgacgctccagctcttcgaccaccgctttcgcctgggcgacggtacggacgaacgggaccatcacttcaacgttggtcagtcccatgtcgttacgcacgcgcttcatcgcttcgcattcaagggcgaaacagtcgcggaagctttcggaaacgtagcgtccggcgccgcggaagccgagcatcgggttctcttcttccggctcatagcgctcgccgcccaccaggttggcgtattcgttcgatttgaagtccgacagacgcacgatcacccgtttcggatagaaagcggcgccgagggtggcgatcccttcggtcaggcggccaacgtagaactctctcggcgaatcgtagcctttcatcagctcgcggatttcgttctgcaggcccggctcctggtcgtcaaactccagcagcgcgcgcggatgaacgccaatcatgcggttgatgataaattccagccgcgccagaccgacgccttcgttcggcaggcaggcgaagtcgaacgcgcgatccgggttgccgacgttcatcatcaccttcagcggcagatccggcatgtcgccgacgctggagctcttgacgctgaagtcgagcagctcggcgtagacatagccggtgtcgccttcggcgcaggagacggtgacattctgattttcctgaatgcgatcggtagcatcgccgcagccgaccactgccgggatccccagctcacgggcgataatcgccgcgtgacaggtacgcccgccgcggttggtgacaatcgccgaggcttttttcatgatcggttcccagtccgggtcggtcatatcggtaaccagtacgtcgcctggctcaatgcgattcatctcgctgatatcgtggatcaccttgaccggaccggcgccaatgcggtggccgatggcgcgcccttcggcgatgatctgcccctgagcgtggagggtataacgctccatcacctggccgcgggaacgcacggtttcaggacgcgcctggacgataaacagcttaccggtgtggccatctttcgcccactcgatatccatcggacggccgtagtgcttctcgatctgcaccgcctgcttcgccagctcctgcacctcctcgttgcttaacgagaaaatatcgcgctgcgcctgcggcacatcttcgatacgcacctgtttaccgtgctcctgggtcggcgcgtaaaccatacggatctttttcgaccccatggtgcggcgcacgatcgccggacggccagcggccagcgtcggtttgtggacgtagaattcgtccgggttcaccgcgccctgcaccaccatctcgcccaaaccccacgccgaggtgataaacaccacctggtcaaagccggattcggtatcgatggagaacatgacgccggaggaggccagatcggagcggaccatcctctgcaccccggcggagagcgccacgccgcggtgatcgtaaccctgatgcacgcggtaggagattgcgcgatcgttaaacagcgaagcaaacacgtgcttcacggcaacgagcacggcgtcaaagccctgcacgttgaggaatgtctcttgctgcccggcgaaggaggcgtccggcatatcttccgcggtggcggaagagcgcacggcgaatgaggcctcggcgtcatcggcggacagcaggtcataagcatcgcgaatcgcgttttccagttcgctctggaagggggtatcgatgatccactgtcggatctgcgcgcccgctttcgctaatgcggaaacgtcgtcaatgtcggtttcatccagcagcgcatagatgcgctggttaacaccgctttggtccaggaactgattgaaagcatcagcggtggtggcaaacccgttaggtacggaaacacccataccggacagattcgtaatcatttcaccaagggaggcatttttgcccccaactctgtctacatcattcatgccgagttggttataccaaagcaccagcggtgacgagccattgttggacatcgagacaatccttttgtgatttaataccagtgaaaaaaatttcacgatcgactgcaggattatcctgacatatttatgaagctgaaaaaaacggtgaatcgttcaagcaaattattttttcatttttcggactgttcccccgatattgctaacttgatgatttttaggaattctgatggaaaacgctggaaataacggcgacaaaaagaaaatgaaccacccttttcataaaaaacaaaaatagcgtttcaattttaacaagagacaaatcaaacagggatatgcttaaatttaatatccgctttcaggcaattaaactcattataccggatggtcaaaatggaaagtgctgtagatcgccacgtattttatatttctgacggtaccgccattacggcggaggtgctggggcatgccgtgatgtcgcaattcccggtcgccatcagcagcgtaaccctgccgtttgtggaaaatatcagccgcgcgcgggcggtaaaggagcagatcgacgccatttatcagcaaacgggtattcgcccgctggtgttctactccatcgtcatcccggaaatacgcgacattattctgcaaagtgaaggcttttgtcaggatatcgtacaggcgctggtggccccgctgcagcaggagctcaacctcgacccgacgccggtggcccaccgcacccacggcctcaaccccggcaacctgattaaatacgatgcgcgtatcgccgccatcgattataccctcgcccatgacgatggcatctcgctgcgcaaccttgaccaggcgcaggtgatcctcctcggcgtctcgcgctgcggcaaaacacccaccagtctgtatctcgccatgcagtacggtattcgcgccgccaactatccgtttatcgccgacgatatggacaatctggtgctgccggcctcgctgaaacccctgcagcataagatgttcggcctgaccatcaatccggagcgtctggcggcgatccgcgaggagcgccgggagaacagccgctacgcctcgctgcgccagtgtcggatggaagtgaccgaagtggaggccctgtatcgcaagaataaaatcccctgcctgaacagcaccaactattccgttgaggaaatagcgacaaaaatcatggacatcatggggctgaatcgcagaatgtactaacacactagtacattattaaaaatttgtttatgctatcacccgtggcctatacaggatcatgccctgctcttgcaataagcagggattggtttatcgtgatgcgcatcacttcccggcattttcgccgcggaagaaacagatttttgagaccccaatgaataaaacagacgaattgcgtaccgcgcgcattgagagcctggtaacgcccgcggagctggcccagcgccatcccgtgacggccgacgtggctgcccacgtctcggcctcccgccgccgaattgaaaaaatcctcaacggcgaagaccgccgactgctggtgattatcggcccctgctccattcacgacaccgacgcggcgctggagtatgcccgccgcctgcagaccatgcgcgagcgctatcagccgcagctggagatcgtgatgcgcacctactttgaaaaaccgcgtaccgtggtgggctggaaaggcttaatctccgatccggacctcaacggcagctaccgggtcaaccacggaattgagctggcgcggcgcctgctgctgcaggttaatgagctgggggtaccgacggccaccgagtttctcgatatggtgaccggtcagtttatcgccgatctcatcagctggggggccatcggggcgcgcaccactgaaagccagatccaccgtgaaatggcctcagcgctctcctgcccggttggatttaaaaacggcaccgacggcaatacgcgcatcgcggtggacgccatccgcgcctcccgcgccagccatatgttcctctctccggacaagcaggggcagatgacgatttaccagaccagcggcaacccgtacgggcacatcattatgcgcggcggcaaacggccaaactatcacgccgaggatatcgccgccgccggcgaggcgctgcgtgaattcgatctgccggaacagctggtcgttgatttcagccatggcaactgccagaagcagcaccgccgtcagctggaggtgtgcgccgatatctgtcagcaaattcgcgcgggctccaccgccatcgccgggattatggccgaaagcttcctgcaggaaggcactcagaaagtggtccccggccagccgttgacctggggccagtcgatcaccgacccctgcctgagctgggaagacagcgaaagattattgagcgagctggctgcggccaccgccacccgcctgtaaccgctccgcccgccgcgcctgcggcgggcaattctcttcgctgactcccctaccaaatccggtaacacgataaataacgcttgccgtcaaaaacaacattattgataatgattatcattgttgccttgatttttattctgagagctatgacgcgtatggataacactgccacagctgaaaaaccaaaagacaatgccccttatcccgtggcgacggacagagagatcagcagtcgggttctgttaggcagcgaaggacgagtagtgattgagcatggcggccagcgctatctgctgcgccagacccacgccgggaagttaattctgaccaagtaagcgccccgctgaacgcggggcgaggcaagttagctcgagcagctgacttccagacgtttcccccagtccggcgggcggcggacgtagtcgtcctcgcgatcggtaaaggggtctgccagcgcggcatgcaggcgctccagctcgtccatatcgcccgcctcagcctgctcgatcgcccgctgcgccagccagttacgtaacaccagcgccggattcacgccctgcatcctctgctggcgctgcgcgtcgtccacctgttcatcacgcagccgcgcacgatacccggcaaaccagctgtcaaaggccgcgcggtcgataaactcatcgcgcagcggcgatgcggcgctgagctgttcgctgtggctcagcaggcggaacgtccgggtatagtcgctcttctcgcggatcatcagggcaaacagcccgtccagcaggtcgttatcccctttctgctggctgaacaggccgagtttatcgcgcatccgctggccataagcggtcagcaaggcgtgctgatactcatccagcgccgcgtttaacgcttcagcgctgataaacggcgacagcgattgggcgagacgctgcagattccacagccccaccgccggctggttttcaaaactgtagcgcccctgataatcggagtggttgcagatgaagtccggttggaaatcgtcaaggaagccatacgggccgtagtcgatggtcagaccgagaatcgacatgttgtcggtattcatcaccccatgggcaaagcccacggtttgccagctggcgatagtctgcgcggtacgcatgacaatgtcacggaaccataacaggtacttatccgcctcatcctgcagctgcggccagtggtggcgaataacatagtcggccagttgctggaccttctgcggctcacggcgatagtaaaaatgttcgaaatggccgaagcgcacatggctctcggccacccgcatcagcatcgcgccgggctccacgcgctcgcggtagaccggggtatcgctggtcaccatcgccagggcgcgcgtcgtcgggatccccagagcgtgcatcgcctccgacgccagactttcccggatcgtcgagcgcagcacggcgcggccgtcccccatccgcgaataaggagtcaggccggcgcctttcagatgccagtcgtaacggcggccatccgccagctgctgctcgccgagcaggatcccgcgtccgtcgcccagctggccggcccaggcgccaaactgatggccgctatatacctgcgccagcggcgacatgcccggaagcagcgcttcgccgccccagacaccggccccgctttcaggcgcaaacagggcgtcgggcacccccagctgttgcgccagcggggcgttgcgccagatgagtcgggcgttatccaacggcgttggtgacagggaagtgtaaaagtccggcagttcatcccgccagtgggtggtaaaagaaagggtcatggttcctcctctctccagtgtagtgcctggaacagcggattaacacgggcggagtgcagggttatcggcataaaaaagggaagcgttcgcttccctcttgcttctgaatgacgtcagattcgccgcgcctgccagaactttttgttccagtagacgttgtccagcgaggaacgggtgacgccctggctggtggaggcgtgaataaattggttgtcggtatcgtagatgccaacgtgcaggccgctctcccctgagccggttttgaagaacaccagatcgccgggcagcagatcgcgcttatcgatgcgggtgccgatttccgcctgctcgcgggtttcacgcggcagctggagggcaaatttatcgcgaaacgtgcgcaccacgaagccggagcagtcaacgccgcgcggcgtcatgccgccgtagcgatacggcgcgccgcgccagctgcgcagctgctcgttcagattcgccaccaccgtaatggagtctgccagccgaggattcggcggcggtgcccgatggctgctgcagccggctaaaattaacgccgccgccaacatgaaccagaagcgcatttcagatgatccctctgtccctagtctctttatcgcaataatttagcttgtttatcaataaagtgacaagataactgcgtgctactgtgacgcgatgagcataatatgaccggccacctcaacgcgctggaacgggatcgcataggcagcggttaaattttcctcattcagcacctcggcggtctccccgcaggcgatggcttccccctggcagagcagccagctctgaccggcgtggcgcagggtatggttgagatcgtggctgctcatcaccaccgcaatccccgcagcgctcagctcgtgtaacagccgatccagcgccgcctgctgggccacatccagactgttcatcggctcatccagcagcagcagctgacccgcggaattactcaagggatcgatctgcaggatcactgccgccagccgcacgcgctgccactcgccgcccgacagctgattgaccggacggcccagcttattgtccagaccaagcctggccgcgatatcgctcagacgggcgctatcaccctgctgctgcatatgcagcgccaggtagtgccataccggcatggcgaacggcggggtctggtgttgacacagatatccgcgacggcgcgccagctccctcgccggccactcgtcaagcagccggccgttaaaatgaaccgtgccggggccgtcggacagccccgccatgcgggtcagcagcgtgctcttccctgcgccgttcggccccaccagatggacaatctccccggcgcgaaaggccgcagaaaacggggccaggcgccccgccgcttctacatcctgtagctgcatcagaaacgacattattgcgccagcgctcctttaatcgccgccaccagctgcggatcgtccggcgtcatatccggagagaagcgctgaatgacgttgccctggcgatcgacgaggaatttttcgaagttccacagaatgtcgtccacatacagcggtgcccggcctttgctggccatccgctcataaaaaccgctgccttccggggccaccgctttcggcgcggcggcaatcagtttttgatagagcggcgcgcgatgttcaccgttgacgtcaattttgctaaacagcgggaaggtgacgccgtaggtagtgctgcagaaggtcttaatctcctcttcactgcccggctcctggccgaggaactggttgcaggggaaccccagcacgctgaagccctcggcggcaaactgcttttgtagatcctcgagttgctcatactgcggcgtcaggccgcatttcgaggctacattgacgatcagcagcaccttgccggcaaaggatgccagggtggttttctcgccatcaatggtcgtcacttcggtattcagaatgtcatgttgcatagcctgtcctcaatggataaaccggtttccggtgaaggtgatccctttctactgtagcggattcagcgcccgccattctactgccattccccccgagttgtcgcatgatgtaacagcgcttcgctggccgccggcaacatgaaatcctctcaattgggccgtcgaccatttccgtgtacagtgttccatgaatgtaatatggtttcgttaattgttaatttaagagagttttagtgatgaagaagttgtttagcctggcgttaatcgccacctctgtcgccctgctgagcgcctgctccccggatgaagataataaagtaaaagtcgctatcaataccgggccggacgaagccatctggaaagtggtggagcaggtggcgaaggataaataccacctcgacgtcgaagtggtctccttcaatgattatgtgctgcccaacgaagcgctgaacaacaaagatgtcgatgccaacgccttccagaccctgccgtaccttgaggcgcagtcgaaagaacgcggctataaatttgcggtggtcggtaaaacctttgtcttccctatcgccgcctattctcaccggatcaaaaatatcagcgaactgcccgaaggggcgacggtgaccatctctaatgaaaccaccaccctgggccgcagcctgctgctgcttcaggcgcaggggttactcaagctgaaaccgggcgtcggctatttacccaccacgctggatatcatcgacaatccgaaacagctgaaaattgttgaagtggataccccgcagctgacccgtacccttgacgatccgaacgtcagcctgtcaatcattaacaccaacttctccgcccaggcgggcctgtcggccgcccgcgacggtctgtttatggaggggccggattccccatacgtgaatgcgatagtcgcccgcgaggataataaggacagcaagaaaattcaggaattaaaagccgccttccagaccagcgaagtcgcggaaaaagcgaaggaagtctacaaaggcgacgcgatcaaaggctggtaagcctgaaccggcgccgtccctgccgacggcgccgcgctatccccgcccccgcgaacgcagcagcaaccagataaagaccggcgcgcccagggtcgccgtcaccacgccaatcggcagctctgcggcggaaagcgccagccgggcaatgatatccgcccccagcaaggcgcttgccccggccagcatacaggccgggagcaacacccggtgatcgctcaagccgcatagccgcagaatatgcgggatcaccagaccgataaagccaatcgcccccgccagcgccacgctaacgccgaccatccagccggtcgccaccaccagtaatttgcgccacagccacagcggcagcccaagctgacgagcggagacttcgcccagcgccagtaaattcaggggttgcgactgcagacagacccagcagagcaccggcaggagggctatcatcagccacagctgttgccagtcgacgccgccaaacccgcccatcatccagtacattagctgacgcaggtcaaaagaggtggagaagtagactgcccaggtcatcagggcgctgcagatgatccccagcgccacccccgccagcagcagacggctggtagacagatggcggcgggcgaaacgcagcagaataaaagtgatcagcagcgcgccaaagatggcacacaggccgagcgcccagccgggcaagactcctttgcccagcaggacggcggcaatcagcccgacgcccgcgccgttggagacccccagcagccccggctccgccagcggattttcaaacaacgcctgcataatcgccccggagagcgccagcgccgcccccaccagcagcaccgccagggttcgcggcaggcggatctgccagataaacagctgacctttggcgctgagccactcgccgggcgggatccattgctcccccgcgcacaggctgatcagcagggtgaccagcagcaacagcgttaatccgaagagccaacgccggctgcggcgctgttgaagatgggcgagagtcagcatagattccattacgcagtgggaacaagaggctgattttacggtggctgtcgcggtgagaaaaggaaaacctcacgaccaaacgtcgacgcggaggaggctcccccgcgtcgaccatcccgctttacaccagaatctgaaacagcagcgcaaagagaatgatgttcgccaccacgattgcccagccgttatagagcatatatttcagatgagtagactgcgccagccccatctggccgaacatatctgatgagggaaacggcccgaaccagtccacctgggatgaggccagcagcacggcggtggtcccctggggcggcacgccggcggccatcagcatcgggccaaagattttatgagtaaaggtcatctgggccaccgccgcaccgggcacatggccgataatattgaacgcgaagatgctaaagcacagccaggccggggagatcccctccagcagcggttgggtatactccagcagcccctgataggcgtgcaggccatccatcagctcaaggatcgggttgtacagccagtagagaataaacatccacaccagacggccgcagccgtgatacagggcctgaaggatctgcgtcggtcgcaggccgcctaccaggccggtcatcagggccaccagcaacatcacgattatcgcgaagctgaagccggctttaatcaccacgccaacgatcgccatcacgatgatggtcgccgcgaaggccagcgcgcttaatttacgccgacgctgctgcgcggcgctgagatcctcttgcggcttttccgcgagatcgacgtcatagcgcagtttgccttcggtcatcttctggatccgtcccgccattacccagccggccagcagcgtgaccgcgctcatcggcagaccaacgtacagcagatagtccggatagctcaacccaccgaggctgaggatcgtcacggtgctgggggtgaaaggcccggtaaacagcccaacggaaccggcggtcatcatcagcgcggcgaccgttggcggcgtcaagcgtaccgctgccgccaccggaatgattactgccacgataatggcattgccaccggccatagtgcccagcgaaccgcaaattaaaatcgatgacgccacaatgccgaatttcacccgcgtctgactcgacaacccgatgcgatggacgacaaattttaccagctcaaccgctgcgccggtgcgggtggccacttcccccacgccggcgccgagcataatgataagcccaacggtggcaataaatgacccggtggatttcgccagcatcgtgcccatttccggcaggccggtcgaggtcattatcatggcgataataatcgaggagatgaccgccagcacaatatcaacgccgatcagcgataatatcgctagcgccaccagcggcgtaaatcccagcaggccaagctcactgcctggtcgaccgtggcaccacagcgcgatcaacacgaacagcagcaataacagaccaataataacgtttttccgcgtgatatttcgtctgacaggcgcattgcctgtgagcgttgagtcactcataacactccttaatgccaatcaatccgaccatgatggtcagatggtgtatgggggcctgctcagaaaatatcctccctctttttcattattgattggccgcggcctgagggtttgtttgggtacaaaggaaacgattctgagagcgtaatatgccgccattgggcggggtctacagcacaagatgtaaccaatgcgctgattggtgattaaatctatgttaacttagtgttagtagaaaatgactttttatcggtaggctataaccctgagttaactgttcatgaaactgcgtcatctggaaatcttctatgccgtcatgacctgcggctctttatcgcgggcggcggaagcgctcaatatctcccagcccgcggccagcaaagcgttaaaaagcgccgaaatgaagctgggttttaccctgtttcagcgggtgcgcggcaagctactgccgaccagcgaggcgatcacacttttcgaaaaagcgcagagcatttatcaggacctggacaacctgcgcctgctggccgacaacctggctcgcgatccgcgcgccaagatcactttaggctgtctgccaagcctggggttaagcctggtgccggagctggtgaccgacttttatcagcaaaacagcaacctggtgatgacgctcactaccgagcacaccgagacgctggtcaaaaaactggatttgcgcgagatagatttggcgctgacgctacagccggtgcagcagggggagatcctgaccaccctgattgccgaagtaccgctggtgtacatcgaccgtcattatcgtcagggggcggtggagatcgatcagatcgaccagcagcgctggatctcgccgggaccgcactcgctctctgccgccatcgccacccgtcgcgacttttccaccacccggctaaacgtccagacctactatatggccaccgagttcgtgaagcgcggcatgggctgcagcatcactgatatcttctccgcccagcacaatctggccccggagatgatccatcccattacgccgccgatggcgattaacctctgtctgttacgccgggccgacgtttccctgagcccgatggcgcaaaagttcgtcgattttctctgccagcgtctgcgccagcagctcaaggagattaacctgcggttataccctgaccataaaaagtcaattgcgccgctggggtaaatgctttgacataacccgataaatttatcagcggtggatatatcgggttatgaacaaacgcattgtcattatcggcggcggcgtggtcggtctggccacggcatgggaactgatcaagcgcggccatcaggtgcaattactggagcgcaatgccgaaccgggcagcgccaccagttttgccaacggcggacaattaagttaccgctacgtcgccccccttgccgacagcggcgttcccctgcagggaatgaaatggatgggcaaagccgattcgccgctgaatatgcgtctcaggatgtctctccagcagtggcgctggctgctgcagtttctgcgcgcctgtaataaccagaccaataaaatgaatggcgaccatattttacgcctgtcgctgctcagccgtcaggtcatgcaggcgtggcgggatgaggataatcttgccgatttccactggcggcgcagcggaaaattaattatccatcgtcgcgaatatgattttaataaagcagcaaaagggattgatcctcagtatcagcaggcgctgaatgctgaagcctgcctgcagctggagccggcgctcaaacatattagtccttctctgcagggcggaatctattcgccaggcgatgaaacggcagattgtcatcagttctgccttgccctgctcgacaagctcaatgccagcagcgactttagcctgctgacccagtgtgaggtgcggcgactccataagcgcgggggacgcatcagcagcctggagaccagtcaggggaccctcaccggcgatgagtatgtcgtcgccgccggtaacggcagtggttctctgcttgggcatctgggggttcgcgtgccgctgtgcgccctgaaggggtacagcctgaccctgccctatcctgaaaaagcaggtattgcccctgacatcagcgtcaccgactacgggcacaaaatcgtttatgcccgccttggccaacagctgcgtatcgcggcgatggtggacatcggctacgacggcgacgaactgcgcgaaagccgcattcaggcgctgaaaaacatcgtcgcccgcagctttcctgaactggaggggctggacgaggccgaagtctggaccggcatgcgcccgtcaacgccagccggcccgccgatgctggggcgcgccggctaccccaacctgtggatgaacctcggccagggtagcctcggctttactctcgccgccggcagcgcggtggtgctgggcgcgttaatcgacaatcagatgccagacatttctttagaaggtctcacatggaaacaaaccgcatgacaattattcgtaataatccacaacctcgtcttgccgccagcgttgcgtatggcgatctgctgttcctctccgggcagacgccaaaaagcaatgaagacgatatcgttttacaaacccgtgaagtactggagaagatcgacgcgctgctggccgcagccgggagcgataagcagcacattctctccgcgcagatctggttgaaaaatatcgagcgtgactttgccgcattcaatgaggtgtgggtgcaatggatgccggaaggctatagcccggcgcgagcggccgtgcaggcggagatggcgcgaccagaaatcctggtggagatcatgctcaccgccgtcaaagcgtaaagattgacagaaaagaaaaaggccgcaatgcggcctttttaattagttcagattatttgtctttcggcgacgcgttttcgacacggcttttcagcttctgaccgggtctgaaggtcaccacgcgccgggctgtaatgggaatatcctcccccgtcttcgggttacgtcccgggcgttggtttttatcccgcaaatcgaagttgccgaacccggagagtttgacctgttctccgttttccagagcacgacggagctcttcgaaaaacaactcgaccagttctttggcatcccgcttgctaagcccaagcttatcaaacagatattctgacatttcagcttttgtaagcgccataggttcaatccctcaatgatgcctggaatcgctcttttaatgcctctacacatctggcaacggtagcggcaatctcctcttcttcgagtgtacggctggtatcctgcaggatcaggctaatcgcaaggctcttatacccttccgccacacccttaccacggtacacgtcaaataagtttacgccaactacctgatttacgccaactttcttacattcggctaaaacatcggcggcagccacgttttccgcgaccagcaccgcgatgtcgcgacggttcgccgggaagcgggaaatatcgcgcgcctgaggcaccacgcggtctgcgagcttgttccactccagttcgaacaccagagtgcgaccgttcagatccagtttacgttccagctcaggatgaacaaccccaatgaaaccaatgcgttcacctttaagataaatcgctgcggattgtcccggatgcagcgcggtggtcgcttcagcacggaattcgatatccgctaattttccggttaaatccagaacggcttccagatcgcctttcagatcatagaaatcgaccgtctctttcgccagtgtccagtgctcttcgtagcggttgccgcagatcgccccggccagcatcacatcctgacgaatgcccagcggcgcattggtgtccggcacaaagcgcaggccgctctcaaagatgcgcacccggctctgctgacggttctggttgtagaccacggtgcccagcaggccggtccacagcgacaggcgcatcgccgacatttcgctggagatcgggcttggcaggatcagcgcctcttccccggcgtggatcagctgctggactttcgggtcgacgaagctgtaggtgagcacttcctgatagcctttgtcgttcagcagcgttttcacgcgcttcagcgacaggtccgcttcgcggtgggttcccatgatcagacccgcctgcaccggctcgtcaggaatgttgttgtagccgtaaacgcgagccacttcttcaaccagatcttcttcgatctccatgtcgaaacgccagctcggcgcaaccgcctgccattcgccctcgccaaccgtcacttcgcagccgaggcgctgcagaatgtcggtgacctgcgcgtcagcgatatggtggccaatcaggcgatccagcttgctgcgacgcagcgtaatggtggcgcgtgttggtagattctctttgctggtaacgtcaatgaccgggccggcttcaccgccgcagaggtcgatcagcagacgggttgcacgctccagcgctttatactgcagggccggatcgacgccgcgttcatagcggtgagaggcatcggtgtgcaggccatgacggcgcgcgcggccggtaatggacagcgggctgaagaacgcgcattccagcagcacgttctgggtttcgtcgttaacgccggagtgttccccgccgaagatcccccccatcgccagcgctttgttatggtctgcaatgaccagcgtatcgctgtcgagctttgcttcagagccatcgagcaggaccagggtttccccttctttcgccatgcgcaccacgatcccgccttcaatacggtcgcggtcaaaggcgtgcatcggctggcccagctcaagcagcacatagttggtcacgtcaaccaccgcgtcgatggagcggatcccgcagcggcgcagcttctctttcatccacagcggcgtcggcgctttgacgttgatacctttcaccacgcgccccagatagcgcgggcaagcctgcggcgcgtcaacctgaatcggcagcacgtcgtcaatcgtcgcggcaaccggcgtgatttccggcgcgttcagcggcgctttgttcaggacagcgacatcgcgcgccacgccaatgatgcccaggcagtcggcgcggtttggcgtgacgctgatttcgatggtgttatcgtcaagcttgaggtattcgcgaatatcggtgccgatgggcgcatctgccggcagctcgatgataccgctatggtcgtcggaaatacccagctcggagaaggagcacagcatcccctcagacggctcgccgcgcagcttcgcggccttgattttgaaatcgcccggcagcacggcgccgatggtggctaccgcgacctttagcccctgacggcagtttggcgcgccgcagacgatgtccagcaggcgttcgccgccgacgttgactttggtgacgcgcagtttgtcggcgttcgggtgctgaccgcactccaccacttccccgactacgacgccgttgaagctgccggcgaccggctcaacgccatctacttcgaggcccgccatggtgatctgatcggaaagcgcttcgctgtcgatcgccgggttaacccattcgcgtaaccacagttcactgaatttcattgttctgtcctgcccttatttaaactgtttgaggaaacgcagatcgttttcgaagaacgcgcgcagatcggtgacgccatagcgcagcatggtcagacgctccatgcccatgccgaaggcgaagccggagtagacttccggatcgatacccacgttacgcagcacgttcgggtgcaccatcccgcagcccagcacttccagccatttgccgtttttacccatcacgtcaacttccgcagacggttcggtgaacgggaagtaggacggacggaagcggacctgcagatcttcttcaaagaagttgttcaggaagtcgtgcagcgtccctttcaggttggtgaagctgatatttttatcaacgatcagaccttccatctgatggaacatcggggtgtgggtctgatcgtagtcgttacgatagacgcggcccggcgcgataatacggataggcggctgctggttttccatggtgcggatctgcacgccggaggtctgcgtacgcagcaggcgagtggcatcgaaccagaaagtgtcgtggtcagcgcgcgccggatggtgacccggaatattcagcgcatcgaagttgtggtaatcgtcttcgatttccgggcccgtcgccacggtaaagccgagctcaccgaagaaactttcaatacggtcgatggtgcgagtaaccggatgcaggccgccgttttcaatgcggcgacccggcagcgagacgtcaatggtctctgcggccagacgcgcattcagcgctgcgccttccagttcagctttacgcgcgttcagcgcctgctgcacctgctctttcgcctcgttgatgaccgcaccggctgccggacgctcttccggcggcagctcacgcagggtggtcatttgcagggtcagatgcccttttttacccaggtattccacgcggacgttgtccagcgcagcaacatctgatgcctcgttaatggctgccttggcactggcaaccagctctgcgagatgtgacatggttttcctcattatgtcggtgcagacaccggttatagtgaaattaatattccgaatccatatacgaaaaaagcctccacaggggaggctttctggcgctgttttccgtttcttctttcacgcgcaagccccctgagttcaggtgctaaagtaaaaaaagaagcggaaaatagcagcattcatgcttgcattaccttgtctggtaagaaacgtcagagctgtattgaaaagcctgcgccgataaaagtcaatgtattgatggtgttgaaacgaaaagagggagacaagctccctctttcaactggcttatgccagagctgctttcgctttttcgaccagagcggtgaacgctactttgtcgaatacagcgatgtcagccaggatcttacggtcgatttcaacagaggcttttttcaggccattgatgaatttgctgtaagaaataccgttctgacgtgctgctgcgttgatacgtgcaatccacagttgacggaactgacgtttacgttgacgacggtcacggtaagcgtactgaccagctttgataacagcctggaaggcaacgcggtatacgcgagaacgcgcaccgtagtagcctttagcttgtttcaaaattttcttgtgacgtgcacgtgcaattacaccacgttttacgcgagccatgtgtgctctcctgtatctattctaagttaaaaaagttaaacgttaacgacttatgcgtacggcaggcacgcgataaccaggcccagatcgcctttggaaaccatggctttcggacgcaggtgacgtttacgcttggtagcttttttagtcagaatgtgacgcaggttagcgtgcttgtgcttaaaaccacctttaccggtttttttgaagcgcttagcagcaccgcgtacggtcttaatttttggcattttaataacttccacttcgcattgttaataaacgaaacaaaggcgaacaaaaccagtgagccgaagcccaccggaaatgtttcttgatggccttactgtttcttcttaggagcgagcaccatgatcatctggcggccttcgatcttcgttgggaaggattcgactactgccagttcaaccagatcgtctttcacgcggttaagcacttccataccgatctgctggtgggccatctcacgaccgcggaaacgcagcgtgatcttggccttatcgccatcttcgagaaagcgaatcaggctgcggagttttacctgatagtcaccttcatcagtaccagggcggaatttaatttccttaacctggataactttctgcttcttcttctgttccttagaagacttactcttttcataaaggaacttgccgtagtccatgatacgacaaactggcggctcggcgttagggctgatttcaactaaatctactccagcctcttcagccttttcgatagcttctctcagactcacaattcccagctgctcaccttccagacctgttaagcgaacttcctgggcgcgaatctcgccattaatacgattcggacgtgccgtttgaactcgttttccgcctttaataccttattcctccagttgttgaagactgcggctgcgaatctcttgttgcagcttctcgatcacttcatttacgtccatgctgccgaggtctttcccgcgacgggtgcgcacggccactttgccggcttcgacttctttgtcgccacagaccaacatatacgggacacgacgtaaagtgtgctcgcggattttaaagccaatcttctcatttctcaagtctgcttttacacgaatgcccgcattttgtagtttacgcgtcaattcgttaacgtattcagcctgagaatcggtaatattcatgaccactacctgcactggtgcaatccaggttgggaagaagcctgcgaactcttcggtcaggatgccaatgaagcgctccagagaaccgagaatcgcacggtgaatcatgaccggcacctgacgctcgttgttttcgcccacataggaggcgcttaaacgctgcggcagagagaagtccagctgtacggtaccgcactgccatgcacgatcgaggcagtcatacagggtaaattcaattttcgggccgtagaacgccccttcacccagttgatattcaaatgggatgttattttcttccagcgccaccgccagatccgcttccgcgcgatcccaggtctcgtcgctaccgatacgtttttccgggcgagtcgacagtttgacgacgatcttctcgaagccaaaggtgctatacatatcgtagaccatacgaatacaggcgttcacttcatcgcgaacctgatcttcagtacagaagatatgcgcatcatcctgggtaaagccgcgaacgcgcatcagaccatgcagcgcgccagacggttcgttacggtggcagctaccgaattccgccatacgcagcggcaggtcgcggtaggatttcagcccctggttgaagatctgcacgtgacccgggcagttcatcggcttgatacagtattcacggttctcagaagaggtggtgaacatcgcatctttgtagttgtcccagtggccggttttttcccacagcacacggtccatcatgaacggaccttttacttcctgatactggtactctttcagtttagaacgaacaaacgtttccagttcacggaagatggtccagccgtcattgtgccagaacaccatccccggcgcctcttcctgcatgtgatacaggtcgagctgcttaccgattttacggtggtcacgcttggcggcttcttccagacgctgcaggtaggcattcagcgcttttttatctgcccacgcggtgccgtagatacgctgcaacattttattgttgctgtcgccgcgccagtaggctccggcggttttcatcagcttaaagtgatggcagaagcgcatgttcggtacgtgcggaccgcggcacatatcgatatattcttcatgatgatacaggccaggcttgtcatcatgggcaatgttttcatcaagaatagaaactttatagctttcgccgcgtttcacgaaggtttcacgcgcttcatgccagctcactttcttcttgataacgtcgtagtttttctcggcgagctcatgcatacgtttttcgagcgcgtcgatatcttcctgggtcagggtgtggtcgaggtctacgtcatagtagaaaccattatcgacaaccggaccgatagccattttggtgttgggccacagctgtttgatggcatggcctaacaggtgcgcgcaggagtgacgaatgatctccagcccttcttcatctttcgcggtgatgatagagagagtggaatcggattcgatcgggtcacaggcgtctaccagttcaccgtttacccgcccggcaatggtggctttcgccaggcctggaccgatatccagcgcgacatccatcggactaactgcgtggtcaaaatggcgttggctgccatcaggaagcgtaattacaggcattttatgtccttatttgcagtggtgccccgcacgaaagagcacatacaaaactatataatcataattatcatcaggttaaggcgcagttcccgcttcactctgcgaaaataggagcacgaccggaacgatcgctcccccctgcagccgcctgctgataacaccggggagtagtttacacatcattggtacgtgattaaagccgcaacagcataaatgatggcggaatgcggagaaaacaagaggtccacggataaaaagcagaatataagcgatgtggcgcggtaatattggccaatggcgccggacgatattattcggatatgataaaagagacgtggagatattgcctgctgaatgtataccgcgggccattaaaccggtaccacttaacccggcttattagaccgctcgcgaaacgatagcctgcaatattaagaccactcgccggcaaccagcgtatgcacattaaaggcgtcgttcatggattttccggtggtaggggcgccgggcgcaatattcgaaccagcctcaacgtcagaggctttggcgatacctacctgggtatgatcctgatgacccgatggcggaacgggcgtggcggctgatgcgccaaaagaaagcacgcacagcgccagggctgcgatggtataacgattgtttttcatgatgttaattctcttattacggaaaacagaccgggcaatgtcgccctccggtcagtggttgttagtatagatccagatcacatatttgtccgtcgaatatttagctatttgtgtcaaatagaatgaatatttgtcaggcgctcgtgaataatggagaaaaaatggagggctatttcctttttacaaaaagtaaaacgaacggccagaaaaaataatatcactaattgctaaaaccaaaacgaacaggccggggaaaacccggcctgaaatattacatcttatacccgagggagagcgaggtccggcgatcggtatgctccggcgcggacgcaggcggctcagagttccaggtcacgttgtaggcgaccttcagggcgaaatgggcgttaatcgccacgtttaacgcgctctctgagttgaccgtggtgtcctcggcgccgaacaccgataccccttgcgaaaatttggcgttatcggtcatctgccaggcccaggtacccgaagcataacccagcggttgggtatcagtatccccgtcggtatattcgtcatagcgaacgccaggaccgaattcaaaccgcagactgtgcaccggcccgttgaggatctgacgaccatagcccgccgtcacaacatcgcgctgttgatagccgttgtagcggtcagttagccagctaccctgaccaaaaacatagttcatatcggtcaggttgtagcggctacgtccgccgactgcatatttttctgaggatcgctcatcattggacgacgtgttgctggcgttgccccacagcgaccaggcggtggtattaccataccaggtcagggtggaatccgccgtcatcgaagagctcttggtgttgccggactgcgccaggtagcctgcgttaaccaccccttcgaacggttttttggcagcggaagggtcatccctgacggtaaatacagaatcatcggccattgcgccaacagacgcaaaaagcccccccgccagcataaccgctgcgggtactgtctttaaaagcttcattataactctctaaaatacatttttttaggacagtacaaatgatgaacaggcataatctcgccggctcattgaatttagcgtccgtacaacataaaagagacctgagggtcccggaaactttcgcgaggatcgcggagtgcaggtcctaagaaaggtagcaaattataaaaaagcacgaataacatagcaatcacttactctttcgttttttgaataagacagctccggaaacaatctttatttcataatgaaaatagaggcatctttgcaaaactgtcaggaactggactttccctccccgagtcatcgtgccatgcttaaaataacgacagtcgccgtattaaggaggagaaggaatgaccaaaatttacacgctcacgctggccccctcgctggatagcgccacgcaaaccccacagatctacccggaaggcaaacttcgctgcagcgcgccggtatttgaacctggcggcggcgggatcaacgtggcccgcgccgtgacctttctcggcggcaaagccaccgccatttttccagtcggtggcgctaccggcgagcatcttgccgccctgctggccgatgagcaggtgccggttgagaccgtcgaaacccgcgactggacgcggcaaaacctgcacgtccacgtggccgccagcggcgaacagtatcgcttcgttatgcccggcgcggcactggcggacgatgaattccgccgtctggaagagaaggttctgactatcgaacccggctctctgctggtggtcagcggcagcctgccgccaggtattagcgtcgataatctgatgcagctggtgaaaaatgcgcaacagcagggactgcgctgcatcattgacagttccggcgatgcgctggccgccgcgctggacgtcggcaatattgagctggtaaaaccgaaccagaaagagcttagcgccctcgtgcagcgcgatctcagccaacccgatgacgtgcgccttgccgctcagtcgttgatccagtccggtaaagtgcgccgggtggtggtctccctgggtccgcagggggcattaggcgtggacgccagcggcagcgttcaggtagtgccgccaccgatgaaaagccagagcaccgtcggcgctggcgacagcatggtgggcgccatgaccttgcgtctggcggaaaacgccagccttgaagacatggtacgctttggcgtcgccgccggtagcgccgcgaccatcaaccagggcacccgcctctgctcgcgggccaatacgcaaaaaatctatgattatctctgcgggcgttgatcttccctgccccctccgcgccggcggaggggaatcacaatataagcaggatggtctatgctggaaaggccatcataacaacggggtgtagagatgagcaatgagattaccgcctgggtcgtcagcgtgaccttccatgaacaggcgctgacggagatcaatgaggtcagcaaccattttacccgtgccgggtttgtactgacgctcaatgatgaagagggcacgccccatgagctgggtaccaacaccttcggcctgctgagcggccagacggccgaggaagttaaggccctcagcgctggcctggcggaagcggcccttggccgcccggcggaaatcgctgtggccacattcgccgagtggttaaaagctcaataagtgcgtttagcgcaacggaaagcgtcagttgtgcgtcagttccaggtttacccggtagtaatgcgctaaccttatgatatggtggaaaacatggggagagacagcatgtggcaagcaatcagtactcttttacgcgattggcataccgaagacgctgaaatcgaactgaaaaccgagctgcccggtggagagatccattccgcctggcatttacgcttcggcgggaaagattacttcgtgaaatgcgacgaacgggaacttctgcctatcttcaccgccgagtccgatcagctggagctgctgtcgcgaagcaaaaccgttcgcgtaccgcaggtctttgccgtcggcagcgatcgcgactatagcttcgtggtcatggagtacctccctccccgtccgctggatgcgcacaatgcgtttctgcttggccagcagctagcccacctccatcagtggagcgatcagccgcagttcggtctggattttgataacgatctttccaccacgccgcagcccaacgcctggcagcgtcgctggtcggttttttttgccgagcagcgtatcggctggcagctggagctcgcggcggagaagggattgcactttggcgatatcgataccttagtcgatatggtacagcagcgactggccaaccatcagccgcagccttcgctgctgcacggggatctgtggtccggcaactgcgccttagggccggatggcccctatatattcgatcccgcctgctactggggcgaccgcgagtgcgatttagccatgctgccgatgcatccggaacagcccccgcaaatctatgacggctatcagtccgtttcgcctctgccgtcgggttttctcgatcgtcagccgatttatcagctttatactctgctgaacagagcgattttgtttggcggccagcacctggtaacggcccagcaggcgctggatgatgtattgatggagaaaatgcgttaaacaagcttcacggcggaccttgccggtccgccgcagcgttttatcagttaatctcgacgccgttcaggcggaatttgatggtcatcgttacgccggtacccggtcttccctgctcataacgccatctgcgcatcgcgcttttcacctcgcgttcgaacatattcgccggctgagcagagaggatctgcagattatcaatgcggccatcaggcgaaacgtcaaacttcacccgtaccgtcccttcaatgcgcagcgcctgagcgcgcgccggataggacggctgaacgcggctgatcgcccgcgggccgctcggagcagtaacggtgggtttagccgctgctgtcgaggtgcttggcgctgtacgcgccggcgccgtattgttgttttcaaacggcgaggccggacgcggctctgctgccggcttcacttcccgcttcggctgttcaacctttttctccggcttaggcttaggcttgggtttaggtttgggcttcggcttaggttccggtttatggatcaccaccggcgcctctttcggcggttcaggcactacctctggctccggctcaggttcgggttcaacaacgggctccacgacaggctgcgccgccggaggcggctcaagatcggccggcgccaccattgtgatctctatcggctgcgtcggagaaggctgttcaataacctgatgtaccgaggtataaagcagccccgccacaacggcaccgtggatagccacggacagcagcgttggccacggaaagcggcgaggtaaatcaagggtcattgcgctcatagtcgtttctgttgaaaaatgatgctccgattttaaatgcaaatagcaatcatattcaataaggcgtcttaacctgagtcaatttttgccgccatttgcagaaaaaagctgcgtcggcagtgctttccactccagagcgcatctttgcattgcagtccatcgctgtttaacttaacgtaattcgcctgattattgataaggagctttgccgtgctttacgttatctacgctgaagatatcgccgattctctggaaaagcggctgtcggttcgccccgcgcatctcgcgcgtttacaactcttacacgatgaaggccgactgcttaccgccgggccaatgccggccgttgacagtaacgaaccgggcgcagcaggattcagcggctcaacggtgattgccgagtttgaatcgctggaagcggcccaggcctgggccaatgacgatccgtatatcgccgccggggtttaccgccaggtctctgttaagccatacaaaaaggttttttgaaaataccctttcctttttctggctaaccacaaaaacacccaggtcatcagaatgaagggcgcattttggtacacgacattgaagtgtcgccctttttaacctcgcgaaagcgttgactgttatccgcctgagaagcctggaagatgagcacgcactttctcctgctaccccatcatcgaccatcgcctcgcttttttcggcaatggaaaatgctgacaaaacatcgacgccgcgcgtgatagtgaattactaataccttgtgtaaggctgttagggaggatcgcgttgttatttagcgcttgcatttaatgtcagcacatcctgatatagccctataaatctacagtgcaatagaatgaaaaaaataactgaaagatagttgcttaacgacagatatgaaagcccgaaaaaaatattattgggcatccactgcggatgccgcggaaccgaacgtagcccatcttgctatattcaggaccgtagccgcttgaaagcacgtggaaataacccccttgtagacaaaggattacctggcaggcataaagggatattaactacgctgccagcgttaagttgctgagcatcatttttaaagcctattaatttcgttgcgtaaacttcacgcagagtgatagtaggggcatcactgcttgattaaaaaatttgaaagggaataacaaatgttttcaataagccctgtatttttttgggctaacatttatgtacctgccgattttgaggattattgtgtgaataccctgaaaaaaaccgcattgctttctgtacttgccttatatattcctgtgtcgcaagccgcggctaaggaatacagtcttgatccacagcatacctcggttgtgatctcctggaaccatttcggcttctcaaaccctaccgcctatatctctgatgtttcagggaaactggcctttgataaagagaatccggagaaatcctcggtgaacgtcacgctgccagtgaaaaccattgacgctcacgtcaaggcgttaacggatgagtttttaggcaaagagtattttgatgttaaaacgtttcccgaagccactttccagagtaccaaagtggaaagcaaaggcgacaataaatatgatgtggaaggtaatttgacccttaaaggcatcaccaaaccggtggtcctgcatgccgtcctgaataagcaggatatgcacccaatggtgaaaaaagaggccattggatttgatgccaccggtgtgataaaacgttcagactttaagcttgataaatatgtgccggcggtaagtgataacgtcaccatcacgttatccacggaagcttatgcaaaataagtaaaagctggcgcaacgattgctttttattcaggatgcttattgcatggcctctctggataatataacaggctcagattattcatggtcaggatcggtcggttcatttagcttcaacgcgctggaccgcttaataacccccttgcctgtctgagtctgttttctcattccctcagctcccgcctggttaccgcagctggccggtcatatcattaagcatttaacagcgccatgcccttcctgagcggcaataaaccctgagcggcaataaatgctatctgacggttaattcctgtcgcgccgcaaacgacttggctctggatcttgtcgtccgtcattacaagccaggcgtagcatctctctttcactgaggcgggagctctgttttgtcgtcgcatcgcagcatgaaaaaccatcattgccctatggagatgtgcaacgggaatttagcgcagagagaaaaacgacaacggcaccgcgtacggtgccgtttgcctgctcgcttagctgtcagggaagataaacagcagggcatgacgctgccgtttcaccagccccttcctgatagcgaggatccgcatattgcggcgcgattgggcttccagccagcgcgctttacggcgattcacctgtctcagcatgcgccagcgccctacttccgttctactacgcttcattgcaacgactctacgagtgaaaacagcccccattataaacctctgccagcaactgactaccgctttcgctgcgtttttatttgccagaaaaatactgatgcgtaaactcatcacatatcgtcattcaaaaggattttacatctatgacaaccttttacacggtggtgaactggctggtcattctggggtactggctgttgatcgccggtgtaacattacgaattctaatgaaacgccgcgctgtcccgtccgccatggcatggttgctgatcatttatatcctgccgctggtggggattatcgcctatctctcctttggcgaactgcatctcggcaagcgtcgggccgagcgcgccagggcgatgtggccctccacggccaaatggctaaacgacctcaaagcctgcaaacatatcttcgcggaagataacagcccggtggccgaatccctgttcaagctgtgtgaacggcgtcagggcattggcggcgtaaaaggcaaccagctacagctgctgacggaatctgacgacgtgatgcaggccctgatccgcgatattcagctggcccgtcacaatatagagatggtcttttatatctggcagcccggcggcatggccgacagcgtcgctgaatcgctgatggccgccgctcgccgcggagttcactgtcggctaatgctcgactccgcgggcagcgtggcctttttccgcagcccatgggcggcgatgatgcgtaacgccggtattgaagtcgtcgaagctcttaaggttaacctgatgcgcgtgttcctgcgccggatggacctgcgtcagcatcgtaaaatggtgatgatcgataactatatcgcctacaccggcagcatgaatatggtcgatccgcgctactttaaacaggactcaggagtcggacagtggattgatctgatggcgcgaatggaaggcccggtggcgacctcgatgggcatcgtctactcctgcgactgggaaatagagactggcaagcgcattctgccgccgcccccggacgtcaatatcatgccgttcgaagaggccagcggacatactattcacacgatcgcctccggaccgggctttccggaagatctgattcatcaggctctcctcaccgccgcctatgcggcgaaagagcatctgatcatgaccaccccctacttcgtacccagcgacgacctgctgcatgcgatctgtaccgccgcccagcgcggcgttgacgtgagcattattttaccgcgcaagaacgattcgctgctggtaggctgggccagccgggccttcttcaccgagctgctggcggccggggtcaaaatctatcagtttgagggcggactgttgcataccaagagcgtgctggtcgatggcgagctaagtctggtggggaccgtcaacctggatatgcgcagcctgtggctcaacttcgagattaccctggtcatcgatgacgccggtttcggcagcgatctggcggcggttcaggatgattatatctcgcgctcgcgcctgctggatgcccgtctctggttaaaacgtccgctgtggcagcggatcgccgagcgactgttttacttcttcagcccgttgctgtaaaacgtgcccatcagataccgaatgagtagcaatcatggatatggatttaaacaaccgcctgaccgaagacgaaacgctcgagcaggcttacgatatcttcctcgaactggcggccgacaatctcgacccggcggacatcattctgtttaacctgcagtttgaggagcgcggcggcgccgaactgttcgacccttcggcagactgggaagagcatgtggattacgatctcaacccggatttcttcgccgaagtggtgattggtctggcggataccgacggcggggaaatcaatgatatcttcgcccgcgttctgctgtgccgcgagaaagatcataagctgtgccatattctgtggcgtgaataacctttaacatccagtaaaaagcctgccgcggttctcccggcaggctttttttacgtcgccagcttacttcggcaaggcatgaccgcaggcatggcagaaacgggcgttatcgtcatggtcgccctgctgacactgcggacacaggcgctgctgtcgtcgacgattcagggcgctggtcatatgcgtggtgataagtccggtcggtatggcaataatggagtagccgatcaggataagaatggaggccaggatgcgacccaacggcgtgtgcggcgtgatgtctccgtagccgacggtggtgatggtcacgatggcccaatagaccgaggcgttaagcgtggtaaagccgtattccggcccctcaatcagatacattaacgagccgaaaatcaccatcacaatggcgataaacgaataaaacaggatcagctgatggcgcgcgctgacaatcgctcgccagaacacgttgagcgaaggcataaagcgcagtagtttgagaatacgcagcgcgcggatcgcccgcattgcccgccaggcgaatacataattgaggctaatttccggccatagccacatcatatacagcggtaaaatcgtcgccaggtcaatcagcccccaaaagctgaaaatatagtggagcggattgggccaggtagcgatacgcagcaggtattccagggtaaagaccgcggtcaccagcagctccagccagacgaaaatatgccattcatctaatgtcaggtgatattgcgtgcccagtcccgactcgataaatatcaccagtacgctgagcagggcgaaaagtccgcacagcccttcaaagcggcggccggaacgtcggttctgatcgaaaagtaaatgataaagccgcagacgagcggcagaaagcatacccacttcgttaacctcgcaaaaaaaagggctgacctgcgtcagcccctgagattataacgggtctaccttaaggcaggaaaccgcatggcggaaactgccttccagcaccgggcgggttttggcgcactccggtccggcaagcggacagcgggtgcggaatacgcagcctgagggcggattaatcggcgagggtaattcgccttccagcagttggatagttttcgttttctcgagatcaggatcggggatcggcaccgccgacatcagcgctttggtatagggatgtagcggattatggtacacctcgtcgtaggtccccagctccaccgcatggcccagatacattaccagaacccgatcggagatatgcttaaccaccgccagatcgtgagcgataaatatcagcgatagccccatctcacgctgcagttgctgcagcaggttgacgacctgcgcctgaatcgacacgtcaagcgcggagaccggctcatcgcagataatcagctttggctcaaggatcagcgcccgcgcgatgccgatacgctgacactgaccgccggagaactcgtgcggatagcggttgatcaggttgggcagcaacccaactttcatcatcatcgctttgacgcgatcgcgcacttcctgacggggcatcttcggatgataggtacgcagcggttcggcgataatttctccgatggtcatgcgcgggttcagcgaggccagcggatcctggaagatcatctggatatcgctgcgcacgtcgcgccactcttcctgcttcatgcccagcagatctttacccagccaggccactttgccatcggtcgctttcaccagaccaataatggcgcgggcgaaggtcgatttgccgcagcccgactcccctaccacaccgagggtttcaccctcgtaaaggcgcagcgtcacgccatccaccgctttcagcgttttcgacggctgccagaaccactgcttgccatctttgatatcgaagtgcaccttcaggtcggcaatttcgagcaggacttttcgttgttcagttacggcgttcatagcagatcccccaccggtttaaagcaggcgcgcaggcggcctggcgcgaacgattccagcggcggcgcgctgctgcactgctccatggcatgcgggcaacgcggctggaatggacagccttttggcaatcgcagcaggttcggtgggttgccgggaatggtcaacaacgcatcgccttccgcatccagacgtggaaccgcattcaacagcccaatagagtatgggtgcgacggttgatagaagacatcgcgcgcctgaccgtactccatggtgcgcccggcgtacatcaccagcactttatcgcagatccctgccaccaccccaaggtcgtgggtgatcatgataatggccgtgttgaattcgcgtttaagctcattcaacagcgtcatgatctgcgcctgcacggtaacgtccagggcagtggtcggttcatccgcaatcagcagccggggccggcacagcagcgccatggcaatcatcacgcgctgacgcatgcccccggagaactcgtgcgggaacattttcatgcgcttacgcgcttccggcatttttaccgcgtcgagcatcttcaccgactcttcaaacgcttcggctttactcagccctttatgcagcatcaggacttccattaactgctcgcccacccgcatataggggttaagagaggtcatcggatcctggaaaatcattgagatttgttcagcgcgcagtttgttcagctcacgctcgggcaaattgaggatttgccgaccgttaaaggtggcggaacccccgatgcgaccgttggccgccagcagtcccatcagggcgaaggcggtttgcgatttaccggagccggattcgcccacaatgccgagcgtctcgcccgcctgcagggtgaagttcagatcattgacggcggtgacgtcgccatccggcgttttaaaggtgacgcgaagatctttcacgtccagcagtagcccgctgtggctctgcgcttgcggcgcttttgccgtttcaatcatggtcatggcagcgctccttagcggtctttcgggtcgagggcatcacgcagaccatcgccgataaagttgaaacagaacagggtcaccaccaggaaacccgccgggaacaacagtagccagggcgaaacttccattgagttggcgccatcgctgagcaatgccccccagctgctgagcggctcctgcgtccccagtcccaggaaactgaggaaggattcgaagaggatcatgctggggaccagcagcgaggcatacaccaccaccacccccagcacgttggggacgatatggcgcagcacgatgctcgccgtcgagaccccgccgacctgcgcggcttcgataaactctttgcgcttcaggcttagcgtctgcccgcgcacgatacgcgccatatcccgccaggacaccatgccgatggcgacaaagatcagcaggatattctgaccaaaaaaggtcaccagcaggatgacgaagaacataaacgggaaggagttgaggatctccagcagacgcatcatcaccgaatccactttgccgccgagataaccggagagcgaaccgtacagcgtgccgaggatcaccgccaccagcgccgccgccaccccgaccatcagcgaaatgcgcccgccgatcgctacgcgcaccagcagatcgcgcccggaggagtcggttccgaagtagtggccggaggccatagccggggcattggacatcatgccccagtcggtatcgaagtaggagaacgacgacaccatcggcgcgaaggtaacgaacagcgcaataagcaccagcataatcaggctggtcaccgcggcgcggttatgcataaagcgacgacgcgcatcctgccagaggctacgcccctccacttccagcttctcactgaagttttccagcgcctcgctatttttcttacttaacatcatggcgaactccggcttcagtagcgaatcttcggatcgataacggcgtacagcacgtcaacgatggcgttgaacaggatagtcagggcgccaacgaggatcgtcaggctgagcaccagcgagtagtcgcggttaagcgccccgttaacgaacagctggccgatccccggcaggccgtaaatggtttcaatgaccattgagccggtgatgatgcccacgaaagctggccccatataggagagcaccggcagcagcgccggcttcagcgcatggcgcagaataatgcgacgcatcggcagccccttcgcccgcgcggtgcggataaagttagagtgcagcacttcaatcatcgaaccgcgggtgatacgcgcgatgctggcgatataggccagggaaagcgccaccatcggcaggatcataaatttcagcgccccgccgttccagccgccgcccggcagccagtgcagggtaatggcaaagatcatcaccagcagcggcgcgaccacaaagctcggaataaccacgccggtcatggctacccccatcaccgcgtagtcccagcgggtattttgcttcagggcggctatcaccccggcggcaacgccgatcaccaccgccagtaaaaaggcggcgaagcccagtttcgctgaaaccgggaagctggcggccaccagatcgttgacggaataatctttgtatttaaaagagggaccaaaatcgccatgcgccagctgcttcagataattgaagtactgcgtcatgatagggtcgtttaaatggtattttgcttcaatattcgccatgacttccggcggtagcgtgcgttccccggtaaaaggacttcccggcgccagacgcatcatgaagaatgagatggtgataagaataaatagcgtcggaatcgcttccagacagcgacgtaagataaattttaacattgcccgtaccttctggcgtgtgcctttgcactgctctcaaataagacacgatggagcgagccgagacccgctccacgtattgccattaatgtttgataacgtagaggtctttggtatagacgttatccatcgggtctttaccggtatagccaccgacccacggtttcaccaggcgggcgttaacgtagtaatagaccggtacgatcgcgctgtctttgtccagctgctgctctgctttcgcataggccgccgtgcgctgcgcttcatcggatgcttttacggattcagccataatcttgtcgaacgccgggctcttatagtgcgcggtgttcattgaactgtcagagagcatggtgttcaggaaagaggttggctcgttatagtcggcgcaccagcccgcacgcgccacgtcataggtgccctgatgacgggtatcgaggaacgttttccactcctggttgaccagcttcacgtcaatgcccaggtttttacgccacagcgaggcggcggcaatcgccagcttcttgtgcaaatcagaggtgttatacagcaggttgaaggtcaacggtttatcagcgctatagccggcttcggccagcagtttcttcgcttcttcgttgcgtttttcctgcgaccaggtaaaccattccggctcgctcagcttcgcgccatcggtatacggtggggtgtagccgtaggccggcagatcgccctgtcctttcaccttattagcaataatatcgcgatccagacccagcttcagcgcggtacgcacgcgcacgtcggtgaacggggccttctggttgttgatttcgtaataataggtacacagataggggtcaacgtgcagctcgttggggatctcttttttcagcttctggaagagttcgatcggcagctggttataagtcatgtccagttcaccgctgcggtagcggttaacataggtcacttcggaagaggtcggcagccaggtaacggtgttaatgacggttttagcattatcccaatagtgcgggttacgctccatcacgatccgctcgttgaccacccagtctttcagagtatacgcgccgttggtaacgatattgccaggctgcgtccacttttcgccaaatttttcgatggccggtttgtagacgggagacatcgccgggttaaccagcagtttataaaaatagggtaccggttcgctgagggtgacttccagcgtgtggtcgtcaatggcttttacgcccagctcactcggcgctttcttgccgtcaatgatttcgtcgacgttaacgatatgaccatattgcggatagctggcataaggagacgcggttttcggatccaccagacgctgccagctgtatacgaagtcctgggcggtaaccggctcgccgttagaccattttgcatctttacgcagatggaaggtccagactttaaaatctttattatcccagctctccgccacgccagggatcgggtggccatctttcggcgaagtattcagcaaaccttcgaacaggtcgcggctaatattggcctctggcaccccttcgattttatttgggtccagcgattgcggctcggcgccgctattacgtaccagggtttgcttctctgccagctgcacaccagccgggacatccgctgccattgccatattgccggcgatcagtgcggatagcactcccgcggcgattaaacgctttttagtgatgatggtcattgtgttgtaactccagtcattataattactggttttttaaccagcctgtttttcccgttttcgggttctgtccaacgcaggagtttgcgattggcagattgctatcaccgacttatttattacgaccgctcgaacggcagtcttaacgtcgattcgttgccctcgctggagggtcgttctggcgaaatgagttaattaaaaataattctcatttgcgtacataattcagcagacgataacggcggaaagtaccaaaaggtaaacacctccgccaatgcaatttgcaaatatgttaccgaattctcttttattgccggttttgccagcgtgacaagcgtttgccataaaacgtcgatgtaaaaatattattatttatcagagcattacgataatttcatcagccgacatactgagcagcgaccgcaagatggttttttgtacaaaaatttaacaatagattactttttagcacattcatctgccgccttgttaaaattactaatatcatttcgatgatccgacagcaagtaccagagaatgatgtgaagaaaataacatcacaggagtgggaggcgtgaggagaatgttaagagaaatatttcatatcttaatgaaaaatatgaaattaatagcgatatcgcaaaatattatccctaccgccagttccgcgctggctaataggttttgctaataatcgcgcaggcgtgaagcgagactccccgcctgctggcgacgaactaactcagcagtcctgggaaaagcgctttaatcccggtcacaataaactcaatgccgagagccatcagcaacaggcccataatacgggtgatgacgttgattcccgtctgccccagcaaacggaccagccacggcgccatacggaaaatcccccagcagcagagggcaaataccgctatcgccagtgagaacccgaccagatgcacccaggagtggtaccgggtcccccagacgatagttgaactgattgcccctggcccggccattaatggtagcgcgagaggaacgacgccgatgctctcccggaccgccgtctccgacttttcctgcttgttctgcttatcttcgccgagcttaccgctgatcatcgacatcgcgatggtcaccaccaggatgccgccggcgatacggaaggagtcaatggagataccgaaaatctgcagaatgccatcgccgaggaacagcgacgtcaggaggatgatcgccaccgacaggttggcggtgaggttggtcttattacgcaccgcagccggctgatagctggtcatactgatgaataccggaataatgccaaccgggttaaccagggcaaataagccgatgaaaaacttgaaatatgcagaaaaatcgaacagtgattgagtcacattgggctccgcagcatcatcaaaattggcggttgactgttaacagcataaaataactgcgcgaaacatacgctttttacctgcaatattcattataaatatgcataacccggtgatatgtatcgaatgttagccatttgtatatttaatgctaatcgtttttttaatttcaaaaccctcccatcacacttgatcgaaccggtcaaaaagcagccagctgaaaggtatcagcagcgacaatacttgatctaaatcacgtaatttgtactcagaagtgagtaatcttgatgacaccaacagagtggaaggcagcagtacctgaaagcgaaagagataaagcttttttagtaaatcggtgaaacagcgccctgatttttctacataaacatttacatgcaagctgttaacggcctgtctataatgtcgaatcgagcgactgatttactaaaaaagtttaacattatcaggagagcattatggctgttactaatatcgctgaactgaacgcgcttgttgagcgtgtcaagaaagcccagcgtgaatatgccagtttcactcaagaacaagtcgacaaaatcttccgcgccgccgctctggccgctgcagatgctcgaatccctctcgccaaaatggccgtagccgaatccggcatgggcatcgttgaagacaaagtgatcaaaaaccacttcgcttccgaatacatttacaacgcttataaagacgaaaaaacctgtggcgttctgtcagaagacgacacctttggcaccatcactatcgctgagcctatcggcatcatctgcggtatcgtaccgaccactaacccgacttcaacagccattttcaaatcgctcatcagtctgaaaacgcgtaacgccatcattttctctccgcacccgcgtgcaaaagaagccaccaacaaagcggctgatagcgtgctgcaggctgccatcgcggccggcgcgccgaaggacctgattggctggatcgatcagccgtctgtagaactgtctaacgcgctgatgcatcacccggacatcaacctgatcctggcgaccggtggtccaggcatggtgaaagcagcatacagctccggtaaacctgctatcggcgtcggcgccggtaacaccccggtagtcattgatgaaaccgccgacatcaaacgtgccgtagcgtccgtactgatgtctaaaaccttcgataacggcgtgatctgtgcttctgagcagtccgttgtggtggttgattcagtctatgacgcggttcgcgaacgtttcgccagccacggcggctacctgctgcagggtaaagagctgaaagccgttcaggacattatcctgaaaaatggcgcgctgaacgcggctatcgttggtcagccagcggccaaaatcgctgaactggcaggcttcaccgtgccggccaccaccaaaattctgattggtgaagtgaccaacgttgacgagagcgagccgtttgctcacgaaaaactgtctccgacgctggctatgtaccgtgcaaaagatttcgaagacgcggtagccaaagcagaaaaactggtcgccatgggcggtatcggtcacacctcttgcctgtacaccgaccaggacaaccagccggctcgcgtggcttacttcggccaaatgatgaaaaccgcgcgtatcctgatcaacaccccggcttctcagggtggtatcggtgacctgtacaacttcaaactcgcgccttccctgactctgggttgtggttcctggggtggtaactccatctctgaaaacgttggtccgaaacacctgatcaacaagaaaaccgttgctaagcgagctgaaaacatgttgtggcacaaacttccgaaatctatctacttccgtcgtggctccctgccaatcgcactggatgaagtgattaccgatggtcacaaacgcgcgctgatcgtgactgaccgcttcctgttcaacaacggctatgccgatcagatcacttccgtactgaaagcagcgggtgttgaaacggaagtcttcttcgaagttgaagctgacccgacgctgaccatcgtacgtaaaggtgccgacctggcgaactcctttaaaccagacgtgatcatcgccctgggcggcggttccccgatggatgcggcgaaaatcatgtgggtcatgtacgaacatccggaaacccacttcgaagaactggcgctgcgctttatggatatccgtaaacgtatctacaagttcccgaaaatgggcgtcaaagccaagatggtggcgatcactaccacttccggtaccggttctgaagttacgccgttcgccgtggtgaccgatgacgcgaccggtcagaaatacccgctggcagactatgcgctgaccccggatatggccattgtcgatgccaacctggtgatggatatgccgaaatcgctgtgtgcgttcggtggtctggatgcggtgactcacgccctggaagcttacgtttccgtactggcttctgagttctctgacggccaggcgctgcaggcgctgaaactgctgaaagagtacctgccggcttcctatcacgaaggttccaagaacccggttgcccgtgagcgcgtacacagtgccgcgactatcgccggtatcgcgttcgctaacgccttcctcggcgtgtgtcactcgatggcgcacaaactgggttcccagttccatattccgcacggtctggccaacgccctgctgatctgcaacgttatccgctataacgcgaatgacaacccgaccaagcagaccgcgttcagccagtacgaccgtccgcaggctcgtcgtcgttacgctgaaatcgccgatcacctgggcctctccgcaccaggcgaccgcaccgcagcgaaaatcgagaaactgctggcatggctggaaagcattaaagctgagctgggtattccgaaatctatccgcgaagctggcgttcaggaagctgacttcctggcccacgttgataaattgtctgaagatgcattcgatgaccagtgcaccggcgctaacccgcgctacccgctgatctccgaactgaaacagatcctgctggatacctactacggccgcgaattcgtcgaaggcgaagccggtgcgaaagccgaagttgctccggtaaaggctgagaaaaaagcgaaaaaatccgcttaaccaacagcgatagcatcgcgacaagccccgtcacctgacggggctttttttatccccgctatcagccattctttatcgccagctacgcaacctatagcagacattaaaaaggcgcccacaggcgcctgtacgagcttctgagggtatcagcagggacggtgctggttttgtaccttggttaacgaaccgacgctcagcgcctctttataatgcttacggcagaccgatacgtaccgctcattaccgccgatgacgacctgctcaccctcattataaggacgcccctcctgatcgaggcgcaataccatgctggccttgcggccgcagaagcagatcgttttcagctcaaccagcttatctgaccaggccagtaaatactggctgccggtaaagagctcaccgcgaaagtccgtccgcaacccatagcaaagcaccggaatatccagcgtatcgacaacttcggacagctcatgaacctgttcacgcgtcagaaactggctttcatccaccagcacgcagtgaatcggctttagctggtgctccgccgcaatatcgtcaaataacgaggtctgtggattatacaatcgggccggcgaggagagcccgatacgcgaactgacttttccggcgccaaagcggtcatcaatctcagcggtataaacgacggtacgcatcccccgctcctggtaattgtacgaagattgcaacagagcggtcgacttacctgcattcattgcagagtagtagaaataaagttgtgccatcggctgcgtgaccccaatcaaagtgttttatcgcggcgacgattgtaccatattttatgcgcacagccgcgctttcagcaggggtattgtcgcgaagctgaagggcctgcaaaccgaaaggattaagaagatgaattgaattttcagggccactatttgtacgccccgttacgctactggcgcgctaaccattgtcttttcgtgcttatagaccggttgcccaggggctataagcagggctgccggttgttttatattaagccttgtaaccaaaaatgcgctaatactgacgagggttatttacccatgtaaaggatcatttctctcactgaacctctcaaaaagcataccgtctcaatgttttagcttgccttcgcctcatcgctataagcgatgaaagatgtgaagcggcacgggaattttaacttaaattaattaattctcgcgacaaataaccagtaattttgaattccttacattcccccctattgcacaacgcattttatcgctctattattagttcaacaaaccaccccacaatataagtttgagattactacaatgagcgaagcacttaaaattttgaacaacatccgtactcttcgtgcgcaggcaagagaatgcaccctggaaacgctcgaagaaatgctggaaaaattagaagtcgtcgttaacgagcgccgtgaagaagaaaacgctgccgcggcagaaattgaagagcgtacgcgtaagctgcagcaataccgtgaaatgctgattgctgacggtattgatccgaatgaactgctgagcaccatggctgccgttaaagccggtaccaaaaccaagcgtgctgcacgtccggctaaatatagctatgttgacgaaaatggtgaaaccaaaacctggaccggtcagggccgtaccccggctgtgatcaaaaaagcaatggatgagcaaggtaaatcactggacgatttcctgatctaatctccgttgatcgctataaaaaatcccgctgcggcgggattttttttgccctcagggccgatataaaaaaaccgggagtcgcagatgcgctcccggtttgtgctttcaaccgcgcggcggattacttcgctaccgccgtttccagccaggctttaaaatcgtcgcccagcgttttgtgacgaataccatattcgacaaacgcctgcatgtagccaagcttattaccgcagtcatggctcttgcctttcatatgataagcttcaaccgtttctttctcgatcagcatatcaatggcgtcagtcagctgaatttcatcaccagcgcccggaggggttttcgccagcagcggccagatatcggcgctgaggacataacgccccaccaccgccaggttggacggcgcaacgtcagcttttggcttctcaaccacgcccaccatcggtacgctttcgcccggcttcagggattcgcctttgcagtcaaccacgccataagcggttacgtcttcgacaggttcaaccataatctggctggcgccagtctcaacgaagcgagagatcatctcagcgaggttatcgcggctcagatcggattcatattcatccagaataacgtctggcagaataaccgcgaccggctcatctcccactaccggatgggcgcacagcaccgcgtgacctagacctttcgccaggccctgacgaacttgcataatagtcacgtgcggcgggcaaatagactgcacttcttccagcagctggcgttttacacgtttttccagcatcgcttccagctcaaaactggtatcgaaatggttttcgatagagtttttcgacgagtgcgttaccagaacaatttcagtaattcctgcagcgatacattcattaacaacgtactgaattaacggcttatctaccagcggcagcatttcttttggaatcgctttggtggccggcagcatcctggtgcctaatcccgcaaccgggataaccgcttttctgactttagaattaagggcagccattgaaatctcctggactgtttgttttttaaacttctcgttacaaataacgtgtcgagtatatcagtcaaccgcgtatttactggtctgaaaagctgccgatagcctcgaattaggacttttacgcataaaacagctcgatgttaccaccgctaaagggcaagaggtaatcccgtctgcttagatataaacgcaattgctcattccgcagacaacattaagcgtaaacgaccgccagccccccaaatttggcactgccacgaggtgcagcgttggctaatttggttaagataagcatcacccagcgtccccaaaggaacgccattactaatctgaatttgatgctcccctgtattcagcgtgccattaagtcccgctgacaccagaattaaatttttcagcccgctgtggtaataccctactaacagagggaactggcccggaagatttgcctgacgcagcagttgattcacctgttttaacaaacttcccatttctggtagccgttgtccctggtgcgccagttgctcctgcagcagaccattaaacaacgcgcgcagcaataatgctgccaacacgccattatcgcctgcgcgtgtgacatccagacaatagaaagccaaatcattttccgaaagcggcgcgatatcgagtaccagaccgggcttgtctgccgacaccagttgtcgataatgaatacggcagtgcgacatttcctgttgcaccggcggctgtaattcctgcaataatcttgaagcggcgatgggattactgaccagcgcatcccagtcctcaaataaacgctcttcctcttccacgcgcgaactgaacatcgcgggatagagacaggcgtaaacggtctcgcgcaggcgatcgaaatcttttactggctttaacagcacgtcctggacgccaagtcgcaacgctttagctatatccgccatgttttcggtggcggagatcatcaggatcggtaactgttcgccgcggttacgcagcgtttccaccagctccagaccgttcattctcggcatagaaatgtcgcaaatcatcaggtccggatgcacctccgtcattttatgcagggcatccttgccatcttccgcctggaaggttgttgctcccagcgaggtcagccatccatgcaagagtgagcggaaaacgggttcgtcttcaactatcagaatctgttttcccgccaatggctgcgtcatgatatctcccctggctgacgataattcaatagtggcacgctattctcactatcgcctgtcagaatttgcttaagtcagtaactcgtacgtcaaacggctgtacgcactaatggtaataattcatccattttcttttctaccgccagttgccccgcggcaatcgcctctccggcgcgatgaaaatcaagcgtcgaaacttgcggacagtatggctgcaacaggatatccggcgggtcacccgccatacgattgcgtttaagacggttttccagtacctggatagatgtggtcatgatctccatcgccgtcggcgtcacggccgtacggcgggaactcattcgcgtcaagcgcgcgcgcagacgagtatgccatggcccctccttctcttccgcttcctgccgcggcgtttcaagggagaacaaatcctgctgcataagatgggcatcatgttgcaggtcgacggcaatcacaatatccgctcccattgcccgggtgagcgacacaggaaccggattgaccaccgcgccatcgaccagccagtaaccattatgccttactggcgacattaaccccggcatactgcaggaggcgcgaatggctaaatgtagatcgccttcggtaaaccacagctccctaccggtgcttaaattggtggcaacagcggcaaaccggcgctcgcagcgttcaatctcggtgacgggcataatgcggcggtaatgattgaataccttttccccccgcagcagtcccccccggcgccaggagagatccatcagcttcaggacatcccagttgctgaatgagcagacccatgattcgagtgccgggagtcggttacaagcatacgccgcccctaccagcgaaccgatagaacaaccggctacgatatcaatctcaataccggcccgctggagggcgttgatgacgccaatgtgcgaccatccgcgagcggctcccgcacctagcgccagaccaattttaagctttctcattagtactaataactatccttccactctgagcgtggcaacattgtcacggctcagttaacataatgccctttggcgtagaagcgccgttactctttcttccatggaggcagttttgtcgcaattatgcccctgtggcagcgcactggagtatagctcatgttgccagcgatatctgtccggcgctgagcttgcgccgggcccgtcacagcttatgcgctcccgttatagcgcgttcgtcatgaaagacgctgactatctaatcaaaacctggcacccgtcctgtcaggcgcagcaatttcgcgccgaactggagaaagggttttcccagaccgaatggctgggcttaaccctgttcgccagtgatgaggggcgagctccaaatgaaggttttgtcagctttgtcgcccgctttaatgacaataaccgccctggcgccattattgaacgttccagattcttaaaagaaaatggacagtggtactatatcgacgggacacgaccgctgattggccgtaacgacccctgcccctgcggctcaggtaaaaaatttaaaaaatgctgcggccagtaacgctggcacagcgcttgcaaacattacaggattttcctcgcgatgcattcattacaacgtaaagtactacgcactatttgccctgatcagaaaggcctcatcgcgcgtatcaccaatatctgctacaagcatgaactcaacattgtgcagaacaatgagtttgttgaccaccgtaccggtcgtttctttatgcgcaccgaactggaaggcatttttaacgacgctactctgctggccgatctcgacagcgccctgcctgaaggctccatccgcgagctgaatccggcaggccgtcgccgggtggtgattctggtgacgaaagaggcgcattgtctgggcgatctgctgatgaaagccaactacggcgggctggatgtcgatattgccgcggttatcggcaaccatgacaccctgcgctcgttggtggagcgctttggtattccgtttgagctggtcagccatgaaggactgagccgcgaagaacacgatcagcggatgggcgatgctatcgccgcccacgaaccggattacgtggtgctggccaagtatatgcgcgtcctgacgccagaatttgtcgcccgcttcccgaacaaaatcatcaatatccaccattcgtttttgccggcgtttatcggcgcccgtccctatcatcaggcctatgagcgcggcgtgaaaatcattggcgctaccgcccactacgtgaatgacaatctggatgaaggcccgatcatcatgcaggacgtgattcacgtcgatcatacttataccgcagaagatatgatgcgcgctgggcgtgatgtcgaaaaaaacgtcttgagccgagcgctgtatcaggtactggcgcagcgcgtcttcgtttacggtaaccggacgattattctttaatcgactgagaaatgaattggttagctttacggcgttacgtgtaaaaatcaggcaaccagtttatttttgtcaaacgaatgctttacaggggcgcatcatttggtatgatgcgccccgcttcccgagaaggaagcaggccagtaccaagcattaccccgtggtggggttcccgagcggccaaagggagcagactgtaaatctgccgtcatcgacttcgaaggttcgaatccttcccccaccaccattattcactacagtgatatggtttccccgacaagcgtaaacgatgtttgcacttagcgggaagggtaagaaccttcgactaaggttcgactcgagcgccagcgagagaacgttgccgcaggcaacggcccgaagggcgaggaaagatagcgacgagttatccttcccccaccaccattcattttgctgaatagcctacaatgtgattttacccctggtggggttcccgagcggccaaagggagcagactgtaaatctgccgtcatcgacttcgaaggttcgaatccttcccccaccaccatctccccatgtcatgcccagcataatctacctacggtattctatattctgccctacagggaaggatgagaagcttcgactaaggttcgactcgagcgaagcgagagaacgttgccgcaggcaacggcccgaagggcgaggcgctttagcgccgagtaatccttcccccaccatcatctcttcatgtattgcccagcttattccacctgcgatacgctatattctgccccacggggaaggatgagaagcttcgactaaggttcgacttgagcgaagcgagagaacgttgccgcaggcaacggcccgaaggcgaggcgctttagcgccgagtaatccttcccccaccactgttgcactctcagccaccggtcctgctgtctcatcgctcgcgcttcgcttagcgaggctacacattcctgcactctcagccacctgttctgctgtctcatcgctcgcgcttcgcttagcgaggctacaagtggtgccgtctggtagcccggacaggtgcgcagcaccgcctccggaaaaactcacagcggtggcaaccgcctttttaccggcgagcttttcaccaccgaggtgttacactgcgcatactccgccagaccgtccagcagggtatccagctgggcaatatcgcgcaccacgagacgcattacaaaacaatcttccccggtcaccttgtcactttcaatacattccggcatcgcctggatatatttatccaccttctgcagcagcccaggcagcggccggacccgcaccagcgcctgcaggctatagcccagcgcggcgagatttacccgcgccccatagccctgaatgacaccccgctcctccaggcgcttcacccgctcggcggtgctcggcgaggtcagccccactcgcgcgctcaggaccttgagcgaaactctggcatcctgagtcaggcaggtgaggatcgccctgtcaatttcatcaagtacgtcattcatatatttcacctaattataaaaggcatttccccccttctaccttaattcagccatatcaccctgtcagggtttttcgcacaataactaaaaaatggtggaggtgaaaaatgcaacttacccgcggcgtctggcagatgagcctggcaatgataatctccggctcgatcggcgcgttcgtgctgctctctggtttgccggtgactgatgtggtgttctggcgctgcctgattggcgcgctaaccctgctggtgtttatcgtgttaagccgccagcccttcagccggctaacgcgtttcactctcgctctggcggtgattggcggcgcggcgctggtcgtcaactggctgctgctgtttgccgcctattcgcggatctcaatcggtatggccaccgtggtctataacacccagccgtttatgctggtactgatggggatggtgctgggggaacgggtcagcgccgtgaaatggggatggttactgctggcctttggcggcctagtgatcctgctgtcgagcgagctgacgcctgcacacgaagaggggcttaccaccggcgtgttgctggcgctgggcgcggcattcttctatgccctgaccgccatcatcgcgcgcaaactgcatccgctccccgcgcagcatatcgccttcattcaggttctcgtcggcgtcgtgatgctgctgccgctggtgcatgccccagaattgacggccagcttcccctggcgctatctgctgatcctcggcatcgtccataccgggatcatgtatcagcttttatatagcgcgatacagaaactgccgacgcccgttaccggttcgctctcctttatttatccgctggtggcgatggtggtcgactatctggtcttcaaccatgcgttatccgcggtgcaattgctcggtgggatgcttattctgtttgccgccgcagggaataatctcggctggggcgaaaaaaaaccccgccgcggcggggtcagtgagcagtcgcgggccagttagcgacgggcgcggacaatctggtatttgcgcgtcaggtattcgaccggcgcgctccagatatgaaccagacgggagaacgggaacagcaggaacagggtcatgcccagcaccaggtgaacgcggaaaataaacgccacgccatccagatgctgtgacgcgccgccgtggaacgtcaccaccgactgcgcccagccgaccagtttcatcatttcactgccgtccatatgctgagcggagaacgggatcgtcagcaggccgagcgcacactgcaccatcagcaacgagaggatcagaatatccgctccggtggtggtggcgcgaacgcgcgggctcagcagacgacgcttgagcagcagtaacccgcccaccagggtcatcacgccgcaggcgccgccggcgatcatcgccatcttctgcttgacatcgatcggcaggaaggactcatacatccagtgcggggtcagcatgccgaggaagtggccggcgaaaatacccaggatgccgatatggaacaggttcgacgccaggttcatccccttacggtccagcatctggctggaggcggcgcgccaggtgtactggccatagtcatagcgcaaccagctgccaatcaggaacaccgaacccgcaatgtacggataaatgtcaaagaagaacatattcaggaagtgcattattgctgtcctccgttagagatattcagatattgcggggccacggctccggcaaaacgacgctggtgagcggaaatttccgactcgccgcagccctggtcggcaaagaatttgacctgttcttcttcccagacggcgtccagcgcctgcggcgtatcgtcgcgcgcttcgtcggcaatcttctccgccaccttctggctgtcgacctgcgtattggccagcttcagcaacagctcgaacagcaccgcatagcgactttcgcgctgctgcaggcgcgcgctgagcagaccgaggatcggcgcgacgtcccgcaggccgccaagcgcttcctcttccggcagctgcgccagatactccagatatagcggcagatgatccggcagctcatggctatccagcagcaggccgtggcgctcgtactgcgccatgagatccaccatcgcctgcccgcgatcgcgggattcgccgtggacatgttcaaacagcagcagcgaggtggcccggccgcggtcaaacagttcgctataggccgcctgggcgtccagcggatcctgagccactaaatcgcgcaggaaaacgcccagcgcgtgggcatcctctttgctgagtttctctgatgacgcgagcgcctcgaacatctcctgctgatgctgccataaggcagcgtcaggatattcgagcagacgcgatacaatcacgagttcaatcatgcgtgcggctccgttttgctggtcacgtcgatggcgtcgatgcgacggctgttgaacaggttgaactgactgtcagagccatggcagccatcgccaaagctaaagccgcagccgtttttctccggaaacgcttctcgcgcctgttcacgatggctgctcggcaccacgaaacgatcttcgtagttggcgatcgccagatagcgatacatttcctgggcctgcgcttcgctcagccccacctcttccagcgcgcgggtatcaacgacgccgtcaacggtttccgcacgcttatagtggcgcatcgccagcattcgtttcagcgccagcagtaccggctgggtatcgcccgcggtcagcaggttcgccagatattgcaccggaatacgcaggctttccacgtccggcaggatcccgttgctacccagttcacccgcatcggcggcggactgaatcggcgacagcggcggcacgtaccagaccattggcaaggtgcgatattccgggtgcagcggcagggccagcttccagtccatggccattttgtaaaccggcgactgctgcgcagcttcaatgaccccctgcggtacgccatctttcagcgcctgctcgatcacttttggatcgttgggatcgaggaacacgtccagctgacgctgatacagatctttctcgttctcggtgctggcggcgttttcaatcgcgtccgcgtcgtatagcaggacaccgagatagcggatgcgacccacgcaggtttcggagcataccgtcggcatcccggattcaatacgcgggtagcagaagatgcatttctcggatttcccgctcttccagttgaaatagatcttcttgtacggacagccggtgatacacatccgccagccgcggcacttgtcctggtcgatcagtacgatgccgtcttcttcacgcttatagatggcgccgctcgggcaggtcgcgacgcaggccgggttcaggcagtgctcgcacaggcgcggcagatacatcatgaaggtgttttcgaactggccgtacatcgccttctgcatgttgtcgaagttctgatctttggcgcgtttttcaaactcgccgccgaggatctcttcccagttcggaccgctggtgatcttgtccatccgctggccggtgatcagcgagcgcggacgggcgatcggctgatgtttgctctccggcgcgttatgcagattctggtagtcataatcaaacggctcgtagtaatcatcgatgcccggcagatgcgggttggcgaagattttacccaacagcatcgcgcgattgcccatgcgcggctgcagtttaccgttgattttgcggatccagccgcccttccatttttcctggttttcccagtcgttcgggaaaccgacgcccggcttactttccacgttgttgaaccaggcgtattccatcccttcccggctggtccagacgtttttacaggtcaccgagcaggtgtggcagccgatgcacttatcgagattcagcaccatgccgacttgtgaacgaattttcattttacgctctcctgtacctggtcgttgccttcgccgtctaaccagttaatgttcttcatcttacgtaccaccacaaactcatcgcggttggagccgacggtgccgtagtagttaaagccataggccaggtggccgtagccgccgatcatgtgggtcggtttcggcgtaatacgggtgacggagttatggatccccccgcgctgaccggtgatttcagagcccggcaggttcacgatacgttcctgcgcgtgatacatcatggtcatcccggctggaacgcgctgactcaccaccgcacgcgccgtcagggcgccgttggcgttgaagacttcgatccagtcgttatcttcgatacccagatctttcgcatccgcttcgctcatccagacaatcggcccaccgcgcgacagggtcagcatcagcaggttatcgctgtaggtcgagtggataccccatttctggtgcggggtcaggaagttcagcgccttctccgggttgccgttggacttctcgcccatcaccgctttcaccgaacgggtgtcaatcggcggccgatagaccagcaggctttcgccgaagtcgcgcatccactggtgatcctgatacagcgactgacggccggacagcgtgcgccacgggatcagctcgtgaacgttggtgtaaccggcgttgtaggagacatgctcatcttccaggccagaccaggtcgggctggagataatcttccgcggctgcgcctgaatgtcgcggaaacggatcttctcgtcttctttgttcagcgcgaggtgcgtatgctcgcgaccggtgatctcgctcagcgcttgccacgctttcaccgccacctgaccgttggtttccggggccagggtgaggatcatttccgcggcgtcgatggccgtttccagcttcggctggcctttcgccgggccttccgccttggtgtagttgagcttacgcagcagatccatctcgctctgggtgttccaggcgatgcctttcccgccgttgccgatggtttccagcagcgggccgatcgaggtgaaacgctcgtaggtcgccgggtaatcacgctcaaccggaataatatgcggcgcggttttcccggggatgagatcgcattcgccttttttccagtctttgacatccagcggctgcgccatttccgcggcggagtcgtgctggatcggcagggtcaccacgtcggtttctttaccgaggtggcccacgcacacttcagagaatttcttcgcgatacctttatagatctcccagtcgctcttcgattcccaggctggatcaacggcggccgacagcgggtgaataaacggatgcatatccgaggtattcatgtcgtctttttcgtaccaggtggcggtcggcagcacgatgtcggagtagagacaggtgctcgacagacggaaatcgagggtcaccaccagatccagtttgccgtcgaggccgttatcccgccattcgacttcttccggcttcacgccgccctgcttgcccaggtctttgccctgaatgccgttctcggtacccagcaggtacttgagcatgtattcatggcctttaccggaggagcccagcaggttggaacgccagataaacaggttacgcgggtggtttttgccattttccggctgctcggccgcaaagcgaatcgagccctctttcagcgacttcacggtgtaatccaccggggtcatgccggcttttttcgcttcgtcagcgatacgcagcgggttgacgccaagctgcggcgccgacggcagccagcccatccgctctgcgcgcacgttaaagtcgatcaggtggccgctgtaacgggatttatccgccatcggcgacagcagttcctgcgcggtcaccgtttcatagcgccactggctggagtggttatagaagtacgaggtactattcatgtgacgtgccggacgctgccagtcaagggcgaacgccagcggctgccagccggtctgcggacgcagtttttcctggcccacatagtgcgcccaaccgccgccgctctgaccgacgcagccgcagaagatcagcatattgatcaggccgcggtagttcatgtcgaggtggaaccagtggttgaggcccgccccgacgataatcatcgaacgaccgtgagttttatcggcgttatcggcaaattcacgggcggtacggatgatatgcgcgcgggagacgccggtgatcttctccgcccacgccggggtgtaggctttcacttcatcgtagccggcggcgcagttgtcatcgttcagaccgcgctccaggccgtagttagccatggtcaggtcatacacggtggtgaccagggcggtagagccgtcggccagctgcaggcgtttggccggcagtttgtgcagcagaatgttttccagatcgactttgttgaagtgctcagaaccttcgccgccgaagtacgggaagccgacgttcgccacttcatcatggctgcccagcaggctcagacgtagctcaatctcttcgccagttttaccgtcgcgctgttcgaggttccatttgcctttgtcgccccagcggaatccgagggagccgttcggtacggtcatgtcgcccttctcgtcaaaggcgacggttttccattccggattgttctcctgaccaagggaatccacgaggtcggatgcgcgcagcgtacggccggcggcataataaccgtcgcgctcctcgagcatcaccagcatcggcatgtcggtatagcggcgcacatagtcggtgaaatactggctcggcttatcgaggtggaattcacgcagcatcacatggcccatcgccagcgccatcgcggcatcggtaccctgcttcggcgccagccacagatcgcagagtttggcgatttcggcgtagtccggagtgatggctacggttttggtccctttatagcggacttcggtaaagaagtgcgcatccggggtgcgggtctgcggcacgttggagccccaggcgatgatatagctggagttataccagtcggcggattccggcacatcggtctgctcgccccaggtcatcggcgaagccggcggcaggtcgcagtaccagtcgtagaagctcaggcaggtgccgccgatcagcgacagataacgggcgccggacgcgtaggagaccatcgacatcgccgggatcggcgagaagccagccacgcggtccggaccgtaggttttgacggtatagacgttggaggcggcaatcagctcattcacttcctgccaggaggaacgtacaaaaccgccgcgaccgcgggcctgtttgaagcttttagctttgtcggcgtcttcgataatcgacgcccatgcctcaaccggatcgctatgctgaactttcgcttcccgccacatcttcatcaggcgtttacgcatcagcgggtatttcaggcggttagcgctgtacaggtaccaggagtagctggcgccgcgcgggcaacctcgtggttcgtggttcggcaggtccgggcgggtgcgcgggtagtcagtctgctgcgtttcccaggtcaccagaccgtttttgacataaatcttccagctgcatgagccggtgcagttgacaccgtgagtggaacgcacaattttgtcatgctgccaacgttgacggtatccatcctcccagtcccggttggtgtttagaagctggccgtgcccatcggcaaaggtttcacccttctgtttgaagtagcgaaaccggtccaggaatttactcatcgggtttctcctgatatggagcctgacggctctctgataaatcgacattgctggatttgcagcgaaggtaacgctatgaaagagggcgagaattgatagcgatcaatccgaactggcttgttactgtgcagcaaaacctcgattaccaccaaggtggtataagatgttattttttaaattattgttttttaatgattttcacctcaaaaagcggcgcctcatcgggatttgttaacaacggaggtattaaggggtagagccatttcactggcaagcccacctgttctggctcagcggtcgatgcggacaatattctccaacagtatgttgtaactaattaagcggttaaaaaaggcgcctccgtggggagcgcgcctttttatacgccaacgttaccgcggccgattactgacgcttacgaccgtataccgcccaggtgatcaccacgcaggcaatatagaacacgaggaacactttcatcgccccggccggcgagccggtcagatccagcgagataccgaacgctttcggaataaagaagccgccgatagcaccaatggcggagataaagcccagcgccgccgcggtatcggtcgccgcctcgcgcatcgcctgcgcttcgctgccgccctgggccttcacgcggtccatagtcagcttacggaagatcacggagatcatctggaaggtggaggcgctccccagcccggcggtcaggaacagcaccataaacaccgcgaagaaggcgataaagttaccgccctggccgttggtcggcagggtcaggaacagcagcgcgcagaagacagccatcaccacaaagttgaccagcgttacgcgggtcccaccgaggcggtcggagatcgccccgcccatcgaacgcgccagcgcgccaatgaacgggccgaagaaggcgtaatgcaggatctgcacatccgggaactgagtttttgacagcatcgcgaacccggcggaaaagccgataaaggagccgaaggtcgcgagatagagcagcgccataatccacagatgcaggcgcttaagtaccggcaactgctcgctcagcgacgctttcgaagccgacaggtcgttcataaagaaccacgccgccagagtgaaaataatcaggaaaggtacccagatccacgcggcgttttccagatacagcatcgagccgtccggttgctcgctaccgttaccgccaaaaacggcaaagatagagatcgagaccaccagcggcgcgaccagctgcatcacgctgacgcccatattgccaagtccgccgttaacgccgagcgccccgccctgcttcgctttcgggaagaagaagctgatgttggccatactggaggcaaagttggctccggcgaagccgcacagcagagagataatcacgaagatgctaaacggcgtagaggtatcctggaccgcgaagcccagccagacgcatggcacaatcatgatcccggtgctgaacgccgtccagcgacggccgccgaacagcggcaccataaaggcgtaaggcacgcgtaataaggcgcctgacagcgccggcagcgcggtcagcataaacagctgatcggttgtaaactgaaagcctactttgttgaggttaacggcaaccgcgctgaacaacatccaaacgcagaacgccagtaacagacagggaacggagatccataaattgcggcttgccacacgatggccgcgctgttgccagaattcaggatcttcaggccgccagtcggttatgaccgagcggttagccttctccgggagggaagattgactcatagatacctctgattattcatatttcctgccgctaccttaggggttacccggggcggtaagttgatataaatcaaaggaaaagcgcgagctaatttgtgcaaaaataaaccatgcctccaagtgagtagagaatggcggggaaaaaagtgtggtttttcacgctgctgccgggttgcgtataatcccccccctaacatcgcctaccaccgacaattaaggagtaactctttaggggtatgggtatactccaggggatagtcgagaataagcgccactcccggagacatgaccggtcaggagccacgcattccatgttaaaacgtctttttaccccgctgacgctggtcaatcaactggcgttaatcgtgctgctcgccacgattattggcgtcgccggcatggcgatctccgcgcgcctggtgaacggcgtgcagggcagcgcgcacgccattaacaaggccggttcattgcgtatgcaaagctaccggctgctggcggcgatcccgctgaatgaaaacgatcaaaaactggtggcggacatgaccgccaccgtcttcagcccggagctgcaaaattccgcccgccgcgacggccaggaaatccagcttaaagccctgcagcagtactggcagctggcgctggcccccgggatgcagcgcgcagtcaatcaggcggaagtggcccaggatgtcgccgactttgtcgatcgtatcgaccagttggtcaccgcattcgaccacaccaccgagcagcgtatcgaacgggtggtctggatccatcgcatcctcgccattggtatggcgctgctgctgatcttcactatcatctggttacgcgcccgcctgctgcggccgtggaaacagctgctgagcatggcgcgcgcggtgagccagcgtgatttcacccagcgggcgcacatcagcggccgcaacgaaatggcgaccctcggcatggcgctgaataacatgtcggaagagctggcggaaagctacgcggtgctcgagcggcgggtgcaggagaagaccgccggactggagcagaagaacgagatccttgctttcttatggcaggccaaccgccggctgcactccagcgccccgctctgcgaacgtatttcgccggtactgaatggcctgcaggggctgacgctgctgcgcgatatcgaggtacgggtttacgacctggaagacgaagataatcaccaggagtttacctgccactcggatgatgactgtgatgataaaggctgctacctctgtccacgcaatctgccgccgctgccggatgggggaacaacgctgaagtggcggctgtcagatgcgcatagtcagtacggcatcctgctggcgacgctgccggttggccgccatctcagccacgatcagcagcagctggtggataccctggtggaacagctgaccagcaccctggcgctggaccgccatcaggagaagcagcagcagctgatcgtcatggaagaacgggccactatcgcccgcgagctgcacgactccatcgcccagtcgctatcctgtatgaagatgcaggttagctgtctgcagatgcaaggcgacgccttgccgacggaaagccgccagctgctggggcagatccgtaacgaactgaatacctcgtgggcccagctgcgggagctgttaaccaccttccgcctgcagttgaccgagccggggctgcgcccggcgctggaggccagctgtcaggagtacagcgcccacttcggctttacggtgcagcttgattaccagctcccgccgcgctttgtgccctcgcatcaggcgatccacctgctgcagatcgctcgcgaagcgttgagcaacgctctgaagcatgccagcgcaaccgaagtaaccgtgacggtgtcacaacgcgataatcaggttcgtctggtggtagcggataacggccgcggcgtaccggaccacgccgaacggagtaaccattacggtttaattattatgcgggatcgcgcccagagcttgcgcggtgactgtcaggtacgacgccgggaaaccggtggaaccgaagtgatcgtcacgtttatcccggaaaaaacgttttccatccaataaggagaccctcatgagtcaacaggaacgggcaactatccttctcattgacgaccatccgatgctgcgcaccggcgtgaaacagttgatcagcatggcgccggacatccaggtgattggcgaggccagcaatggcgcgcaaggtatcgagctggccgagtcgctggatcctgacctgatcctgctggaccttaatatgccgggcatgaacggtctggagacgctggataagctgcgtgagaaatccctttctggccgggtagtggtcttcagcgtctccaaccatgaagaggatgttgtcaccgccctgaagcgcggcgccgatggctatttgctgaaggacatggaaccggaagatctgctgaaagcgctgcagcaggcggccgccggagagatggtattaagcgaagcgttaacgccggtgctggccgccagcctgcgcgccaaccgcgccacctccgatcgcgacatcagccagctgaccccgcgcgagcgcgacattctcaagctgatagcccagggactgccgaacaaaatgatcgcccgtcgcctggatatcaccgaaagcaccgtcaaagtacacgtgaagcacatgctgaagaaaatgaagctcaaatcccgcgtggaagcggcggtatgggtccaccaggagcgaatcttctaaggcgagtccgtccaggagacgcctggcgtggtaaacttgaccagcggctcggtcaacgccagggcgatctcattggaggagacgcgctgcccctgtttatcctccaccaccaccgacaggcgccagcggttcgcggcgcccggttcactgttccacaccggcataatgatgctccagccatcggggctgctggcatctaccggcggcgtcaggctgagggcctgggtgtctccctgccagtgcagcgccttgatgccatgcagactatggatctgcagcttcaactgcaccgtctccccggactgcagatcccagggcggcgtggccagatagaccgtcagatttttgcgctgacgatactccaccaccggcagattatcccgctccggactatcgaagcggctcccgcgcagcgagttgctgatcgccacctcgtctgccgcaagctgctgcttaaggggtacgccaaagcggtagtttagcttcaggcccacattgttctggctgacgccattttccccctgcttatgcttagcggtcaccgtgaccagcgggaccggggtgtaattgagcccaacggagacggccaccggattatggtagccggtgccggagtgaaacagatcgacgctatcgccgaaatactgttcgacgctgacgctggtgttgatgtgctggtagaacggcagccgcgcctgggcggtgacgtcataccctgcggccatccgctgctcctgagtctgattatcgcgtagctgccagtcgccaagcggatggtaatagtttgccgacaggcggagatattctccccacgcttcggcgccaacgctgccgcgcgccaggctttcgctcagcactttatcgtaaaacgagttatagcccagcagccaaccgccgacccgccaacgctggccaagcccgatgttgcccaccagatcgtgctcgcgccgggtcaccgagtactggttccacgtcagataacggtcgttatcctgcaacggcacgaaccagctccctttactgccggtgaatttcccctctttatcgaccagcaggtcgacattggcgttgccccacggcgagagccaactctccagctgatgactcacttcattgccgattttactgatggcaaacagctgcgcctgttcacccgccgtcagaccattgtcgctcatgctggcctcgccaaacttcttcgccacttcggcaaagtgccgggcgtcgtcatcaacctggggagcaatccccatatcgggcagcggatcttgcgcttgcgcagggcgggtggtgtcgctggcggtcagcgcccagacgggaacgcccggcaacagcaggagaaaggtcaacgttggcaacaaacggaacgacacaggcattaacagagtttgcgcaagctcacaaaaatggatagaagtgttagtttatcgttttttccctgctcccgcagccctgtgggcaattccaggaataagctgaaaccggttgggtaaggtgccgcccaaccggaggcgtcgccgcgcgccaccgttacgcccgggttcgctgcgccgccagcagcgcgttgagctccggcacgcaagagccgcagttggtcccgcatttcagcttcccacccagcgccccgacgctggcgcagccgctggcgatggcctcgttaattgaccattcccccaccccaaagcagctgcagacgatccgcccccgcggcgcgacggcggcgcccggtcggccgctaagcaaggcatgtcgttggacagcatcggacggcggcgcggcaaaggcagcgcttatccatgcgcaatccaccgccggctcgcgcgcatcgctccaccagccgagcatcagccttccctgatgccaggccagcaggttccacaccgcaccgccgtcagccacctgtaactgccagccgcgccgggcgcaccacgcgctgagccactgtcgggcagatgcctccccggccagcgagtagtgcagcacgcctggcgccgcccgccgccgccagtgccaggccgcaggaaatggtagcggttcgcggcaaaaaagctcgctgtgccaggccggttgccaggcggcgatcgccaccgccgcctgtttactttccggctggccggaatacgggtccgtgacggcggccagcaggttattcacccgcccctgacgggcaaactggttgttccagtgcatcggaacaaacagcgagccggggcgctgcccttcgctgatcgccactttcgccaccatcaccccatgccgcgaccagatccgcgccagcccgtcagcgggaagctgatagcgaacggcatcctgcggcgccacctccaccattggctccgcgatatgctgcatcagccgcggcaccgcgccggtacgggtcatggtgtgccactgatcgcggatccgcccgctgttgaggatcagcggataaaaggcatcggttgtcgcccgggtcggttgaggcgtcaccggcaccatccgcagcctgccatcgccatgccagccgcgcgtgatatcccaggcgacctcgctgcggctgaccggccagcgcaccggcggcatggtgtcccacgcctcacggctgagatccgccagcgcgccgatatcaaacgcccgctggccgtcgttttcgaaaccggacagcgccgcatgctcgcggaagacgtcatgcggatgctgccaggcaaacgcctcgcgataccccagagcctggcccactctggcgatgatccaccagtccgctttcgcctcccccggcggcggcagaaagctgcgctgacgggagatccgccgctccgagttggtgaccgtgccattcttctcgccccaggccagcgccggaaagcggatgtgggcgaaacgtccggtatcggtctgggcggcgacatccgagacgatcaccagcggacaggcggccagcgcctggctcaccgcgtggctgtcagggagcgacaccaccgggttggtacccatgatccagaccgctttgacctcgccgcggccaatggcggcaaacagctccacggcggtcagcccgggggtctgcgccagccgttccgtcccccagaagcgggccagccgctgcagatcgtctggcacaaaatccatgtgcgccgccagcatcgtcgccagcccgccgacttcgcggccgcccatggcgttgggttgaccggtcagcgaaaaggggccgcagccgcggcggccatacttcccgctggccagatggacgttgatgatggcgttacatttgtcgctgccgctggcggattgattgattcccatggtgtagagggtgatcgcccgcggggcggcgatgaactcgcgatagaatcccgccacctcatcggcaggcagaccgcaaaaggccgccaccctcgccacgtcccagccgcgggcggcggccagcgcctgcgggccgtcgcgaaagccatcgacgcaggctcctgcctcagccagggcgttaagcagccccgcaaacaacccgccgtcgcttcccggggccagcgccagatggcggtcggcgatctcgcaggtagcggtgcgtcgggggtcgatcaccacgatccgcaatcggggattatcccgcttcgcctgcgccagccgctggaacagcaccggatgcgcccaggcggcgttcgagccgaccagcaccaccagatcgctgttttccacatcatcgtagctgcagggcaccacgtcggcgccaaaggcccgcttgtagccagtgaccgctgacgacatgcacagccgtgaattggtatcgatgttcgccgcgccgataaaccctttcatcagcttattggcggcatagtaatcctccgttaacagctggccggaggcgtaaaaggccaccgcttgcggtccgtgctggtcgatgatctgtctcaggcgcgcagcggtttccgccagcgcctgaggccaggctacctgctggccgtcgacctccggcgtcagcagccgccccgccaggcccgtggtctcccctaaggcagcccctttgacgcacagacggccgaggttcgccgggtgctgatcgtcgccgcgcacgctcacctgccccgcgtcgtccacgctcgccagcaccccgcagcctacgccgcagtaggggcaggtcgttcggatggtcttcatcaggaggcctccgcgcgggccagcagctgctggttgcccacccacactttgccgttttccactttcaccggccaggcgcgtaccgcctgttcactgccgtcgcacggccagccgtcgcgcaggcgtatccgctgtttgtacagcggggagatcaccaccggctcgccgccgacgtcccctaacagcccacgcgacagcacgttggccgcgctgcccggctcgcggttgtcgagggcgtagacccgctcgccgaagcggaacagggcaatctgccgctcccctaagcgggcgccgatccccgcctgcgccggaatggcgtcaaggtcgcataccgcctgccacggtcgggatgggagttcgccttcgggcaacgtctcagtcagcagcggctgcggctgaccgcgcagatcgcggcgctgcacagcctcgtcgggctggtcgctattaacgaaggagcggaacagcgccagacgctgcggatcgttgagggtggtctgccactcgcactggtagctgtcgacgatccgggccatctcctgctccagctcctcgccaatgccaagactatcctccagcaccacctgccgcagataggcgacgccgccctccaggttatccatccaggtgctggttcgctgcaggcgatcggcggtacggatatagaacatcagcagacgatcgatgctgcggatcagcgtcgcttcgtcgagatcgctggcaaacaggtcggcgtgacgcggtttcatcccgccgttgccgcagacgtacagattccagcctttgtcggtggcaatcaccccgatatctttcccctgggcttcagcgcattcgcgggtgcagccggagaccgccatcttgattttgtgcggggcgcgtagccctttatagcgatgctcgagccgtaccgcaagcccggtggagtcctgcacgccgtagcgacaccaggttgagccgacgcaggatttcaccgtgcgcagcgacttgccgtaggcgtggccggtttcaaacccggcgtcggccagctcgcgccagatagccggcagctgttccagccgcgcgccaaacaggtcgatgcgctggccgccggtcactttgctgtagagctggtaacgtttggcgatctgcccgatggcgatcagtccgtccggcgtcacttcccctgccgccatccgcggcaccaccgaatagctcccgtccttctggatattggcgaaatagcggtcgttggtatcctgcagcggcaggtgcgccggcttcagcaggtactcgttccagcaggaggccagcaccgaggccaccagcggtttgcagacatcgcagccgtgcccctggccgtagcggctaatcaactgctcgaaggtatggatatggttaacccgcaccaggtggtagatctcctggcgcgaccacgggaaatgttcgcagacgtcttttttcacttcgacgccctgctccgccagctgatactccatcacctgtttcaccagcgcgctgcagccgccgcagccggtagccgctctggtgcagctttttatcgccgacatatcccccgccccattgttcaccgcctggcagatatcgcctttgctgacgttatggcaggagcagatcggcgcgctgtccggcagcgccgcgacgccgagcgccttcggcgcggctccctccagcgcgggcaggatcagactctccggacgcggcggcagcgccatgccgttcagcatcatctgcagcagcgtggcatagtcgctggcatcccccaccagcacgccgccaagcagggctttgccgtcctgactgacgacgatttttttgtaaatctgctgcggaccgtcggtccattgatagctctgacagcccggcgtgcgcccctgcgcatcgccaaacgaggccacgtcgacccccagcagcttcagtttggtgctcatgtcggcgccgctaaagcaggcgtcctctcctgcgagagtggccgcggcgatgcgcgccatctgatagcccggcgccaccagaccgtaaattttattgtcccacagggcgcattcgcctatcgccagcacgtccgggtcagaggtgcggcactggccgtcgatgtgaattcccccgcgttcgcccacctgcagcgcgcagccgcgggccagcgcgtcctgcgggcggatccccgccgagaagaccaccatgtcggtccgcaacgcgccgccgtcggcaaagttcagccgcaggccgtcggcctcgcgcacgatggcggtggtcgctttgctggtatgcacccccacgccgagggcgacaatcttctcccggagcatcgccgccccgccgttatccagctggacggccatcaggttcggggcaaactccaccacctgcgtctccagccccagctgtttcagggcgttggccgcctccagcccgagcagcccgccgccgataaccaccccgctcttcgccgcggcggcatgggcggcgatacggtcgagatcgtcaagagtgcggtagacaaagcaccccgcgagatcgttaccggggattggcggaacaaagggatacgagccggtcgccagcaccagtttatcccagtggatttcatgcccctcggcgtcccgtaccagccgtgcgtcgcggtcgatggtcgccaccgcctcgccgaggcggagttcaataccatgttcaataaagaaatccccggccgccagcgacagcgactcggcgctgcgtccggcaaaatactcggagagatgtacccggtcgtaggcgggataacgctcttcgccaaacaccacgattcgatattgctgatgcagattgcggctcacgcattgttcgagaaaatggtggccgaccatgccatgtcccaccagcactaatacaggtttcgtcatcgtcattattcctgcagcctgcggctgcgttgaagaggggtcaaaaagccagtccacggtggcaggctcatcgctttccaggcgcgcggtaagcgcggcggcggcggtgcagtcgcccatcagcagcacgccgcgcaggcggccatcgcgcagcagcaggcgacgatagtggcggtcgatggggtcccagctggtataaatgtcatcctgttcgccggcctgctgctcgccagcgctaaagagttcaatgccggtgaccttcaggcgggtcccggcatcctgccagacaaagccctcgccgggggcgccgcacaggcgatccgccagcacctcggcctgacgcaggcagggagccaccagcccccaggtctggccgtcaatttcgcaacattcgccgatggcgctgatccccggcagcgaggaggccatctgacggctggctcctaaaacaagctccgagcccacgagaccaacaaggagcgcg

SEQ ID NO: 63 - DNA, 149602 bp, Unknown
  source: /note="Description of Unknown: MKP2_coc_1 Mutant Bacteria sequence"
acgccggacagcggcatattccccaccggggaccgcaggccgcgctgaccgtcgccggcaccgtcagcggctgggacgaggcgctgcgtatttcacgggacttaaccggccgcgcgctgccggtggcccgcctgttggccgatgcgatcggctatgccgaagacggcattccggtcactgcctcgcaggcccacgccaccgccagcaaactggaagagctgcgccatcagccgggcttcagcgaaacctggctggtcgcgggcgaggccccgcggcccggcagccgcttccgccagcccgccctcgccggtaccctgcgcatgctggccagcgacggtctcgacagcttttatcgcgggccgctggccgagcgtctggcgcagggtatggccacgctggggatgcctgtcaccctcggcgacctgcaggcccaccgcgccaggcgtccggggccgctgacgctccagcaccagcagggaacgctgtggaatcttgcccctcccacgcagggactggtgtcgctggcgatccttggcatcaccgaccgcctgaagatggccgatgccgacgacgcgcaaacggtgcaccgtatcgtcgaagccaccaagcgggcgtttgccctgcgcgatgcgcatatcaccgatccgcgccatctggatgtggatgtacagcagttgctcaccccggaagccctgcagccgctggccgacagcatcgacgacgccagcgcttccccctggggcggcggcaaaggcccgggcgataccgtctggatgggcgtcgtggataacagcggactggcagtgtcgtttattcagagtatctatcacgagttcggcagcggcgtggtactcccggacaccgggatcgtctggcaaaaccgcggggcggccttcagcctcgatccgcagcatctcctggcgctggcccctggcaaacagccattccacaccctcaaccctgccgccgcccgcctgaacgatggccgggtgatggtctatggctcgatgggcggcgacggtcagccgcaaacgcaggcggcgctgtttactcgctatatcctgcagggggtgccgttgcaggagagcatctcccgtccgcgctggcttctgggccgcacctggggccagtcctccgattcactgaagctggagggacgctttgcccccgcctgtatcgcgcgcctgcgcgagctggggcacgacgtagaagtgctggctgatttcagcgaagcgatgggccacgccggcgccattgtccgccatcccaacggcctgcttgaaggggcgaccgatccacgcagcaacggcgccgccgccggatactaaggagcagaccatgaccacacagccagactggagcgagtatctgacgcagatgactcacctgttggatatggagctggatgcgccgcgccgtaaggagctggagcgccagtttgcccgcatcgccgccatggcgcagccgctgatggactatcccctcgggccgcgcgaggagattgcgggggtgtataaagcatgacacttcaacatttcaccatcgccgagatccagcgtgcgctgcacgaaggcgaactgagcgcccgggagatcgcccgccagacgctggacgatatcgcccgcgtgaatccgcagatcaacgcctggaccgaggtcaccgcccagcgcatgctggcggaggccgacagcatcgacgccctgcgccgggaaaagcgccccctgccgccgctggcaggcattccttacgcggtgaaaaatctgtttgatgtcgccgggcacaccaccctcgccggcgccgaactgctgagcgaccggccgccggcagccagcgatagctgggcggtgcgccagctgcacagcgccggcgccctgctcagcgggatgctcaatatggacgcctacgcctatggctttaccaccgaaaacagccactatggcgcgacacgcaacccgcacgatctgtcgcggatcgccggcggatcttccggcggttcggccgcggcggtggcggccggactggtccatttcagcctcggcagcgacaccaacggctcgattcgcgtccccgcgtcgctgtgcgggatctttggcctgaaacccaccttcggtcgcctctcccgctccggcagccatccgtttgtcgccagtctggatcatattggtccctttgcccgtcgggtggccgacctcgccgcggtgtatgacgccctgcagggacgcgacccggccgatgactttcaggccgataaagccagcgagcgcaccggcaacctgctggagcgggggctggaggggctgcgctgcgcgcggctggggggctatttcaccacctggtgcgatgacgacgcccgggcggccatggatcgggtcgcccacgcgctgggcgccgacagcgagctgcagttcgcggatgccgccctggcccgctcggcggcctttatcatcagcgccagcgaaggcggcaatcagtacctgacggatcttcgccactcgcccgagcgctttgaacctcactcccgcgagcggctgctggccggcgcgatgatcccctccgcgtggtatctgcaggctcagcgttttcgccgtcatgctcgccaggcaatgaaatccctgttcagccaggccgacgtgctgatcgccccggccaccccatgcagcgccacgccaataggcgccgaggagatggtgattaacggccagccgctgccggtgcgcgccagcatgggaatgctgacgcagccgatctccttcctcggcctgccggtggtgaccgtgcccctgcgtaccgccagcggcaagccgattggcctgcagctgattgccgcgccgtttaacgaacaagcctgtcttcgcgccgcgcgggcgctggaagcgatgggcattaccgatgcccgagtggcggagagtgcagcatgatcaatctggataatgtagaccgcccggcgatcctcgccgaggtgacggcggcgttttatcagtatgaagaggcgctggtcagcaataacatcgaggcgctggatgcgctgttctggcacgacccgcgcaccgtacggctgggagccggcgaaaatctgtatggcatcgaggcgatccgcgcctttcgcgccgcccgccccgccgccggtctggcccgcgatctgcgccataccaccattaccacctttggtgcggatatggcggtgtgcagcaccgagttcacccgcgagggcagcgcccgcctgggccgccagcagcagacctgggtacgcttcccctacggctggcggattgtcgccgcccaggtcagtctgatggactgagtggcgtatacgggagcggaccggagactaaggtatccaccggcccgcttccggtccggtaacatgctatttggagtcgaagatcatggtgttcatcagagctgctgaagcaaaagatatcccctcgctgcaaacgctatttctgcagctgggctatcagacggagacggcgatcttagcgcaacgcatcactgccccgcagagcatgatgagtgcgctggtggcggaaacggaaaacgccgtgtgtggcgtaatcgttatcaattttattttaccggtacatgagaaccgtttatgggcattaatttccgcgctggtcatcgaggaatcgtcacgtggatcagggataggccagcagcttctccaggccgcagagcgcctcgcccgtgataaacaatgcgctcagatcgagctttcaagtagtgaaaaaagaataagagcgcatcaattttatgaaaataacggctacaaggaggttcgcaaacgcttcgttaaacatttgtcttaaccgcctgcgcgcgagggctttccccggatgaccgtaactatattttgcccagcaggatatttaacatgcggcgcaggggttccgccgccccccacaatagctgatcgccaaccgttaacaccgagtagactgggtcattatttagcgacattttcttgtagcggccaatacctacctgcagcgaaccactaatagcagccggggtcaatttactgacactctcttgcttattattgcggacatagtttacccacggatgggaatgggtgactaactcagcaaattctgcttcgctgacctcacgtttaagtttcagcgtaatcgccgcgctgtgacagcggatcaccccgacccgaatgcataaaccattgaccgggatggtacccggcgcaaggccaagaattttattagtttccgcctcgcccttccattcttcgcggctgtttccatcgcccagatcgctgtcgatccacggaatgatgctgcccatgagggggacgccaaaattctccaccggcatgcccgcgctgttaatcaactcactcactttatttaccaatggcagcacggaacctgatgatgtcagttcatcagcggataaatgctgactgatataagcgctttgcgcgattaattcccgcacctgtttggcgcccgccccggaggcagactggtaggtcatcacgctcatccattcaatcaggtcagccttgatcagcccggccagccccatcaggctcagcgtgatggagcaattgccgccgacaaacagtttcaatcccgcttttaccgcgcgatcgatattatcgcggttgaccgggtcgagaataatgcaggctttttcatccatccgcagcgccgaagcggcgtcaatccagtaaccttgccagccatggttaattaacgccggatagatggctttggtataatccccgccctgacaggtgatgatgatatccatttcggcgagtgcgctaagggaattcgcatctttcagcctgtcgcttttaccattaataaccgggcccggggcacccgcactggaggtactaaaaaaatgcgctgtaatatcgtcgaaatcattttcttcgatcatgcgttgcaacaatactgaacccaccatccctcgccaaccaacaatacccacctgcttcatttatttaacctttataagttatgagaatgttaatttgagtgtcgccataccttatatcgtatcccccaataaaggtcattacccagcacctcgatttttatcattattaaaatgtttcatctgccatcagcgatatttatctcttattacggtcaagcagatataaggcggcggcgactgtccaatattcggcattcaaaggtgaaacggcgtagcgaaacggcagcagcttcttctctgggtactatgaagagtaacttgcattttgatagttactatgtcaatttgctggcaaaagccacctggttactggacagcccatgaaaaatgaaccgctttgccacgctccctgccccatcgcccgcagcctgggccgcatcggcgacagctggagcatcatgatcctgcgcgatgccttcgcgggctttacccgctttgacgagttccagaaaagcagcaacgccgcgcccaatattctgtcgcgccgcctgaaggaactggtcgatgacggactgctggagaaggtgtgctacagcagcaccccgccgcgctacgaataccacctcacgccgcgcggccgcgatttccgcatggtgctgctggcgctggcggaatggggtaatcgccacttcgcccccgaagggcgtcagatgcagctggtggaaatggcaacccagcgccacgtggagccagtcatggtggataaagcgactggggaagagattatcccgggtaaatacgccatggtgccgggccccgccgcctcgccgctgatgaaatatcgtcatgaatatctgctgcgcaaacgcgaaggcgatagcgggcaaaaattccagccggaaccttacagagatgccagcaatgaatccgaccagtaagaaaaatattcttgtcctggcggccctgggcgctgccgccctggcggcagcgagctacggcgcttactggtggcataccgggcgctttatgcagaccaccgatgatgcctatgtcggcggcgacattagcgccatctccagcaaagtctccggctatatccagcagctggcggtgcaggacaatatggcggtgaaaaaaggtgacctgttgatccgcattgacgaccgcgattatcgcgccgccctcgcgaaagccgccggagaagtggcggcgcagcaggccgcgctggccgatatccaggctacccgccagcttcagcaggcgaccattgccggctctgcggcctcgttactggccgccacggcggcaaccgaaaaactggctaacgacaaccgacgctataacgccctggccgcgtcgagcgcgatttccgcacagatccgcgataacgcctccgccgattatcgccgggcgcacgccgagcaggagaaggccaaagcggataaaaccgtggccgaacgtcagctggcggtgctggatgctcgccagcagcaaatcctggctgccctggcgcaggcccaggctaacctcgagatggccaggctgaacctcagctataccgacattcgcgcaccgttcgatggggtgattggcaaccgccgcgcgtggtccggctccttcgtcagcagcggtacgcagctgctctccctggtacccgcgcacggcctgtggattgacgctaacttcaaggaaaaccagctggcgcatatgcgtgccggccagccggtgaccatcgtcgccgatgtgctgccgaaccatacctttaaggggcatgtcgccagcctggcgccggcgaccggctcacgcttcagcattctgccggcggagaacgcgaccgggaatttcactaaaatcgtgcagcgggtgccggtccgcattgcgctggaaggtgacggggcaaagcttgacgtcctgcgcccgggactgtcggtgatcgtcaccgtgaacgaaaagagccctcgatgagcaccgttcaggcgctgtccgccccgcagggtctgtcgatgccgacggcgaagaagatcttcgccttcgccagcatgtgcgtggggatgtttattgcccttatcgacatccagatcgtctccgcctcgctgcgggatattggcggcggcctgtcggcgggcgacgatgaaaccgtctgggtacaaaccagctacctgatcgccgagatcattattatcccgctttccggctggctggcccgggtcatgtcgacccgctggctgtttgccgcttccgcggcgggcttcacgctgatgagcctgctgtgcggctgggcgtggaacatccagagtatgatcgccttccgcgccctgcagggactggcgggcgggtcgatgatccccctggtgttcaccaccgctttcgccttttttcagggcaaacagcgggtcatcgccgcggcgacgatcggcggcctggcctccctcgcccctacgctgggtccaacggtgggcggctggatcaccgaaaactacaactggcactggctgttctttatcaacgttgttccggggatttacatcgcggtggcagtgccgctgctggtaaaagtagacagcgccgaccccactctgctgcgcggcgccgactatctcagtattctgctgctggccttgtccctcggctgcctggaatataccctcgaagaaggtccgcgctggggctggtttgatgacgcgaccctgacgaccaccgcctgggtcgccctgctctgcggcgtggcctttgttatccgcaccctgcgccatccgcagccggtgatggatctccgcgccctgcaggatcgaaccttcagcctcggctgctatttctcgtttatggccggcgtcggcatcttcgccaccatctatttaaccccgctgtatctggggagcgtgcgcggtttcagtgcgctggagatcggcctggcggtattttccaccggtctgttccaggtcatgtctattccgttttattcgtggctcgccaaccgcgtcgatctgcgctggctgctgatggccgggctgatcggctttgcggtgtcaatgtacagctttgttccgatcactcacgactggggggcggaccagttgctgctcccgcaggcctttcgcggactggcgcagcagtttgccgtcgcgccaacggtgaccctgacgctgggcagcctgccgcccgcgcgcctgaagctggcctccgggctgtttaatctgatgcgcaacctcgggggcgccatcagcatcgccctgtgcggcacggtgcttaacgacagaaccaatctgcactacagccgcctggcggaccatctgaataacgccaacctggcaatgagcgattttgttcagcgcagcgcggcaaacttcaccgtccaggggatctcgccggatgccgcgcagacggcggcgctgaaaaatctttccgcactgacgctgcgggaggcgcgaactcaggcattttccgatgctttctacctcatcatgatgggttttttaattgccgcgctgctggttcccttgatgaaaaagccgccggcacactgatactacaggagagttaactatgggcgtttccgttaaacgcattgtcgtcaccgggatggggattgtcagcccgctgggctgcggcgtacagcacgtctggcagtcgctgctggcaggaaagtcagggatcacccgactcagcgagcagctggtcgcggatattccctgcaaagtggccggccaggtgccgtccattgacagcgatccgctgcacggcttcgacccgctggcgaccatcccggcgaaagagcgcaaaaagatggatcgctttattgagtttgcgctggtcgccgcccgcgaagcgctggcccaggccggttggtcgccagcatctgaggccgaacaggaacgtaccgccacggtgatcgccaccgggatcggcgggttcagcgagatcgccaatgcggtacataccaccgatgaacgcgggccgcgtcgtctctcgccgttcactatcccctcttttctggccaacctggccgccgggcatgtgtctatcgcccacggcttccggggccccatcggcgcgccggtcaccgcctgcgcggctggcgctcaggccattggcgatgcagcgcggatgatccgcagcggcgaggcggatattgccctctgcggcggcgcggaagcggcaattcatcgcgttagcctggccgggtttgccgcggcaagggcgctgtccagcgcctacagcgaccagccggaaagcgcttcccgcccctttgaccgtgaccgcgatggttttgtgatgggagaaggcgccgggcttattgtgatcgaatctctggagcacgcgctggcgcgcggggccacgccgctggccgagctggtgggctacggcaccagcgcagatgcttatcacctgaccgcaggcccggaagacgggaacggcgcacgtcgggccatggagatcgctattcgccaggccggggtgaccgtcgacgagattgaccatatcaatgcccacgccacctcgacgcaggtcggtgataaaggtgagctggcggcgattaaaacgctgtttggcgcgcatccggtcgccattacctcgacgaaatccgccaccggccatctgttaggcgcggccggcgggatcgaggccatcttcaccattcaggccctgcgtgaccaggtggtgccgccgacgctgaacctgcatcaccccgatgaagacgcggcaggcatgaacctggtggcgctgcaggcccgcccgcagaagatgcgttatgcgctgtcgaacggttttggctttggcggcgttaacgccagcctgctgctgaaacgctggcaataatcgtcagctcccctgcggtactggccgacgggggatttccaccgttgcggcttttgccctgctgctggagtaaatcaagtacagcgcgatacccagggagacaatggcgcctattcggctcatcgagaatggaatcgacgcattgtccagccagccgaagttatcgatcaaggtcagttttgagcgaagaacggaccacactatctaaagaatgatatcgcctattatgttgggaccgctcatgttaaaaaagggatagcttttcttttcattgacgataacgaaggaattttcatggttgaggttgaggaaataaaaaagaaatatcccggcgcagatgcctggcaaatgggtgacagtccgcaactggctaacgaacttgctgacctgatcaaaaaagggatcaaaacggcctcttgcggatcttttgcctcttaccagcaggaagaatccgccccgagaatcgggagttataacattattcttgatggtcagaatgttccagtttgcgtgatcagactgatttcgatgcagctggttcgtttttgtgatgtcactgaagcgttcgcccgcaaagaaggtgaaggcgatttaagccttgaatactggaagaaagagcatcagagatttttcagctctgaaggtcatttttctgaagatatggagttgatcgcagaagaatttgaagtggttgaggtgctttaaggcaaggtcaacgggctgacgttttatcactggccactcataacactgttcgcttctggcgcggagcggacaagctgtcgagctaaaggtccgcattgagcaaggagctgacgtgccagctataattggtaataaaatgagagtagaactattctgatttgtttaaaaaaacatttttacatccaagggcaaaatattttttatgctatcttacatgctatctcaatatgccaggctacctgtgcctgaagttactctacgttcatggttaaaacaatggttgtcagagcaggaatcgaggtgtacagacagaagtttctcggcgcgatttccctggagagaaactggattatgtcaggaatattttttacaacgaaaactcaaaattgatggaaagcaatttcttactggcccccgttatcagggcggaaatattaacaaaccttttattgatattgtaggtatggattctgacctaaatcatactgcattagaactcattagtaaggaatggtcacaactcagagctcagtatgtccgcattcttgtacccggccagtccttcccgcagggtattcccgaccagtatatatatgccacttctttttctgaaccccctgaattcaatgataaatctcttactttgcaagtggcgacatacgaagattttgactggtgttgtcaggccctgggcgatgcctataagcatacatggcagacagttcgcgaactatctgcaagcaatttggtagcagttgatgacgaagagttgtgtgaccatatttctgagagagaagtatatattatctatgaaaacgatgttcgcgccgggttgctaatatgccagaaaggaaacatcgcttttctgagaggatatcgtattactgacaaagtaatacttcctgcttttcgtggtcgatcattgtcggcccgagcgcaacgcctgctgtaccgattattaactcattccgattcggaactatctttgtatatgggcacaattattccgcagaatatcccctcgatgaaaactgcagaaagagcgggacgaacttgcatcctaagttatcaatttctacccatctgcagaacccacgattaacagcaatgctaatttatcttcagcctacacaggggacgtccagggcccgggagtactcccctggacgcattaatgggcaggatgtgattgttgcgcaggctatcatatggcgtgaggtacagcagaatcaggcttcgtagcaatgaggggctcacagcgtccggaatccacccggtgccgtaaatcaccgtaaggtctgtcataaggtaatttcatcacgcatcgcgacaccttttttcttcatgcaggccttctctttcacggtttgtcagaactgtggaccgcagtaatctccactccgtgctttaatcaatgagagtgtgtcgggtgcaaattaaactacctttctcaacagcaaaggcgggatacccctgccctcgcagggtttctgcgtctggtaatatgcccatgacagtctcaaagaccgctttgagggtttcccggtttaaggcacaaaatcgcgtggcgttgcccccaaaatgcagcgaaaagcagcggtaaaggccgccgggcatgagaaaccaagctggtaagcgacctgtttgattggaacaccgttcgcgagaagatccaacgaagcgcaaattctggctctctgcttccatgttctaaaactaaagcctgtatccttcataaacaatcgggaaaaggtccgttccgacatggccgacataaaagccagctcgctcagcgatgcttcccagcgctgattgaccagtagcgatctggcagcgctgaataatcgctcatcattcggcatgggaagcgccatcgttaaaggtggagcctcgctgagaatttccagaagcaacaacgctatcttccgttgactcggtctggcgtagtcctcactgaacagccctgcgataagctctttgactaagggcgtagccgtgatcacatgcacctgctgactcttcgtaaagctcgtacattctgcgataaggctactgctgaaatagatcgccctgagatcggtttgtgaaagcagatggtaactatggatatgcaaaggcggtagccataatgcccgctgaggagggatcacccaacggtcactctctgtttgcaccagcataacccctctggtggcgaagagtagctgcccctcaacatgatgatggggaggatctgcctcgccgcgttgatagcttatcgcagtactggaccagcctgtggcttcatcatgtcttggcgctttatctatactacctggcatttcagatttagcccctgccattatcatatcgaaactggaaccacccggagtagagccttaggcaatgggtgcgtgacttatcatcctgatcatcaaagatattacaggagcttaacctcatgcgtgtacactttatcgtacatgaaagttttgaagccccgggcgcatatgaaacctgggcaataaaccagggtcatgatgtaacttactcacgcgtctatgcaggcgatcggctacctgatgacgccgtaggcatcgattttcttatcgttatgggcggtccgcaagatcctgacaccacgcttgaagagtgcccgcactttaatgctaaagcggaacaggcgctgattgcttccgcggttaaaaccggtaaggcggtgatcgatatctgcctgggttcacagctaatcggtgaagcgctgggcgcgccgttctctcatagcccggaaaaagagattggtaaattcccgatcacattgaccgaagacggcagtaaggatgagatgttctctcactttgggaaaacactggcagtgggtcactggcataacgatatgccaggtttgacgccagaggctaaaattatcgcttacagcgaaggctgtccccggcagatcgttgcctattcagaccgcgtctttggtttccagtgccacatggagctcacattggacgttgtagaacggctgatcgctcattctgagaaagacctgagccgtgcagcagaatatcgtttcgttgacacgcctgaagcgctccgggcgcacgattacagtgaaatgaaccaagtgctttttgactttctgcataagctggaagcacgttacaaagcagcgcaagcataatgttatgctcggtgagcttgccatcggttttgattttaatgtccgctcctggcacagagcggacaagctatctgagttgaaggtctgatatgagcgatcagcggacgttggctacactgttaaacgtcgcagactcagcttctgactgccagtttttcgcgagttgggccttcaaagtagatgctcctgatatggcaattacggggttgagtcagcacaaagcgaattgcttcccagactgaacgcccattcatcagacgttcccccattttgggctggctatcgacaaacgcctctaaccctgtcagctcgaaatccgggggatacaacccagtcacacgtatattttctttagacaactggtacgaaagtttagttgtaaacccgctaagcccgtgtttactggcaaaaaaagcggggtgcgcaattgaatctgtaaaattaggaatcccacatgaagatataattgagacgatatccgcactttctgaacgtcttaacccgggtagcaatgcctgagtcagcagaatagaacctgtcaggcctgaactgatagtatttatgatttctgtgtctgattgatcgtctaacgttcctgaaagccactgagcagcattgaggattaaaatgtctatgggcttgtctaaagttaacaactgtgaagaaaactgagaaagggattcaggtagggttaaatcacagagatgccctttcgccattccgccttcagccgtaatgatactgcaagttttttgaatgtcatcagcgcgcctcgcgcaaaaatccacctcgacgccttctcgcgctaaccatacgctcagcgcctgaccaaatcccgtgccaccaccggtaattacagctcttttacctctcagcatcttcatccatcctttattaatgaataggggggaatgtagatatatatgaggaagcagattgacatctttcagttagtgccattttttgacgatagggataagttgtactgctacatttccatcgcgctcctgtgggcatgcaacatccgctcctggcactagtctgccgtaaagggcagctttaagggaggagcggacgagctaacgcaggtgaagatccgctgtgagcgaaaagcggatttttgtcgttctgtcatcaaaactggcgacttatattaggatatcgcaatacccctcgccctcaggctacgtctgcttgaattgattgcctcaagaaggcggaggcggctttccgctgattgccgctacgcgcacagcaggcgtaccggtcatttatgtcagcgtcggattccgcaaggggtatccagaggtcagcaaaaacaacactatcttcgcttcgattaaggagaatggagtttttatggctgataacgagagcacggctattcatcctgatgttgctccagcagaaaatgaagtcgtcatcgtcaaacgcagagtcggagctttctcgtttactgaacttgagatgatccttcgtgctcaaggcatcgaaaacctgattcttacgggtgtaactaccagtcgtgtggtgctttccacagtcggacaagcttttgatctggattaccgccttatcgttgtgaatgattattgcgcagatccagatcctgacaccaatatgtttttacttaaaaaagttctacctcaacatgcttttgttaccagttcctctgaaatatcaaaacctgggcataaaactatgaatttctgacgtcaaaaaacgggaggatataaccggggatccccagtcatctgaacgtccgctcctggtggcgatagtcagcatcatgtctggcccaggagaaatctccagaagcgtcagtgcgagaaggaaagtcataaacgtttcgatgaaaggcatcctggtagagtccgaaaacatatttccgctacgttacctccgttcgatgcgggcaagaagcggacgttgtacttcaatcatcatcgatttgaatgacagcaaggtaacggctaatccaggtgacgtaaatgtgtcgcgatcccccagcttagaacggtacagcttccattaatcaactcgaaaacggcgtaactcgcattgggttgtgcatagcggtgaaaatcatccacagatccactttttaatgtcgcaagcacgccctgaatgacctgcccgtgagacacaatacatattgttcgatgatgatgttttttttccagactggataaaaaatgtatcattcgctgcgaagcatctgagagagactcaccccctggcggacaatactctgcatccagggtgaataatgcttctgcggcgtccggattattttgcagcagcgctacggttgtcatgccttcaaactgaccaaaagcctgttctttcagagccggttcagctatcagtgaacaataaaaacgctcagccaggcgctgtcccatttgccaggcccggccaagtggagacgcgtaaacacattctacccggtaatcactctctgcaaacgctgccaataaagctgatgtttgacgctccccacgaagcgtcaatgcgctatcactgtgtccctgaataatattttttacattccattctgtttccgcgtgtcgaaccagtatcacttgcatcattgcagggtcacataagccgttatttgaaatgttatcatctaaaaaccctcctttgatatgcaggcaagttctcagctctcgacgaaaaacaggaacaagcgtagctgataatggttatgttcagcttcagaagtgacgtagttatcgacgttaacgtctgctctggcacagagcgaacgcttccccttgtcgacgcgaaaagcaactctgcccatgcctctatctcagtaaaacctgaatcagctgcacgacgatatacactcccgctaccacctgtatgatccgaaacccccatctcagatagcgccattgatggcgttcgctggcatcagcggcttcaatggcgggatcataacgttttcttttcctggttctgaaggtatcgaatccccacaggacgagaagaatgatgatgatgattttttcaacgataagatggttcacaaagagagactccggtcttctcacggttacaggcagaatagataaaccgcctggatgtagccaccactaaatgtaggggtacctgaaaacgaagccaggccttcctggattatctgtcttatgaccgcgtaaacgcatagcaacgccataaaagcgacattcatttccgacacatgctgcgggagtccccttctccgacgcctcaggctgggtgataaaacgacggcggctgcccggtcacgcggcggaacatggtggcgaaagaggacgcattgtcgtatccaagggataatgccacttcgttcaccggtttgcctgctatcaaccatgccagggcgctcaccacgcaggctcgctgtcgccaggcggaaaacgacaggcccagctgcttcaggaaatggcggcgaaaggtactaggactcataaacagcgccctggcccagcgcgccgcaggatcatggatagaggggttaagcaaaaaagcctgacaaagcgccagcagcgccggatgctgcggcaacggaatgtcaaattcgcggaccggcatggcggccagttccagcaacatcaactgtatcagcgcgcgatcgcgtgggctgtcgtacaacggtggtaaatccacagcctcaagcagtagctggcgcaacagcggcgagacgctgatcacttcgcaacgacggtgtttaatgaaagcggccacacaatctggctcaatatacaagctacgcgtggtcacccctgcaaatctgacggcatgcacggtttcaggggggatccagacagcgtgttgcggaggaaccacccattctccgtcctgcgtagtgacatacatcagtccggtcgcgccatacagcagctgtgcgcgacgatgctggtgcgggggcaggataaacccttgcgcatagtcattacctaacgccaccacatcacgatcgagtcgatcgacctcgtcaatttttacgttgcgcacacctgcctccctctgaccgatttacaaaggtaattgagcgctacgcaaatgggaagcagtacgcgaccggtataagctgctcgctcattttcaggtcggggatactctcttgaatgagatcgttattattgcgctggcaggctttactaccggcattaccacggtgctgttcggcttcggcggcggctttgtggtggtgccctttgtctatcaactgatgctccggcagccggcgatcgcgggcaacgccatgcatgtcgcggtggctacctcaacggcggtgatgatatttaacgccggctgggtcagctatcgaaactggcgggcgggcaggcttaccgcgcagacgctgtttccgttgttatggtttattgccattggggcggtggtaggctcctgtctggcggggatattgagcgagaagatcgttcgcgtgctgtttattctctatatgctggcaaccatcagcgattgtttgttgcgcaagggttttttcacgggcagcgctcggcgtcgcctgtccctgccagtggtcaccggcggcggtgtgattatcggtacgatcgccgcattgctgggcgtgggcggcagcgtcatgacggtgcccctgctacggcgacacgggtatgcaatgcaggagtgcgttagcgcatccaacccgctttctttgcccgtggcgctatgcggggctgtgacctatgccgtcattggctggcacagcattccgctgagcggatttttggggtttatcagcctgaaaattttaggcctgctcgtcctgaccggctgggccgggatagtgtttagccgccgggcaatccctgcggtacctgatgtatggtatgcgcgaatctatgtgctgctgctgtgcctggtactcctcgccatgcttattcaataatcaaattacattctggtgaaccggtgcaacagacgcggccgggcggagccctctccctggagagagggccaggttcaggggcaacaagctacccgcgatacggatgggtttcgcgccagtggtcggcaatctgctgccgggtgcagacccacaccttgtcgtgctgctggatatagtcaaggaaacgctgcagcgcgcggaaacggcccggacgccccagcagccggcagtgcatccccacggacatcatcttcggcgcggtttctccctcggcgtacagcacgtcaaagctgtctttcagataggtataaaactgctccgcggtgttgaatccctgggcggtggcgaagcgcatgtcgttggcgtcgagggtataaggcacgatcaggtgcggccgctggctgccgtcgctgcaggccacttcgctccagaaaggtaaatcatcgccgtaataatcgctgtcgtagtcaaagccgccgtgctccaccaccagctggcgggtgttagggctgtcgcggccggtataccagccggtgggcggtttgccgaacaggtcggtcagtacctgcaccgctttttgcagatgcgcgcgctcctcggcgatatccatgtgctgatagtggatccagcgccagccgtggctgaccacatcgtaatccgcggccttgattgccgccacaatctccgggtgccgcgccagcgccatcgccacgccgaaaacggtcaacggcagcccgcgctggctgaactcacgatggatgcgccagaaccctgcccggctgccgtactcatagagtgaatccatcgacatatggcgcgccgggtagctggcggcgccgataatatcggacaggaactgttccgaacccgcatcgccatgcaggacgtgattctccgcgccttcctcatagttgaggacgaactgcaccgcgatccgcgccccacccggccagcgcgcgtgcggcggctcccctgcgtaacctcgcagatcgcgaggatagtgttcctggttctctcccatctcctgccccttttaaaatggatttaacgactgaaactgtccgcttaacgcttttttctccgggaacgctaagtccccatgcttgctggtcgccaggcccagcgcgaccagagactccaccatcttcaccgccgcgctgacaccatcgatcaccggcacccgcagctcgcgggtcagctcctgcgccagggtcgccatcccgccgcagccaagaacaatcgccccgctaccatcctctttcagcgcgcgaaggcagcgctcacgcactttctcctgcgccaggccactgccgtcttccagcgccagcaccggcaaatcaatggcgtgcagcgccgcgcaatgttgatgaaatccgtactggtgcagcaaatgacgggcgatgatcagcgtgcgcggcagcgtggtcacaatggagaaacgggtggcgaccatcgtcgccatatgcattgccgcctccgcgataccgatcaccggcccctgggccagctcccgcgccgccagcagccccgggtcgccgaagcaggcgatcacatgcccatccactccctgctcgcgtccggccctgatctgctccagcacgccgaccgccgcgatggcttcgtcaaagtggccctcaattgacggcaccccggcgcggggacagaccgcaaggatctcggtgcccggcgcagcgaccgcacgcgcggcggcgcctatcgtttcggtcatcgccaggctggtgttggggttaatcacttgtatacgaacggaagacatcacgactccttgtggccggcgaacagccgggaaaaatcgggcaggctgacgccatcgcgctcgaagcacaggctggcgacaatatgatcaaaatggtgcatcagcgcctcgctgagcggctgcagggctttatcccgcagcaaaccgaccagctgctggtgatcgtcgcaacggcagccctgtcgccagggggcgccccaggcggcaatcactaaagaggagcgctggctgaggcgggtcaccatctcggtgagcaccgggttgccggagatagcctgcagctgaatatgaaagtcagcggagtggcggatcgccgccgggccgtcgtgcgtcgcatgggcctgctgttcacgctgaataatgttctccagcgccgccagatgcggcggctgacagcgcgcgatcacatcggggagattggcgacctcgagcagcgcccgggtgcgaaagatcgcctgggactcttccacgctcgggctggtgacgtgtgcaccacgtttgggcgtcaacgtgaccagttgcacagcggcgagtcgttgcagcacctttctgatgccggtgcggctcacggcgaacacctccgctagcgcctcttccggcagtttgctgcccggcggcagctgatgttcgacgatagccgtcatcagcgcctggtaaatgctttcgtccttgtcctgcagcgctggcgcggcctggagacgatgttcattattcattaacccactccggtttcacttatcgatagcagatcgtatacataaaatttattttttgtatacaagattcatcattctggcctggatcctgcaatagcctcagcaatccatatcaaagggttttcattcagaggagcaggtttcatgccacattcatcccacacgcagcagacgaagactcacgaggcggccgccggctacagtccgcggctatgtaatgacgatctggcgccgacccgcgaccagaactggagctggtacaatatcttttcattctggatgtcggacgtgcacagcatgggcggctacgtagtggcggcgagcttctttacgcttgggctggccagctggcaggttctgctctgcctgctggtgggcatctgtattgtccagctgtgcgccaacctggtggcgaagccgagccagatggccggggtgccttacgcggtgatttgtcgtcaggcgtttggcgttttcggcgccaatatcccggcggtgatccgcggactgatcgcctttgcctggtacggcattcagacctatctggcggcgaatgccctgatgctggtcctgctcaagttctggccctcccttgcctcgctgaccagcagcagctttctcgggctgtcgcccctaggctggctgagcttcgccactatgtggctgctgcaggcgatggtgttctggcatggcatgaacgccatcaaacgctttatcgatatcgccggtccggcggtttatgtggtgatgctggcgctggccggctggattgtatacaagaccggtctggatgggatctcctttaccctcgccagcaaatccctgagcgccggcgagcagacctggcagatgatcaccgccacggcgctggtggtctcctacttctccgggccgctgcttaacttcggtgacttttcccgctacggcaaaagcatgggcgagatccgccgcggtaaccgctggggactgccgtttaacttcctgctattctcggtggtgaccgtggtgattgtctccggcacccagtcgctgttcggcaaaatgatcaccgacccgatcgaaaccgtcagccgcgtgggtaacgatctggcggtggccatcggcctgctgaccatgatcaccgccaccatcggcatcaatatcgtggctaacttcgtctcgccggccttcgatttttccaactgcgcgccgcagaaaatcagcttccgtaccggcgggatgattgccgcggtgggctcgatactcctgacgccgtggaacctgtttaactcgccggagctgatccactataccctcgacgtgctgggcgcctttattggcccgctgtttggcatcctgatcgccgacttttacctgatcaaacgcggccgggtgtcagtggacgatctgtttgacgatacgccgcagggtaaatactggtaccgcaacggctttaacccgaaagcgattgccgccctgctgccgtcggtgggccttgggctgattatcagctttattccgaccctgcatgaagtggcgaacttcagctggtttatcggcgtctttctcggcgccaccgcctaccgctggctggctcgcgacgagcgtgaagtgcaggcgaaagccgccttccgctccggcgcggtggcgcaaaaagagtaaccttccccttctgccgcggcgtctggccgcggcaggctgcaaactggcaccaatcttgctgtttatcactattcccagagcgttaagagaaggcaggttcgatgatggattaccagaccgcggtgcgcggtgcattttttgatatcgccggcgtggcggagaccccggatgaggtggccgcccaggctcgctatctcgatgatggcctgttgtttctgcaggaggggaaaattatcgccctgctgccatggctggagggtgaagcctttctgcatccgctgaagggctatgtcgacctgcggggcaagctgctgttgccgggttttgtcgatacccacattcactatccgcagaccgagatgatcggcgcctttggcgaacagctgctggagtggctcaccacctacaccttcccggtggagagccagtttgccgatgcggagtatgcccaggagatagcgcagttttttgtaaatcagctgataagccatggcaccaccaccgcgctggtgttttgtaccctgcatccggcatcggtggaggcgttattcagcgaagcgctgcgcctcaatatgcgcctgatcgccgggaaagtgatgatggatcgccatgtgcccgactacctgtgcgaaaccgccggggagagctacgagcagacccgggcgttgatccgccgctggcatcagcgcggcaggctgggctatgccatcaccccgcgctttgcccccacctcgactccggcgttgctggaggcggtgcagcgcctgcgggccgagtttcccgacacctggctgcagacgcatctcagtgaaaaccgggaggagatcgcctgggttaaacagctgtggcctgagcatgcgcgctatctggatgtctatcatcactatcagctcaccggcgaacgcagcgtcttcgctcacgggatccatctcgatgatgccgagtggcaatgcctgcatgacaccgggtccgccgtcgccttctgcccgacgtcgaatctgtttctcggcagcgggctgttccgcctgcccgcctgctggcagcaccaggtgcggatgggcatcggcagcgacgtcggagccgggaccaccttcagcatgctgcggacgctgggcgaggcctacaaggtaggacaactgcagagctatcgcctgcgcgccagcgaggccttctatcacgccaccctcggcggggcgcgcgccctgcggctggaggagaaaattggcaatttccagccgggcaaagaggcggattttgtggtgattgacccggcggtcaccccgctgcagcgcctgcgcataggccgctgccatgacatttatgagcagctgttcgtgctgatgaccctgggtgatgaacgcaatatcagcgagacgtgggtgaacggcgagcgggtgtggtgtcaggattgacccgtttgagaagcggaaacaaccttcggtaagacaagaaatcagcaccaagccctaaaggatcttaaaagatccttcagggggattaggctggttaccagttaccgtaagggtagtgcttccctttgataaaatctataatatctttgtcatatccataagaaaaatcgctccttgttatatctttacaaatatctaatttattacctgatacggttttcaggactgacggagtgacgcggtaattagattcagatccacttccctgtaaccagacggccacttttccttctggagccagaccaatttgcattctgtcgtaccaggcaatacgtccccgataatccttatatttactcggcataagcatctgttccagtaccgatttagggatcgtcaaatgggtttcatacacttttttatcaataatcgagtcccagcaaaaaataatatgtcgtggagggcgctttacgtgattccagtaccctaccggcgcacggtctttgtcgttccactcgccgatcacgccaggcagatcgggtgtgctattcagcgtgttaaagcgatagtcatttccatcaacgtcaagaatagcggcaaacgtcaccacggcgggtaacgctttgggtgtgaaaaagttaaaactccactctgttggcgcatcactatgcatggcggtgttgggcaaaggttttccctgacaggcagccagcgccaataatggaagcagacaggccgcacgtattatttccatattttatttccgtccatatcgtaaacggtacgctgccagcggtcatcaggccggttggtgaatgtcaccagcttcgccggtttgaccgcaccgctgataataccccgactgtctcgtataacgctgttccagttggccgagcagtggatatatttttcggccaacatccgcaattccggtgtggtaaagcctggggcagacttaccactccttatggctcggcccatcgcaatcgctttttcacacaaaccgttcagttcttgcctaagctttaagtgtgcatttgtatctcgaataggttcaaacaccgccccggcatcctgggccgcatcgatcatcacccgcaataccacttttgaccagtcgttgaaagtcggacggttgataaccagagctgctccactgcgtttctgtagcgtgccgtaacggtcagctggcattctgtcgtcatgccaggtatcgacgctcacctctaccgcatttagcagtagagctattgccggatagccgtccatggttttaagttttgcacaggtctgccggtaaatacgcgtttccgtatccgggatggaaaaggggacggtttcaaactctggtcgggtaaggaaataagcttcattctcgttgggattatagccgccaccaatgtcggagtgcgcaccgggtagcgccagctccggccacgctggctttacgctgttcaatgcaaagttaaaacgacattcatgctgcgcggtgatgtgaaaaaccttctccgctacacctggacgtagcgccagattgacatctcctgtgtctgcgctgtgcgggttaaagccgttaaccggggtgccgatcgccgccacggtatcaaatatgcccagaaagcgggttttaccacccggtgcaccggagaattcaataccattcaaaccggctctaatcgccgtgataatgtcacggtcctgactgaatacccgattggcaaagtgccgtgccgcaccagccccgcgactgaaaccgaatatatcaaattgtatctctttgatggtgcaggaaccatcgcttgcatgctgaagtaaatattcctgaataccgacagtcagagctgcaactgccttatcggtttttctcaccacaccggtatcgcctcgaccagtacccattccgtaagtattgtcgccagctccgtcttccgtgccaataccttcaacataaatggcgtgctggcctgctccgctatcgggtcggatatcctgcctgtacaatatatacaaccagtgcacattgctataatagccaatatagctccctgcggcagtaccactatagccatgctttagtcgcacgcactgagagtacgccgttaccgcatcggcgtcattcatcccgaaatgttcgccggaacaggcggcctgacggtcaccgctattattcgcattgtttccggttccatcaaaaaacacaccgatggttagtgtgatttcccgttttttctttgcggcctgcgcacgctgttcaggctcgggctgttggttttttttcttcgccgtttccgcccgttcagctacccgcccggcattgcagtccctatcgtaggagtgagaaaagacggtcgggacgaaccgagcacgacacgggcaagagctgtagctgtccagtgagccagcccattctttcagggatccaccgacatcgtaggtgtcacccattcccccacagacgcgaaatcgcccctcgtgcttaccgcaggtcaccggatcgcccaccctgacctgttgccgctcaatgccgccaatgtggtaagtgtcatcaggcgcacccgaaagtatgcgtcccccacaggtggttttatccaggtgatacagaaagaatcccttcgccataatccctcacgaatgtaatggttataaaatcaacgcatcataccctgaagcatggctaagtcgaaattacctgtttctgattattgttaccgcgcctgaattggcccatttgcaggactatcaaaaactcattgccaggcctacaccatagcctgtggtgttattgccgaacatatagcgcgccaccagccgggtgcgggtgataaagaccgggtatttactgctgtccagctcgaggccaacccccaaggaggtcaaaccggtaaagcccagcgcccctcgctgctcgccgagaaattcagtatgcgccccctccagcacataacgcagtgggttgcccagcagcgtccagtcggctatcggcgcgcggcggcgcagatacaggccgagattctccgcgctggcctcgccctgcaccacctcggcgctactgccgaaactttgcagatgcatataggagtaacgcagttcggcatcaatatcctgggtggcagagaagcgttcgtaatccagcatcagtgccccgcccagcccccaggcgttgaaccgaccgccgtcgagaaattgcagatcggcgttggtttttcgctcaattgcccagctaccaatacgcgcatcgctggccagggtaccgagcatcacattgacgatcggccgcagcaccaggttgcctccgaggctgtcccggtgcagcgaaaaatcccaaccgacgccgccggtggtggtcagactgttccatttggtcggcacattccgcgtctgttcgccattgctgaccacaaagcgcgggtcgtaacggctgtaacccatcgtaccttcaaggtacagaggaaacgactcgctgagggttgccccgccgccaaactgggtgatggccagattatgtttgtcgttgctgccggaaccaatgttgagatcgctggcggtcacgtcagggacgacggtatagctcatcagagtcaatacggcatcggcacgctgtttgatggcgtggccgttcgccgccagcgtcgctggcgcggaaagcgaaagtaccgacaggagaacgaaaagacgcaccatatgtcgtttgccacctcagcgacaggctaacaatattgccacctaaatcagcaggctggcgttcactcagtatagtcggtgagtcaacctgcgcgtccggcggggagaaaaagcatcgggctggtcaggccgcgcctccgcggctatgcagcagttccacattttcaaaaggcatgcgcgtcacccgattacgcccatcattttttgccgcatacagcgctttatcgacgcgggaaaacagttgttcaaccgtttcgccgtcatgatgttcagccacgccgatgctgacggtcaccgacagcgtctggtattcgctaaccgcctggcggatcccctccgccagtatcagcgcgcggccgatcggcgaatggggcaaaaaaagcagaaactcttctccaccccagcgataaattttatcttcgcggtcgaccgacgtttccagaatacgagagagcaccagcaggacctcatcgcctttttgatggccgtgaatatcattaatgctcttgaaatgatcgatatcgattaacagcagacaataaccccgggggataaaagttggcgcctcaaccagacggtgaaactcccggcgattaagcaagccggttaacggatcgtgggcggcggaaaattccagctcttttttcagatgcacttcttcggtgatatcgtgaatgatgcatagcatcagtcgaatattatacagcaccaccggcccggcataagtttggacatgacgtagcgagccgtcagccagaatatgcgtaaaattaagcggtttgtgaccgccaggcagattggcaatattattcataatggggatgacgtcccggcccagggtatttatttgccaggtatgtttggtgcgcatttcctcatcggaataatgataaaaacgtagcgcggcaatattggcatcgacaatccggccatctttatgagggtcgatcaacagcatcggcgcggtattggtcataaaaaagcgagcgaaaaagccattgttacgccgctggtagcggcgggagccggtatgaatcgactgattttgcgccagcagcttcacggcttcaaacagcagcaagcaaccacagtcttcggtatcaatcagggtggttttgcaatacaccgactgcaacccattggcggtgggtaacgtccagacttcgaatatctcgctcatggtgtcgagatagcgaaggtagtgctgcagttgcgtttccggacaggtggaataaataccgttacgcatctcattgagcgacatctcgccgctcaatgtccgggaagcctgattggcatagaccaccctttcgttaaaaggatgaactacccatatcggggtgcttaagacctcaaaaacagccagctcttttaataacatacaggccccaaaccgacccactgccggcgcggaacggcacttaacgctgtgcagccccaacgctggtttaaagtgaaagcaaaatagacaccgagaaaccgcaattacgcgcgagcgcgccaagtatagtcggttatgcgcccagtaaagccctctgagggtgactttgcgcgcagtttaaccaacagaagcgatgctgcctttaataataattttatttcaacagcatagcagcaatgccagaacgggtagtcgcttttgatcacagagtgtgcatcgccaacaggggttacccggcaggcacagcggcatagtccagggcgggcagagagtcgcttttctgcccaggctaaccgtgatagtttctatcattacgctcattcatagcgacaattgccttgaaaaaaatcgccactaaagtcacccttgccgacattgcgcgtgaagcgcgcgtcggcgtagccaccgtcgaccgggtgctcaataagcgcgcggcggtgaaagagtccacggcgcggcgcgtgctggaggccgcccgccggctgggttttaccctcgagcagccccactatcgcctggctgccggcaaagcgccggtcacgatcagaatgggctttatcctgctgcaggagagccactccttctacctgccgttggcccgggcgctgacgcgcgaggctgccccatggctaccggcgggccaggcgccggtgatactgcattttgccatcgatgcggtggaagcgatggctcaggccattcaccgactcagcgatgaagtggaggtgctcggcctggtggcgctggatcacccgctgattcgccacgcggtggcccgggccgccgcccgcggcgtgcgcgtgttcaccctgctttccgatctgtcggtcccccagcgcagcgggtatatcggcctcgataatcataaagccgggcgcacagccgcctggtttatcgagcgcttatgccgggggaatggcgaaattggcattatcattggcgataatcgttttacctgccaggaaagctgtgagatcagctttcgctcctgcctgcgagaacagggcaaggggcaacagatccttgagccggttcgcagtcatgaacgggcggatatcgccaggaccgtgacggaacagatgctgactcagtacccggccctgcaggcgatctacgccccctgcggcggcgtcgaagggatcgtcgacgcgctgcgcgacagcggccgtcagcaggagatcgctctggtctgccacggtccgctcagcgacagtgaactggccctgatcgatggcaccatcgacatcatgcttaaccaccggctggatgagtttgccgccgttacgctgcgcgccatggcggacgctgcttcacgcccccatagcgaggtgatttcactccctcagcctttcgatatcatcaccaaagaaaatatgtaaattttcggctccgtctccagcggagacggttatcgggcggaccgcgccacctctcgacttgataaaaaattatcaaaaaatccatcaattaaaatcatgatgattatcataaaatcaaaattccatcattgttgataatgaaatctttattcaatactcagcggcatcccttgtatgaaaaaggaagccgacatgatacatcctatcgctaacgccccctgcagctggggcgtcgatgacccgaaaaaccctaacctccctgcctgggctaccgtgcttaaggaggcggcgcaggctggctatcgcagcattgagctcggcccctggggttatctccccaccgatccggccagcctgcgtgcggcgctggagcagcatcagctgtcgctggtcgccggcacgatctttgacgatctggtgagcgaggcccatttccccaccctggtggcgctgacccatcaaatctgccgcaatctgtcgcaggtagccgctgccgaaccgatcccgggccgccctttccagccgccctatctggtgattatcgacttcggcaaccccgaacgggcgcgctttgccgggcgcggcgcgctggctccgcgcctcaatgacaaagactggcagcgcatgatggagcacattatcgcccttagcaccctcgcctggcaggagtacggtgtgcgggcggttatccatccgcacgccgggggcagcattgaattcgcggatgagatcgagcggctggccaacgatatcccgcacgacgtcgccgggttgtgtctggacaccggacatctctattacgccgggatggatccgctcgactggctggatcgctattaccaccgcctggactatctgcacttcaaggatgtcgacccgcaggtttatcagcgcgctatccatgaaggtatcgacttcttcactgcctgcgccgaaggggtgatgtgcccgctcggcagcggcgccattgactatccggctatcaaagactttcttgcccgccgggggtatcagggctggataaccattgaacaagagcgcgacccgcgccatgccgcaggcagcctgcaggcggtcacggaaagtctgcgctatctgcgcgacgtcggattctgacaggaggcacgacatgattaacggtttaaaacctctcgaccgcaccctgcgctggggcatggtcggcggcggcggcagcagccagatcggctatattcaccgctctgcagcgctgcgcgatcacaccttcacgctgcaggccggcgcctttgatattgatgccgagcgcggacgccagttcggccaacggctgggggtggatcccgaccgctgttacgccgactatcaaagcctgttccgcagcgaggctgcccggcctgacggcattcaggcggtgtcagttgccacgccaaataacacccactatgccatctgccgggccgcgctggaggccggactgcacgtggtgtgcgaaaagccgctgtgcttcagcagcgaggaagctgacgagctggtggcgctcagccagcgacggcgcaagattatcggggtgacctacggctatgccggccaccagctgatcctgcaggcccggcagatgatcgccgacgggctgctgggtgatatccgtatcgttaatatgcagtttgcccacggttttcacgcccagccggtggaacaggaaaacgccagtacccgctggcgggtcgatccccgcttcgtcggccccagctatgtgctgggcgacctggccacccatccgctgtttctggtcgaaaccatggccccgcagctgaagatcacccggctgatgtgcgccagacaaagcttcgtcaaaagccgcgcgccgctggaagataacgcccatgtactgatggagtatgacaacggggccatcggctcactgtggagctccgccgtcaactgcggttcgatgcacgggcaaaaggtgcgaatcatcggtgaaaaagccagtctcgaatggtgggatgaacagcccaaccagctacgctacgaaatccagggcgaacccgtgcgcatcctcgagcgcggtatggactatctcgatccgctggcgcgtcaggatgatcgcatcggcggcggccatcccgagggcctgtttgaggcatggtcgaatctctatcgccgcttcgccatcgccatggatgccgccgaccgtcgcgacgaggcgctgctggccgacttctggtacccggacgcccgcgccggggcgttcggcgtccgctgggtggaaaactgcgtgcgttctgccgacaacggtgcctgctgggtcgacttccgctaactcgccggctcagggcgttcgtcctgagcctttacggctatttttctgtccgcgccagctgggttttatccgcctcatgggcgcggtccgccagcccctggaacgctccggcgccatagtattgcgcgggaaccggcaatgcctgcatatcgtgccctggatagatctgcagttcgccgaggtcgcataagcggaatcccccgacctgctccggcatggtcaggcgatacggcggcatggtttcgaatgggaccggcgtcggcagccggttttcctgtagatcgtagttacgcttcagtaccagaaacttatccggcacccgccggtgactgttccaccagtcgccgtcgatctgctgaaacatcgcttccgtctcaccgcgcgtcgccaccagcagccgggtcagcacttgtttcagcgccgcatccatggcctggttataatcctccagcgaaccgccgtggccgctgaggatgacattaatcgccagcctcgcgcccagtaaattggagtagagatcctcgggcgaaaaagcggaaatctcttcggaaaacccggggaccgactggaagccataccactgggcgatctcatgccactgggcgatttcgaaggccagatgcccggcgagccaggccgccagctgatagcgctgcctaacgcccgcctgcggcgtaaaggcattcagctgcacgcggcgcacgcccagttcttcactgtagaagatccgccccgcctggcccagcgtcggcgcaatacgattgaacagataaaaggtgttgtccgccgtatcgcgcacatgggcgatatcaataaacccgccgcggcgggtatagataagcccgttctgctcctcgctgagccccagcagatttttcaccgcaccgaacgcgctgtcgttgtaatggtgcttacccagcgtacccagagtcaacacattaccgatctggtacatcgggatcggaatgcccgccgcgcgcacgtgcaggtcgtaaccaaaagcgcagcacggtcgcagcgactccggcggcggcagctcaccgagggtgggcgccgtatggatcgccgtcacggcgggtagcaccggatcctgcgccagcgccggcagcgccagcgcgaataatagccagaaggctttacgcatcaacagcctctccacagcaataaaagtgcgcgcatcttaccggcagatagcgcctgcggttttagttaaaaacggtattcagcgccgacaacgaaactattgcgcgcgtaaaagccgctcttccgttcgtcgcggcccggtggttagtagttcttgcgcggaaaagcgctggctatcccccattaccatcatcctgcggcaaggtggcgcggtgattgtattcaaaaggtgaatgtcgtataacatagcgctaccgaggggtgtcccgtgagggctgagatggcgcaagccgaaccctttgaacctgatctgggtcatgccagcgaagggacgggtcggcaattttgccagcattaccgccattgcctgttcacacccctgcacgcccggatctcccctgaataaatggaggtcctgtgatcgttcccgcttttagccaaggtctttacggccgtttacgccagctggccgccgctgactggcagcgctatgtggcgcatcctttcgtccagcaacttgcctctgggacgctggcggaaaacgcctttcgtcgctatctgacccaggattatctgtttctgattcactttgcccgcagctacgcgctgctggtgagtaaactgcgcacgctgccggagatgcgggccgcggccgcctcgatgaatgccatcctcaacgaactgccgctgcacgtcggctactgtgcccagtgggggattagcgaaccggagatggccgcccaacctgaagcccccgaaactctcaactatacccgctatgtgctggatattggccactcgggtgacgcgctggatctgctggtcgccctgatgccctgcgtcgcgggctacgccgaaatcggtctcgacctgctgcagcatcccgccacccgactggacgataacccctacgcctcatggatccgcaactatggcgatgaaggctatctgcagggcgtcagcgccgcgctggcgctgttggaaacggtgtggcagcagcgcgggagcgaggcgcgaatcactgagctgagcgagattttcaccaccgccacccgccttgaggcgcagttctggcagatgggcctcaacgccgcggcggagacccgggcgtgacggcgccgggtattgaggtccgtggcctgagcctgcatgtcggcgaccgtcggctgttcgacaacctgtcgtttacggtccccggcgggcagtgggtgtcgctgctcggcgccagcggcgccggcaaaaccagcctgctgcgggtgatggccggtctggcgcccgccacccgcggagaagtggtcgccagcgatgggcaaccgattcagggccgtctggcgtggatggggcagaaagatctgctctacccctggctgagcgttagggacaacgtcgccctcggcgcgcggctgcgcggtgaaaaagtcgatcgtgcccgggtcgccgccctgcttgaacaggttgagctttcatcctgcgccgacgcccgcccggcgactctctccggcggcatgcgtcagcgcgccgcgctggcgcgcacgctgtatgaggatcgccccatcgtgctgatggatgagcctttctcggcgctggataccctcacccgtacgcgcattcagaccctggcggccaccctgctggccggtcgcacggtggtgcttatcacccacgatccgcaggaggcctgccggttgagccaccgcctgctggtcctctcggcggccgacggcgacattgatgatagccatcacctcgccggcacacctccgcgcgcgccggacgcgcccgatctcctgatcggccaggccgccctgctgcagcagctgatgagggcccaaccatgactggacgtctctggcgaggaggtatggtgttcggcgggctgatgcttctctggggtctggccagccgcagcggcattccccattttcttttaccctccccgctggcggtcgccgaggcgctttgggttaatcgcgcctatctcggctggcatacgcttatcacgctcagtgagatcctgagcggcctggcgctgggcgtgacgctcggcgtcaccctggcgctgggcatgatcctctccccccgtctgcagcgctggctgatgccgctggtgctcaccagtcaggcgatcccggtctttgccctcgccccgctgctggtgctgtggctgggctttggcatgagcgccaaagtggcgatggcggtgctggtgattttctttccggtgacttccgccttctttgatggcttgcggcgggtcaaccaggagtatctcgacctggcgcgcagcatgaatgcctccttcggcgctcaactgcgacatgtccgcctgatggccgccctgccggcgctgggctctggcctgcgcatggcggcggcggtggcgcccattggcgcgatcatcggcgaatgggtcggctccgccgaggggctgggctacgtcatgctcaacgccaatgcgcgactgcaaaccgatatctgcttcgccgcgctgtttattttagtactactgaccctcctgctgtggctggcggtagataccctgctacaccggctgatcgactggtcgccggaataagaatgacgtaataaaggaaaacagatgaaaaagtcgctattcgtcggggcaaccttgacggccctgttcagcggccacgcgctggccaatgaaccgctgacgctggtgctggactggtacattaatcccgaccatgcgccgattatggtggccgagcagatcggcgcctttaaggcccaggggctggacgtcaggatagtccccccttccgatcccgcgctgcctccgcgcatggtggccgcccgtcaagcggatctggccatcacctaccagccgcaggtgcacttctttgctgacgaagggttaccgctggtgcgtgtagggactctgattaattcgccgctgaatacggttatcgccctggataagcagatcaaaaccccggcagatctgcaaggcaagaaggtgggctactcggtcagcggcattgagcaggccaccctggcgaccatggcgcaacatgcggggatcgatccggccagcatcaaactggtgaacgtcaatttccagctgaccagcgccctgctggccggccaggtggacgcggttatcggcggctatcgtaatatagaagcgcaggagctgaagctgcagggcaaaacgccggtagtgatgaacgtcgaagattacggcgtgccggcctatgacgagctggtgattgtcgcccatcgcgacgcaattcatgaggcgaagatccgtaaattcctcaccgccctgcaggcgggagtgggctatctgcgcgcccatccgcagaagagctgggaggcgttcgccgccgcccacccggagcttaggaccgaactcaaccaccaggcgtggttgcaaaccgtgcccctgttcgccaccgatccggcagcgctggataaagcgcgctacgagacttacgaacagtttttatataacaataagttggtgaaaaaagttacacctttaacaaattatgcggtggaactgcattgagtcttgctatcgctgacggaaggcattccgtcagcgctttaacgtagcggcaataaaaatatagagactttctcactaataattacactttaaagggttatagtgacagagtgttgttctattataattcagcacgttacgttaattttgcccctggtaagaataacgtcaaaatagcgcaatcaataaaacgttgaatgcggatttaaaaagccatatattgtgcgcgctttatgaatgccaattcaatttcttacaccaattattcaaccagcgttcaaccgcaatgctggttgtgggagtgatatgatgacggataaagtccgtattgatactttacgtgccgatttattagacgcaaacaacgaaacctttttggcccgtcaggccgaattcgaatcgaatgtcaggagttacccgcgtaagctgccgctggctatcactaaagccgaaggcgtgtggctgacggatgcggataacaaacagtacctggactgcctcgcgggcgccggtactctcgctctgggccacaaccaccctgatgtattgcagagcatccaaagtgtcattaccagcggcttgccgttacatactctcgatcttaccaccccgttaaaagatcgcttctccgaatacctgctctcttgcctgccgggcgaagggaaagaatattgcctgcagttcaccggcccgtccggcgctgacgccgtggaagccgcgctgaagctggcgaaaaaatacaccggtcgtaccgcggtgatcagcttctccggcggctatcacgggatgacccacggcgcgctgtccgtcaccggcaacctgtcgccgaaagcggcggttaacggcatgatgccggaagtccagttcatgccttacccgcacctgtatcgttgcccgctgggcatcggcggcgaagccggcgtgaaagccctgacctactacttcgaaaacctgatcaacgatgtggagagcggcgtccgtaaaccggcggcggtgatccttgaagccgttcagggcgaaggcggtgtgaacccggcgccggtcgagtggctgcagcgcatccgcaaagtgaccgaagagcacggcattctgctgatcgtcgatgaagtgcaggctggctttgcccgtaccggtaaattcttcgccttcgagcacgccggtattcagccggacatcatcgtgatgtcgaaagcggttggcggcgggctgccgctggcggtgctgggcattaaaaagcagttcgacgcctgggaaccgggtcaccacaccggcaccttccgcggcaaccagctggcgatggccaccggcctgaccaccctgcgtcatctgcgcgacaacaagatcgccgacaaagtcgccgcccagggcgagtggctgaaaggtaaactggccgagctgcagaaacgctacccggtgattggccacgttcgcggtctcggtctgatgatcggtatcgaaatcgtcaagccgaacgaagcgcaggatcacatgggctgctacccggctgacggcgaactctctgccctgctgcagaagaaatgcttcgaagcgggcctgatcctcgagcgtggcggtcgtcacggctgcgtgctgcgcctgctgccgtccctgctgatcagcgacgcggagctggacgtgttcctcgacaaatttgaacaggccctgctggccgccggcgtaaaaccggtctgagtggagtaagtgactgccatgtccacattgaatccgattcttgctggttcagcgcagagcgttgaagcctatcagcaggttatcgagcagaccagccaggccgttgtgcagtggctgaagcaacctgagatgtatcaggggaaaagcgttgacgagctgcgtgagcgtatctccctagaatttaacgaacagggtttgggtaaccaggcggcgattgatcgtgcgatcgagtacttcctgaaagacagcctgtcggtgcatcacccgcagtgcgtggcgcacctgcactgcccgagcctggtgattagccaggcggcggaagtgctgattaacgccaccaaccagagcatggactcctgggatcagagcccgtcggcaaccattatcgagatgaagctgatcgaatggctgcgcgcccgggtcggttttccggcgggcgacgccggcgtcttcaccagcggcggcacccagagcaacctgatgggcctgatgctggcgcgcgacgccttcttcgcccgtcagggccactccatccagcaggacgggctgccgggggatatccgcaagtacaaagtcttgtgctcggaaaacgcccacttctcggtgcagaagaacatggcgctgatgggcctcggctaccgctcggtaacgctggtgaaaaccgacgaattcgcgcggatggacgtgtccgacctgcaggcgaagattgcgcaagcgcaggctaacggcgagcagatcatggcgatcgtggccaccgccggcaccaccgacgcaggcgctatcgacccgctgcgcgacatcgccggtatcgctgcggaacatcagatctggctgcacgttgacgcagcctggggcggcgccctgctgctgtctgagcagtatcgcgactaccttgacggtctggagctggtggattccgttaccttggacttccataagcagttcttccagaccatcagctgcggcgcattcctgctgaaggacgcgcgccattacgagctgatgcgttatcaggcggcctatctgaactccgagttcgatgaagaacacggcgtaccgaacctggtgtctaagtcgctgcagaccacccgtcgcttcgatgcgctgaagctgtggatgggtctggaagcgctgggccagaaacagtatgcggcgatcatcgatcacggcgtcacgatggcgaaaaacgtggcggagtacgtgaagtcgcagccgacgctggagctggtgatgcagccgcagctggcgagcgtgctgttccgttcccgtccggcgcagatggccgggagcgacgcggcggctatcgcgctgctcaaccagcgcgtcggcgacgccctgctggcctccggccgcgctaacgtcggcgtaaccgagcacaacggcgttacctgcctgaagctgactctgctgaacccggtggtgacgctggatgacgtgaaggttctgctgaacctggtggagcgcaccgctcaggagctgctggcgcaataacctgccttagcgaggcggcgcctgccgccccgctgtcagccttgcctgcaataagccgataatgtccttatcggcttttttttatttctttccgcaccgctaatgctctcttcgcagggcccgttgacccctgcctctcgcgatgccacagtactatcccgaaaataacaacgttcaggataaacgtcctgaaaatggggataatgatggagaaacgcttaccagggctggatctcgacgccctgcgcagctttgtgaccggcatggagtgcggcagtttcgcccaggcagcgctgcgcctgtcgcgttccacctccgcggtcagcgcccagcttaaaaagctggagagccagtgcggtacggcgctggtgaccaaacaggggcggcatctggtgctcaccgcggaaggcgaaaagctgttgagctacgccagacgcctgttggcgctcaatgatgaaaccctgcgcgcgctgcagggtgagcggctcaccggcgagatccaccttggtatgcaggaagattttggcgaatcgctgatgccggagatcctcgggcaatttaaacggcatcatccgcaggtgcggatagtcgccagggtggatcgcaatggtccgctgcgccaggcgctggcggaagaggcgctggatctggcgctgctgtggcaaaccgaagatcagggtcccgggctgggcctctgcccgctggcgtggattgcgcatcctgacctggatattcgcgctttgctggtctccggcgagccgctgccgctggtgatgttcgacagcccgtgcctgatgcgctcccgcgccattgcctgtctcgatgccgcggggatcccctggcaggtggtgttcgtcagccacagcctgagcggcatctgggcggcggtgcaggccgggctgggcctgacgatacgcacccgcatcggcatgccaggcaacctgcgccctgcaggaggactgctgccagcgccaggaagtctggccgtcagcctgcgacaaaccccgcgtgaggaatcgcattccgccgccgtggcgctgctcggcgaactgatgaccgaggccctgcagggatggctcgaaaggtgacagtgtcacgccatttccattcatcctcaccctaaccctctccctgaagggagagggaaccgttcggcagcatctgttaccccactccacattctgtctcccgggcaagcgcagcccagcccagcgccgttcccgcttcaatgcccggtggcggctacgccttaccgggcctacattctccctgcgcgctgatgtaggtcgggcaagcgcagcgccgcccggcaacaggcacaagagatgaacggaaccgtccggcagtcaccggcaatgggcattctgcgccattcccgcttcaatgcccggtggcggctgcgccttaccgggcctacacgcggctccgtaacgatgtaggccgggcaagcgcagcgccgcccggcaatgggcacaagagatgaacggaaccatccggcagtcaccggcaatggacattctgcgcctctcccgcttcaatgtccggtggcggctgcgccttaccgggcctacacgcggctccgtaacgatgtaggccgggcaagcgcagcgccgcccggcaatgggcacaagatatgaacgggtggatccgtccggcagccaacggcaatgggcattccgcgcctctcccgcttcaatgcccggtggcggctgcgccttaccgggcctacattctccctgcgcgctcctgtaggccgggcaagcgcagcgccgcccggcaatgggtataagggctggagggatccgtccgccagacgcctgcgccgcgggtcaggctttgctctcctgcagcagctgctggatcacctgctcctggcgggcataatccccttcgccgaatgcggtataacgcagctgtccgcgagcgtcgaaaatgtaatgcgccggccagtactgattgccgaaggcgttccagatggcgtactcattatccgccaccaccgggtaggttatccgccagtccttcaccgcctggcgcagcaggggcaacgaacgctcccagggatattccggggtatgaacgccaatcaccaccaggcccgccgcgcggtatttgttcgcccagtcgcgcacgtaaggcagggtatgctgacagttgatacactcccgggtccagaaatccaccagcaccactttgcccttcagacgctccggagttaacgccgggctgttgatccatgcgctgccccccgccagagagggcatcgcgctgctgggctgcggcgcggcgatcggctggaggctggtcttttgctccggctgcggcagacgggcggccagccgctgctccagcgcctggctcagtccaccagcgctttgcagatagcgatcgccgccgctggcgatcagcgccaccgaggccagcatggccccccctgccaaccggcgcagccgttcgccgaacgcctgtccgcgacgcaatctggcgatcaacgccgccccgcaccaccccagcaggaataacatcagcgccccgccgctgccgtaggccagcagcaagccgccggtagtcgcctgccccggatgcacaaagcccaggctaagtatcgcccccaataccggcccggcgcacggcgcccacagtaggcccaccgccagcccggccagcagagaaccgatccagccgcgctggcgtgaactggcatcgttaagctgattccccaacgctaccaggggtgaggtcagccgttgcgcgacgcgttgcgaaagcagactcagcccgaccagggcgaagaacgccagcgccagaccgcggcctgcgagggtcagattcaccacccagccgctggcgaccgtcaccagccaggagacagcgccgaacatcagcgccattcctgccagcatgatcgccagctgcccccggcggccccggacgctggcgaacagcagcgggatcaccggcagcgtacaggggctcagcagagttaacatcccgcccaaaaatgcaattaatatcgacatcgccttctcctcattatgccgtcgctgccgagagtggcagccacgacattacagcaaggccatgtaaggcgaatgtgtcgggaaagggggagaattgtcggcttagttatccgtcttccccggagatacatcaggatacaatcccgccgcggcaaggcgaacgctggcgtccaggccgccctgcgggcggttggccaggcgcagcgcgccgtccatctggctgaccagctgcgcggcgatcgccagccccaggccggtgccgccggtatcgcgattgcgcgagtcctccaggcgataaaacggctgcagcaccgcctgtagcgcggcctccgggatccccggcccctcatccagcacatgaagggtgatatcccccacggcgtcacgggtcagggttaccgtggccgtcgtaccgaatttcaaggcgttatcgataagattggtcatcacccggcgcagagcctgcggcggtacccacaccaccccggcggtctcttcgggacaaaactggaccggccggccgacatcggcataatcgcagacgatagtgtcgagaaacgcatcgagattcagccgctgtcgcgcctcctccagcggctgcgaggtgcgggcgaaggcgatgccctcccgcaccagacgggtcatattgtcgagatcctgcagcagtttgtcgcgcagttccggctggtcggccatctccacccgcagcttcattcgggttatcggggtttgcagatcgtgggagatggcggcaaggatccgcgctcgctcctgcagatgatcgtggatgcgcgcctgcatcgcgttaaacgcgcgggcggcgcgacgcacctcctccggcccctgctcggccatagttcccgccgtgtcgctggccggctccagggcatttaccgcgtgggtaaagcgggaggtgggcagcaatacctggcgaaccgcgtaccaggcgcaggccagcaggaggacaaactgagcgatcagcaccaccggcagccagcgggcgatggccggtagtttcggccacaggtcgagggtcaacggcgcgccgtcgtgaagggtaatatgggcctgaatatgctgccgcgggccggggatcgccacaatacttaccggatactgcgcgctcagcgcctcctgcagggagcgcgctgcgtcccgggcgcgccagctgtccgggtaatcgccgcgctccccggcgtccagcagatagcgataattgccgcgcgccagcttcggcagccattgtgggcgctcagcggccggcaggcggtcaaggatcgccacgctggtggcgacatcggaagccagattgcccagcatcacgctgcgagcgctgctcatacgctcataaaacagcagcgacagggttaaggtattcgccagcagcagcgccagaaacagcagcgccatcagcctcgactgcagcgaggcgggccagaacctcattcatgcctctcgcgaatggagaccggcaccgacagcacatagccttcgctgcgcaccgttttaatgtaggccggctcgcgggcatcctcccgtagccgttggcgcagtcggctcaccagcaggtcaatcgaccgctcaaacagttccgcgtcgcgtccctgggtcagattgagcagctgatcgcggttcagcacccgctggggatggtcgagaaacacccgcagcagccgatactccgccccgctgagggcgacaatcgccccgctgtcgtccagcaaatggcgagcggcagtgtcgagcagccagtcgccaaaggcgatcagcctgcccgcctcggtgatctgcaggttgggcggcagcgcccgggtgcggcgtaaaatggctttgatgcgcgccagcagttcgcgggccacaaagggcttaatcagataatcgtcagcccccatttccaggccgaggatccggtcgctgtcatcggtgcgggcggtgagcatcagcaccgggatatcctgctgcgggttggcgcgcagctggcgacagagcgttaagccatcctcgcccggcatcataatatccagcacaatcaggtcaatttgatggtttttgagtaccgaccacatggctttgccgttcgccgcgccgctggcgcgatatcccgatttttccagatagtcgacaatcagttcccggatgtcgcggtcgtcgtcgacgaccaggatgtggtcaatacgctccaaaggctgctcctgcggcaaaataaactcttcacaagcataagccgtgttgccggaagcgcaacgtcgcgcctccggcaaggcgcgggttacaaacgatcggcgtccaccaccgcctgcacaaacgccgtcggatcctcctgcggcgggttatggcccaccgctcccggcagatcccggtgctcatatttaccggtaaatttggcacggtagctggcgggagccggatgcggcgcgccgttattcgccccttccagggtgatggtgggcacggttatcggcggtagcgccgccagccgttgttcatagccggcatacttcgcttcccctttctccagccccaggcgccagcggtagttgctgatggtgatcgccacatggtccgggttatccagcgcccgggcggttttggcaaaggtcgcgtcgctgaattgccactgcggcgacgcctgatgccagataaatttcgcaaagtcgtgggtgttttgccggtaaccggcctccccacgcggggtggcaaaatagaattgataccaccacgacagctcagcctgcggcggcagcggtttttcgccaatctgctgactgctgatcagatacccgctcaccgagaccagggatttcacccgctgcggccacagcgcggcgacgatatccgccgtgcgcgcgccccagtcaaaaccggccagatccgcctgcctgatgttaagggcgtccatcagatggacaatatcggccgccatcgccgacggctgaccgttacgcggcgtgctggcggagaggaaacgggtcgtgccgtagccacgcagatacggcacgatcacccggtaacccttctgcgctagagccggcgccacctgggcatagctctgaatgtcgtagggccagccgtgcagcaggatcaccggctggccgtcgcgcgggccgatatccacgtagccaatattcaggtcgccggcgcggatctgctggatcttgtcgaacgcccccgcgtcttcagcggcgcaaacggcggcggaccacagggtggataaccccagcgccacagcgctggtatagcggatcagggataatctgttcatcgttttctcaccttttatcgtcatgaagagagtacgtgaccagtaaagcggaaatttgtatccgccatgtgcccgaccggggccatttttatctcttaatgtcagcgcagcaccgcgagatacagtgtgatacaaagtcgaggttggcaattgttgcgggcatgtgaatttatgcttgccccgggagataaatccgttaccgtggcaggcatttttcaccacttaagaacgcagaaacccgctatggcgatttttgatggtcacaatgacctgctgctgaatctctggcttcaccatcgcgaggatccggtgagcgccttctttgccgggatagagaacggccatctcgactatccgcgcatgctgcaaggcggatttgctggcgggctattcgcgctattcgtgccaccgcaggaatatattgcccgtatgacgccgcaatacgccagccaacgatgggatccgatcgatatcctctggcagcaaatggccatcctgaagcaacttatcgcccactccgctggacgcttgagattgtgtctgagcgcggcggatatcgagcgctgccgcgaggataaggtactggcgatggtggcgcatattgagggtgccggaggttttgatggcgagggccgcgacctgcaggccttttatgccgccggggtccgcagcattggtccgttctggaatattgcgaaccgcttcggcagcggcgttaacggttcgtttcccggtagcccggacactgggcctggactgacagcggcaggtatcgatctgattaagcaggccaatgccttgaagatgcagattgacgtgtctcatatgaatgaaaaagcgttctgggataccgcccatcactcgacgtcaccgctggtggccacccactccaatgcccacgccctgtgcccgcagccgcgcaatctgaccgaccagcaactgcgggcgatccgcgacagcggcggcgtggtgggcgtcaatttcggcaatgctttcctgcgcgccgacggccggcgcgatagcgacacgcccttaaccaccattgtccggcatatcgactatcttattaacataatgggtgaggatcatgtggcccttggctcggattttgacggcatcaccctgccggacgagctgggcgatgtggccggcttaccgcggcttatcaatacgttgcgcgctagcggctatgatcaattggtgctggataagctgctgtggcgtaactggctacgagtattaaaaaatgtttggcaacaataggttatattgtaaacataaagttaattccctacagattccgggttgatctctctcccggtgaagcgcaatatgcggcagccgtcacagatccaccattatccgtgaggcctgtagtcatttttaagaggaacaaaacatgtggaagaaacctgcttttatcgatttacgtctcggtctggaagtgacgctgtacatttctaaccgttaatcgccccgcccgccgttcgcgcgggcaccttcattcattacccggtccgtcttcatgttcattaaagtcctcggttccgccgccggcggcggtttcccgcaatggaactgcaactgcgccaactgtcagggtctgcgcgatggcaccattcaggctgccccccgcacccagtcgtcaattatcgtcagcgacaacggtaaagagtgggtgctgtgcaacgcctcgccggatatcagccagcagattgcccatacccccgagttaaataaagccggcgtactgcgcggaacgcatatcggcggcattattctcaccgacagccagatcgaccacaccaccgggttgctgagcctgcgggaaggctgcccacatcaggtctggtgcaccccggaggttcatgaggatctctccaccggcttcccggtgtttaccatgctgcggcactggaacggcggcctggtgcatcatcccatcgctccgcagcagccttttaccgttgacgcctgtcctgatttgcagtttaccgcggtgcctatcgccagcaacgcgccgccctattcgccgtatcgcgaccggccgctgccgggtcataacgtggcgctgtttatcgaaaaccgccgcaacgggcagacgctgttctatgccccggggctgggtgagccggatgaaacccttctgccgtggctgcaaaaagcggactgtctgctgatcgatggcaccgtctggcaggatgacgagctgcaggccgccggcgtcgggcgcaataccgggcgcgatatgggccacctggcgctcggcgatgagcacgggatgatggccctgctggcctccctgccggcaaaacgcaaaattctcattcatattaataacaccaacccgatccttaacgagcagtctccccagcgccaggcgctaacgcaacaggggatcgaagtgagctgggacgggatggcaatcacccttcaggataccgcatgctgatcactgacacgctgtcgccgcaggcctttgaagaggctctgcgggctaaaggcgccttctaccatattcaccacccttaccacatcgccatgcataacggcgacgcgacccgcgagcaaattcagggctgggtggcgaaccggttttattaccagaccaccattccgctgaaagacgcggcaattatggccaactgcccggatgcgcagacccggcgcaaatgggtgcagcggatcctcgaccacgacggcagccacggcgaggacggcgggattgaagcctggctgcggctgggggaagcggtcggtttgagccgcgacgatctgctcagcgagcgtcacgtgctgcccggcgtgcgcttcgcagtggatgcctatcttaatttcgctcgtcgcgcctgctggcaggaggcggcctgcagctccctgaccgagctgttcgccccgcagatccatcagtcgcgcctcgacagctggccgcagcattatccatggatcaaagaggaaggctacttttacttccgcagtcgtctgagccaggccaatcgcgacgttgagcatggcctggcgctggcgaaggcctactgcgacagcgctgaaaaacagaaccggatgctggagatcctgcagtttaagctcgacattctgtggtcgatgctcgatgccatgaccatggcctatgccctgcagcgcccgccctatcacacggtcaccgacaaggcggcctggcacacgacccgactggtgtaatcatgcagaaaacgtccatcgttgcctttcgtcgcggctaccgactgcagtgggaagtcgcccaggagagccatgtgatcctctatccggagggtatggccaaactcaatgagaccgccgcggcgatcctcgagctggtcgatggccggcgcgacgtcgcggcgattatcgccatgcttaatgaacgtttcccggaagcaggcggcgtcgatgacgacgtcatcgagttcctgcagatcgcctgtcaacagaagtggatcacctgccgtgagccagagtaaacccaccgtcaatccgccactgtggctgctggcggagctgacctaccgctgcccgctgcagtgtccctactgttccaatccgctggacttcgcccggcaggataaggagctgaccaccgaacaatggatcgaggtctttcgccaggcgcgggcgatgggcagcgttcagctgggcttttccggcggcgagccgctgacccgtaaagatctgccggagctgatccgcgccgcgcgcgacctcgggttctataccaacctgatcacctccgggatagggctgacggagagcaaactggacgccttcagcgaggccgggctggaccatatccagattagcttccaggccagcgatgaagtgctcaacgccgcgttggccggcaacaaaaaagccttccagcagaagctggccatggccaaagccgtgaaagcgcgcgactacccgatggtgctcaacttcgttctccaccggcacaacatcgaccagctcgataaaattatcgagctgtgcattgagctggaagccgatgacgttgagctggccacctgccagttctacgggtgggcgtttcttaatcgcgaagggctgctgccgacccgggaacagatcgcccgcgccgagcaggtggtcgctgactaccggcagaaaatggccgccagcggcaacctcaccaacctgctgttcgtcaccccggactattacgaagagcggccgaaaggctgcatgggcggctggggatcgattttcctcagcgtcaccccggaaggcaccgccctgccttgccacagcgcgcgccagctgccggtggcgtttccgtcggtgctggagcagagtctggaatcgatctggtatgactcattcggcttcaatcgctaccgcgggtatgactggatgccggagccgtgccgctcctgtgatgaaaaagagaaggacttcggcggctgccgctgccaggcctttatgctgaccggcagcgccgataacgccgacccggtgtgcagcaaatccccgcatcatcacaaaatcctcgaggccaggcgcgaagcggcctgcagcgacataaaagtcagccagctgcagttccgcaaccgtacccgctcgcagctgatctaccaaacccgggacctgtaatgacgctggcgacccgcaccgtcattttgccgggcggcctgcaggccaccctggtccatcagccgcaggcggatcgcgcggctgccctggcgcgggtcgccgccggcagccaccacgaaccgtcgcgcttccctgggctggcgcacctgctggaacacctgctgttttacggcggagagcgctaccaggatgatgaccgactgatgggctgggtgcagcgccagggcggaagcgtgaatgccaccaccctggctcgccatagcgcgttctttttcgaggttgccgccgatgctctggctgatggcgtcgcgcgtctacaggagatgctgcaggccccgctgctgctcagggaagatattcagcgcgaagtggcggtgattgacgccgagtaccgcctgatccagcagcatgagccatcgcgccgggaagccgcggtgcgccacgccgccagcgcgcccgcggcgtttcgccgctttcaggtaggcagcgccgacgcgctggcgggcgatctcgctgcgctgcaggccgccttaggcgattttcaccgcacccattacgtcgcccggcgaatgcagctctggctgcagggaccgcagtcgctggaggcgctcggcgagctggcggcccgtttcgccgccgggcttgccgcaggcgagcctccgccgccggcgccgccgctgcgcctgggcgagttcactgcactgcagctggcggtctccagccagcccgcgctgtggcgctgcccgctgatcgctttaagtgacaatgtcacgttaatgcgcgagtttttgctggatgaagcccccggcagcctgatggccagcctgcgccagcgccggctggccggggatgtggcgctgaactggctgtatcaggatcggcacctcggctggctggcgctggtcttcgccagcgaccggccggaagaggtcgaccggcagataacccactggctgcaggcgctacagcaaacgacgcctgagcagcagcaacactactatcagctatcccgccgccgctttcaggcgctgtcgcctctcgatcagctgcgccagcgggcattcggctttgcccccggcgcgccgcccgccgggttcgccgatttttgcgccgccctgcaagtcgccccgtcggtcagcctggcctgtcaaaccgtttccccaggggagcctgttgccacccagggctttagcctgccgcttagccgctggcgccgccgccctgagtctgacccggcgctggcgttcgctttctatccgcaggccgctggcgatctcgttgccaaatgcccggagaaagccgcgccgctgctccacctcccgtcaccgggagatccgccgaggctcctgctgcgaccgcccttctactgctcgcccgatcaggccgaggggctggcgcgtggggaacagctgcgcccactgcttgccgccctgcgccatgccgggggacacggcgagtggcatctgttcgacggcagctggcagttgaccctccagctgccggagcccggccgacggccggaggcgatcctgcaggccatcctgcggcagctcgcgctcccggtcgcctcgctgaccccaccgccggaaagtatcgctatccgttatctcatggctcaactccccgaacggctgggtacatccgggcatcagaaaggttggctggcggccctggccggtggcagcgcagaagatgcgcagtgggtagcgcgtcagctgagcctgattaccgccccggttaatccgccgatgcccgctccggcgccctgccgccgcggcgtcgaacgtctggtttatccgggaggcgatacggcgctgctggtctttattccgctgccggatggcgcctcgctggcggccctgcggctgctggcgcagcattgtgagccgctatttttccagcgcctgcgggtggagcagcagattggctatgtggtgaactgccgctatcagcgggtcgccgatcgcgacgggctgctgatggcgctccagtccccggatcgccgcgccggggaattgctgcgctgtggtaaagactttctgcgccagctggcccccatggatgaggcaaccttcagaccgctacagcagcgcctggccgctcagatccgcgccagcaggccgccagaggcgcgggcgctgtccgccctgcgtcaggagtatggtttaccagagctaacgccgcaggcggttgacgcgctgcgcgttgcagaggtggccgatctggcacgcgaaatgacccgccggcgtcgccgctggcaggtgctgttcacgacaggggattaatggccgggggcatccggggtcagaaaggcgctgacgaagcgcgtaaggatcgccgcgccctgcgggctctcctgcacctcgtcgtgtaaccgctgcgcgtcaataccttccgcctgcagcaccgcctcccggtggcggatcagcgaacgggctatcggcgcggaaaattccgggtgaaattgcgtagagaccgcgtgcggcccatagcgcacaatctggtggagatcgtgggaggacgcggccagcaccgtggccccttccggcagacgagtcacggtttgcaaatggctcagatgcgcaggaaatgtggccggcaggccgctcagcagcggatcatcgacaccccatggcgacagcgtaatggtttggctgccgctttcccgcccgccaggatgatacgccacctcgccccccagggcatgggccatcagctgatgaccatagcaaacgccgaacagcggcatgtcgatagccaccgcctgccggatccagtcggcggtccgttcgctccacgccagacgatcggtcaccatcgcccacgagccggttagcaccgctatggtctggttatccggcgtcggcagcggttcatcttcaaacacccgcaccgtggtgagctgcgtctgccacggcgccagcagcgtgcgaaaccagcgcggcagatcgccatgcgcctggcgaatggccgtcggcggcgtgccggtctggaccagcagtaatcggttacgtgtcacctttcctcctcgctccgggtcatgttcccgtaaaacactatgccgccgggaagacgatgggacaaataaccaattactatggacgatgcgcctgcggaataagtcctgtcgcttactgggcatcggcgctatcacgctgcggcacatcggctgccgccgaagatgcctgctgcgggacaaaaatatggtccaggatggcgcgcgccgtcggtccggctaccaccccatccccgccgccgttctccagaatcagcgccatcgccaccttcggatgctgataaggggcaaacagggtgtagaagatatggtcgcgcagacgcaccgggatcattttggcgttataggtctggttttgcttcaggctaaagacctgcgaggtcccggacttcgccgcgatctgatacggcgcagtatgaaacagcttatagccggtgccgttgggctgattcgccatcccatacatgccgttgcgcacaatgccccagtacggggatttcgggtcacccacctgcggcaggttcgccggctgctgataacgttccacatggtttccctgcttcatcgaatagagcagatgcggatcctgtactttaccattgttcagcagagtggtaagcgccttcaccatctggatcggggtggcgatccagtacccctggccgatgccgaccgagatggtgtccccctgataccagggctttttatgcacccgctgtttccactcccggctgggcagcaccccggcgtactcctcattaaggtcgatgccggtggactggccgtagccgaacttgctcagccattcatggatccggtcaatgcccatctcgaaggcgacctgatagaaaaaggtgtccgctgactcttcgatggctttagtcacgttgagcatgccgtggccggttttcagccagtcgcggtagcggcgttgcgtgcccggcagcgtccacgtcggcgccccgaagaagctggtgttcggggtgatgaccccagcggagagcgccgacagcgccatatagggtttgaccgtcgaagccggaggatatagcccctgggtgacgcggttgatcagcggccggtccggattctccagcagcgatttataggcctgatagccgatacctttgacgaagggattaggatcgtagctggggctggagaccatcgccagcacgccgccatcccggggatcgaccaccaccaccgccgcgcgctgccccttcagcaccgactcaatatactgctgcaggtgcaggtcgagggtcagatagaggtttttcccggccaccggcggcacctctttcagtagacgcaccacccggccgtggttatccacctccacttcctgatagccggtggtgccgtggagcgctttttcataatagccctcgatcccctgcttaccgatattgcggtcggcggcgtagttctcctcttcgccgtttttcgccagccgctgcagatcgctgtcgttgattttcgacacatagcccaccacgtgcgccagctctgcgccgtaggggtattcccgttgttggtagctctccaccgtcacgccggggaaacggaattcgttaaccgcgaagcgcgccacctccacatcgctgaggtctgacttgagggtgaccgctttgtagcggctggtgtggtgcatatcgtcgcgaaagctggcgatttcgcccggcgtcaggtcgacgataggcgtcagctgctgcaacagcgcggccatatcgggaattttgctcgggatcacctgcaggcgatacagggtgatattctgcaccagcggaatgccgttgcgatcgaatatcagcccgcggctgggggcgatgggcagcattttgatgtcgttctggtttgaccgggtctggtaaaaatcgtgctgctccacctgcagatggtagaggttaacgatcagcacgccaaagcagaccaccaccagcagaaaagcaattgcggcccggcggataaacagcatctcttccgcggagtggtcgcgaatttcatctctcaaaaggggcattagcggtacatcacctgaatcactggaaaagccaacggcgtaacggccgggaagcatagccttatcgcagcgtcagccctactgaaaggttgctaatgatctggcagaaatgtttcagcatgttagagggatcgttattcttaaccttgcccgtgacgcgtcaggctatattcacgatgcccgacgcgtcggcgcagctcactgttctgcgcgggccgcctcgtgggaggtagccgacttccctgaggtgtagattaagtacagcgcgagggccagacatatcaccgccgccagtctcgccggcgagaacgccatcgtgctgttgcccagccagccaaagttgtcgatcagcaggctcatcgtcagctggccaaagatcaccgccacggtggccgtagcggtgcctatccgctgcaccgccagcaccataatgacgatgtagggcacgccgcaaaaagcgcccagcagctgccacttaggcacctgtagcagatttaccgacgtcgctggagcaaaaaacaggatcagcaatcccgtcaccagcgcgccggtagcgaaggttaaaaaggcgctgcgcagcacccccacctggctgccaagacggccatttatcgccgcctggacgctaagcaatgcgccgccgcacagcgccagaatgatcactatcgtatccatttcccctccttaccccagagccaccagcagtaacgccgccataatcaacatcagcgccatggcgcgccgcggatcgattttgcgccgtgggctgccgaataacccgtaatggtcgatcgccaggcttttcgccacctgacccgccaggatgccgatcatggtcatggcaataccaatcaccggcgtcgccacggtcaagatcaccacgtaccccgcccccaacagaccgccggtgagttgccagccgggcagagaaaagaacgacgggctgctacgcgggctgaaaaagagcatcagaaaaaaggttaacactgcgccaatcccaaagatgctcatggttgcccacagatcccccacctggctcgccagcggccccagcaggccggcctcgaccgataatcccatgccgccggcaatcactaataaaatgaataataacgccattactgcgcctcctctgtacaacaggcggctgaggataaaacagcgtgctgatgcgataaacggtataatgcagaaaaccctattgcaggaattgcacagatggccgatgccagcagcgtcgattttcgcgcccttcagcttttcatcgcggtttacgataaccagagtttttccgtagtggcccgccgcgaaggggtctctccctcgttgatctcgcgaaccatccagcagctggaagatgccctcgggcagcagctgttctaccgcaacacccgtgccgtggtaccgaccgaagcaggacgccttttcgcagcgtccgcccgggaactgctgggacagtacgccgacgcacaacgggcgttacaggatcgggcacaggtccccggcggactggtgcggatcaatgcgccggtctattttggtcagcgtcatatcgccccctggcttccggaactggcggcccggcatcccaaactgcagtttgacctgacgctgaccgacgattttatcgatccccatcgcgatgcgacggatatcctttttcgcatcagcagcctgccggacgcgggctatcacgccagagtgtttggcagccagcgctattacctgaccgcctccccggagtatgtttcacggtacggcagcccgacttcgccggaggcattgcatcaacatcgcacgctggtgtatggcggttcgcagggagccaaccgctggctgtttcgccagcgcgaagaggcatgggtgcactatccgttgaccccgctcatgacctcgaacaatgccgatgccctgctcacttcagccatcggcgggatggggatcgtgttatttcccgactggatggtcagcgaagcgctgcacaacgggacattagtcacgctgatggaccgctattcggcggccatcagccacacgccatcgtatatcgcggcgatttatccttatacccgccatccctctctcaacgtgcggacagtgattgactattttgccgacgtgtttggatcgccgccctactggcagcgctaatgcgagtttcgtagtaaaacttgtcatatctcaaacaattagcattccttcgcccagcttgacgcggatcgtttcctttgccgcctcgttacggctatggttactaatgaggttaatctcaatctccaggccgacacggtcccaccagggggttgcctaacccttcattgaacggaaatagctattaaatccgtagattcattcaaatatcgcttattggtagcagtgtatatcgtaacggcattcacaaaagcaaacggagcctgatatgagcacgtctaacgacccatccaacaatgcatcccccgggaagtgccctttccacgccgagacgccaaaacagagcgccggcagcggcaccgccaaccgcgactggtggccgaaccagctgcgtgtcgatctgttaaaccagcactccaatcgctccaacccgttgggtgagaattttaactacagggaagagtttaaaaagctcgattactccgcgctgaaggctgatctcagagcgctgctgaccgattcgcaagagtggtggccggcagactggggtagctatattggcttgtttattcgtatggcctggcacggcgccggcacctaccgcaccgttgacggtcgcggcggcgcaggtcgtggacagcagcgctttgctcccctgaactcctggcctgacaacgtcagcctcgataaggcccgccgtctgctgtggccggtgaaacagaaatatggccagaaaatctcctgggccgacctttacatgctggcgggtaacgtcgctctggaaaacgccggcttccgcacctttggctttggcgccggtcgcgaagacgtcggggaaccggatctcgacgtcgactggggcgatgagaaagagtggctggcccaccgtcatccggaaagcctggcgaaacaggccatcggcgctaccgaaatgggtctgatttatgtcaacccggaaggtccgaacgccagcggcgagccgctgtccgccgcggcggccattcgcgccaccttcggcaatatggcgatggacgatgaagagatcgtcgcgctgatcgccggcggccatacgctgggcaaaacccacggcgccgcagaaaccagccacgtcggcgccgagccagaagccgcgccgctggaagcgcagggtctgggctggcactccagctacggcagcggcgcaggcgcggacgccatcacctccggtctggaagtggtctggacgcagacgcccacccagtggagcaactactttttcgaaaacctgttcaaatacgaatgggtgcagacccgcagcccggctggcgcgatccagttcgaagccaaagacgcgccggagattatcccggatccgtttaacccggagaaaaagcgcaaaccgaccatgctggtcaccgacctgaccctgcgcttcgacccggagtttgaaaaaatctcccgccgcttcctcaacgatccgcaggcctttaacgaggcgttcgcccgggcgtggttcaagctgacccaccgtgatatggggccaaaatcccgttacctcgggccggaagtgccgaaagaagatctgatttggcaggatccgctgccggcagcgacccatcagccgagcgcggaagatatcgccagcctgaaaaccgccatcgccggcgccggcctgtcggtcagtgagctggtctcggtcgcctgggcgtccgcctccaccttccgcggcggcgataaacgcggcggcgctaacggcgcgcgtctggcgctggccccgcagaaagactggccggttaacgccatcgccagccgggtgctgccgaccctgcaggcgatccagcgcgcctccggcaaagcgtcgctggccgatattatcgtgctggccggcgtggtcggcgttgagcaggcggccgctgccgccggcgtcagcgtcaatgtgccgtttaccccaggccgcgtcgacgctctgcctgagcagaccgacgtcgagtcgtttgatctgctgcagccgctggcggatggcttccgcaactatcgccgtatcgaaggcggtgtctcgacggaaaccctgctgatcgataaagcgcagcagctgacgctaaccgccccggaaatgaccgtgctggtcggtggcttgcgcgtactgggcgcgaactacgacggcagcaaacacggggtgtttaccgaccgcgtcggcgtgctcagcaatgacttcttcgttaatctgcttgatatggctaccgtctggaaagcggccgatgataacgcggagctgtttaccggcagcgaccgtaaaaccggcgaagcgaagtacagcgccacccgcgtggatctggtgtttggctccaactcggtactgcgcgccctggcggaagtgtacgcctgcgccgacgggcagcagaagctggtgcatgacttcgttgccgcctggacaaaggtgatgaacctcgaccgcttcgatctttaatcctctcgccccggctcccgccggggcgtttttcttataccgcccgcggcagctgttgcaggcgactccgcgttcgttgaatatcctccagttccacccctgccaccagcgtctccaggtcgcagcgggtcaccagcagcaggcggatctgcttttcatacagcacatcaatcacattgataaagcgctgctgggccgccggccccaccgtagccaatggcggcacctcgtccagtagccagacggcatagctttcgcagagcgtcagatagtccatcaccgccgtggcggcctgacaaagctgggtaaaggtgaagtgcagcaacgcgggcgacgccgcggccgccagcagcgtgcgatagcctaccgtcagcgaaaccggttcgccaggcagcgacggcaggtcatacagctgacgctgttgtgcattcggattaacccacatccgcccgctgcagaaggcgttatcctggctaagatgccgtacgcgataatcctcctcgccgttcagcgccaccaccgttagatgggcgcggatcagcgcgatcgacggtaaaaagcgatcgtgatatagcggattgggcagcagcatctccggtgggtagtttgaggtggccagcagcacgataccgtgttgaaagaggtgttccagcaaggctttaatcagcatggcgtcgcctgggtcgtgtagatgaaattcgtcgaagcatagcaggcggcaaccggatgtcatctgcctcatcaccgtctgcaggtcgggcgctcagggggcattcagccgctggtgcagttcgcggaagaagtgatgaaaatggacccgccgcctggcggcgagcggcaggctggcgaaaaagtggtcgaggataaagcttttccctcgcccggtacgtccccagacgtacaccccctgcggcctgcctgtcgtggacaccaactgctgaccgagggcgtcaaggcgggcgatgagtgacagctgatcgtcgtccagcgtcagacgcgcccgcgccgcctgctcggccatcacgcgggtaaaacgaaaatcagccgtcacctctgtgggaccagattccgagggtacacatccattttttaacattcttataacctcctgcaaggaggccattctagccgctttcccgcgggatggcgaatcgcgcgacgagcggccatttccgctgctccgccgccagcccctacgcctctccgacacgccagtgcaccgatgtgacgttctgctgaacgcccatctgtgccataatttgcgccagcgttttttggtgctgcttatggctaatcagctgcgcgcaaatctccagatggtccgcggtgtccgccgccgccgactgcaatccctgcagggtaaaccgctgctgctgcgcaatattcagcaacagctgacgcacggcattttcatgttcgcgcagacaggtgacgcgtaagacatagcgtttctcttcgtcaccggcccccggcaaggcatgaatgcgctgcgccgcctcgcgcagcaggatattggcgcacagaataatcagcgtagccgccgtcgcgttccagaactgtcccaggccgcagagtacgccgatcccggccgaacaccacagcgtggcggcggtattgaggccgcggacgttcatgccatcacgcataatcacccctgccccaaggaagccgataccggagacgatctgcgctgcaatacgccccgggctgtccggcgaggccgacatcgcgctgagaataaacaccgccgcgccggtggccaccagggcattggtgcgtaaaccggccatacgttgtcgccactgtctttccgcgccgatcagcgcccccaacaacattgccgcgagtaaatgtgtcatataaggaaataccatcgcgccttcctccagaaaacagaaagccaaaaattacagatgtagcgctcagccgcgccgggcgattagccggtggatgatggtggaggaaataagggtctggaaaacataaacataacgctgcctctcgcgctcaatggcgcataaattattgagggaggcaatccggaactgagagattgctgcccgccgggacggcaagcagcgaaatgatcgcgttagcttgccggaaaatcgcaataagggtgactgtccaacgtatgactcctgaataaaagtgggcacattatagcccggggtaatgatgggtaaagcacgaaaacgccgccggtgacgattcgtttagtttgtctttcgcgggtcctgcgtagcgtgacatcgccaggcgactaaaatgccgtcagcggtgatttacttcaattccgtcgctgggatgcggcgaaaaccagcatgaatatcaactttatgtctccccagcgcgatcttacgctaaagaatgtcgctaaggctaaggattaaaaatttaaaactattaacaatcaattaacattagcaggcaaaccattcttcctgaggaacacaacaccatgtctaccacccaggttctcggcgaaacgccctatgcttcgccaggacaaccgcacgccagcttaaccggacgcattgatgcgctgcccgcctcatttgggttatggtcgtttattaccctgctctcacttggcggcttctttgagctctacgatctcttccagaccgggtatatcagcgcgggcctgctggcggagggcattttccacaccggacaggcgggcatcttcggcatcgccgaccaggcggccttcgcctccgccacctttatgggactgtttatcggcgccagtctgctggcgccgctggcggacaaactgggccgccgcctgacctttatggtggcgctcgcctggtacggtcttttttcgctgctgatggcgacgcagagtagcgcggaaggggtgatcttcttccgctttctggtggggatcggcctcggcattgagctggtgaccattgatacttacctcagcgaatgggtgccaacccatctgcgcaataaagcctttgcctttgccttcttcatccagttcctctcggttccggcggtggcgctgatgtcctggatgctggtgccgaccaccctgttcggcctcagcggctggcgctgggtgatcatctttggcgcactgttctcgctggcgatctggtttatccgtaaaaagctaccggagtcagcccgctggctggcaagcaaagggaggcatgatgacgcgcatacggtgatgtgtgagatggaagcccgctgcggcctgacgccgtcgccaaagcatgcgcatgcggcacagagcgtcgtcaaacgcggcaccttccgcgaaatctgggcgccgcagtatcggcagcgcaccctgatgctgatggtgatgaacttcttccaggcgatcggtttcttcggctttggcaactggctgccggcgctgctctccggtcagggcgccagcatcacccatagcctgctgtacgccttctttatcaccctcgcctatccgctgggctgtctgttctgcacccgcttcgtgcatcgctttgaaaacaagtggcagattgtcctctccgcgctgatgaccgttatcttcggcaccctgttcgctctgcaaaacagcccgattctgctggtgatctgcgggtttatgatcacctggtccaacgcctggctgaccatcagctaccacgcctaccaggccgaggtcttcccgacccatattcgcgcccgcgccgtcggcttctgctactcgttcagccggctctcgaccgcggtgaccagcattctgatcggcattattctgcaatacgccggcacgccgggagtaattagctttatcgtcgtcagtatgctgatggtgatgctgtcggtggggatcttcggcccgagaacgcggggcattcgtctggagaatatctgatggcggtcgccgccgagggtgccggcggcgacatattttatcagttgcgatgttgcagctggcgctgaacctcaataagctccgcgatcaactcccgcgcgagcatagaggtcattatatgatcctgggcatgtaccagaataagattaaccggtactttgccacagccctcatccataccaataagcatggtttgtacatcatgcgcgcgttttgcggaatctgcggcgtcctgcatcagcctatcaacgtcctgccacactccttttctggcggcttgcagcgcctgcatcgccagactgcgggactcaccggcgttaatgatgagttccatgacggttgcttccatatccatacggtttccctacttgttgagtgaaggttcatccagcagcgccagcgccgcagcaagaattttatcgccacgcatcatgccgtaatccatgctatcgataacggcgactctcttacccaccgcagcggcctttttgttaaattcttcgaatttatatttaatctgcggccctaaaagacagcaatcgtaatttggtaacgtgcgatcaaaatcatccattgaaacagcaataatatcgacagcaatgccttgcgccgcggccgcttgtttcattttattcattaccatgctcgttgacatgccggcagcgcagcacaaaaatatttttttcatcttatttatctgttcctgtaacgtattattgatgcttatctttgagattttggtctaaaaaattaataataatttttgatacttcaggctgataccacatcaaacctgcgtgatccgcccctttcaccacgtaatgggtggacggtatttttttcgctaccagcgcctcgtgtaaaagcgttgactggctgggtgaaaccacattgtcggcatcgccgttcattagcagaaaaggcggcgttttattcgaaatccaggtgatgggattagcccgtttcgccttttcgggataggcggagatcgcgccaccgccttgccagggaataccattaaccagcatcgcctctggtatggccggtgactgatgcgctttttgaatgtccgcggaaaagtcagccccgactttcgtcagatcggacaggccatagagatcaaccaccgcctgcacatcgctgctttgatttgaatactctccctggtcgaattccttatggccgctggtggtacccaccatggcggctaaatacccacccgccgactcgcccatcacagcgatatggttgggatcgatgcctaatttttcagcattggcgcgtaaaaatctgaccgccgttttcgcatcttcaaccatgcccgggaaagtcacattgggtacgacccgataggtaatgctggcgacgacgtaaccggcccgggcaatatcgacccgctgaccgataaattttgatttgggcgcatcaagaaagccgccgccggtaataaatactactgcaggtaacggtttatcagcataaggcttgagcaaatccatcgttaactggagcggtcgtcccatgatattttgcgtaaatgaataggcaatatcaggcaccatctcgacggccagagcgctgggtttaataacgatagttttgctgtctgttaaaggtgtttgtgcaaaagcagacggaataataagcatcgtcagcatagcagcgacgtgtttgttcatagggtaatatcctgtagtgatgtagtaatgattcagaaccagacttccattcgatacccgactcgccactccgagtcttccggcaataacgtgacctctttgtccccgcctgcgtaggtaaccgtcaaactgagaatcggcgcgacatacggtaaaacatccagttgcagggccgggccggcggcaattttgtagccgacgccgctggcaccttcgacgccatttttattgatagtgttattcaccatgacttcatacaacatggagagattttggtgatgaatattttgtttaacgtttacgccggtaaagatcccggtttcatttgcggaaccataggtcatgtccccccctgaataacctgtatcaggtataaaggtggttcggtcagcagttttttcacgcttggtatattcatagatgaaagccggcgagacggcaaaatcatcaaataacgtcaagtttccgtcggtggaaaaacgcattgaacaatcgccctcttcgctaaggacggtaatacgactggtgttcagataaggagcaataacccctttaccatactgtaatttgactgtcgattgtccctttgccactccccaaaaagacggcatgctgtatttcgcggaaaaactaattgctttctgcttgccagtgcccaatgggtcatcaatttctttaacataggtcatacccagctctgtctgatcgatacgataagccatatcaacgatgcgccgcgagccttctatcgcctgcggcgcggtatcgctggaccagtcgatctggtcggtaccaacgttcagatcaaaattcttactgttataaccgaggccggaatcaatatgtacttctttggtattgtaagcgaagatattaatacgttgatcgaggtaacgacgcccagcccaaatgtttgcgccttcgggaagaaaagagagcccaccaaagcgcccataattctgtgccgtttctaccgttttatcgccgtaacccaccatttcataggtgtaatcagcccattgctcgggagaagccagcccctgccattttttagtaatagccagcgatgtccagtaatcgtgccagaaactgtttcccaaatcgcccattttgccacgaggatcctgattaggcccggtgggatcggtatgcaacgacatgtttttgggacggtttagttcgctctgaaaatctccagccaccatgccatatccatttaactggaagctgccgtcgtcgcttagattggccgcatggcataaggtcgcaggcagaaaacatgagataacacctgaaataataattctggggttcattcttcagactccatcgggtaagagatataaaataaataaaattattatttttattgcttatctgattttatttaaagaatgccacccgtgttataacccagcttgcctttttatatatcggttgttgccgattttacttattacaaaaacatgcaatagcatgaacgctgtgagccaatttactattcaggagttcaggtcacgatactccttaatactcatattatatttctctttaaataccttataacaatgcgaggcgttttcataacccgtcatattaataacatcaataatagagtgattagtatgcttaaggagatggatcaacacatccaggcgtttttcaaccaacaaatcgctaaagttcttaccagtgaagtcttttatcagtttactcaccttataattcggctgatttaaacgacaggagatctctttcaggctggcagttttataatcggtatcaatatatctcaacacggccatggcaagtgattcattgtaactgccgttgatatggtaatcgctggcttgcacattcgagagcagttcggtcatcaacagtcccaccaggaaattgacgcgtatctcttttaagtggttattactgtagatctcgctaatgatgacatgcataatgttttgaattgcgtcgatttctcccactttaaagtgaatatgctctccatgtttttttctgccattaattgctgaaaggataaaacgggaaatgatgttattttcgtcaaaaagggacatgagtcgaccgaaaaattcggtcttaataataaaattgatgataatatcattctgccctgcggcttcaatttcgtgtctggcaaactggttgataagcaggatctcccccttacctaaagtgagactttcttcattaatcttctgatgcattttaccctgatatatataaataagctcgataaagccatgagaatgcaacggaattttagtaaatcgggtctgcttttcaatatggatgtagttgtctttgaaaaaccttcgctccatatggcttttgaatttatgacacagttgatagttagcgcgaagcagttcgagttctctatcggtataagccagtagcttttcatgaatatcatggtgtaacataaaagtacctaactggagcgaacgtttgggtatgcactatcattacaatagtacttttatctcacctgcatcggtaatgtcataaaagtgatgataggtatcacagtctatcggcgcaggtaattgtttattaagttgatacacttttggtaatttaagagtgcattttttgaggttaaatggcactttgatgactaattctatgccttttttatagcgccgccagcgacactcaatacgccctctgatggtttgatgccagcaatccacaaagttaatcgtgtcagtaaaggatggactgattaaaataacatcagcaccaaccgcctcctcagcgacggtaatgccgcccaaagcctgaaacagccaactggaataagaactgaacatcgcatgattattcgaaccattcaggttatcaccgaaaaattccttcaatgtgctggcatcatttttaagcattttcttgaatccggcttcgactcttaaccattcaaggattaattcattatgaccatagcgatgaaatatttcataggcaaaactttggccaaaaatcccacaagtgataacattttgctcttttttgatgagatcgatcaatgcattcaatgaactctcgatatcatcacacaaatcgaagtagattgcaaaaacaaagctggtctgactgcgatcggcaaagctgccatccgtattcttatagagtgataaaattttctctctaattttattggccttgccaatatattttagccatttttctttaaagccaagatcatcacatatttttgcgataattaacaaatgataataatagaaacaagcactggtgaaatggagagctggcgagccatttttgtaattacgcatatcatgaacgcggcttccccagtcacccaggcagcaggtcaccaggtcatcaaagtcgcgcatttccagggagaggatctgcttctcaagaaatggcaagctttcggccagcagattgacattgccataatgtcgatagtgaatggctatcaaataaggtaataccagttgccagcccagggggcccgtttccccgccgactccattagtcttaattcccataaatggcgcagtttccgtcacaccaccacagggacgaatatcattgataaaatcaaagatagttttcttatacatagcggcagagtcaaactgatacacttgcgaccgggccaacgcgacaatgtctccgccataggcaaaacgttcgcgggcacaatccccgaagaccgaatgaatgttattcagtttggttcttttagcaacctcaaagagcttatttatgtaaggatctgagcagtaaaagcccccgttttcccttagtacagtatgtactgaaagcgcctgaacgttgtttaattgttcaatattaataccgcttaactgcacatagcgaaacgaatgacaggtaaaggcattgataaaatgattcttcccactgcggcattcaaaggcatccttctgttccgccctcgccggtgctccaattccgccgtcaataatcacaccttcagtaacctgtttgccgacaaatcccgcaagggtggagtcagtgtttagttcgtagttttcatcaacgtcttcgctatagagcagttccacacgttgattctcagacgcggtaatggataaatcgataaatccggtgacgatggcaccgaaatcaataatgaatgtctcttcgtctacgacgtggatatgctctgccccgagggacaacgtatggttaattttcggaataaagctcgagaccagacggccttcaggcccgttgctcagcaccacatttttccagtcaggcatcagcaaatcggtggtgttgtctccgcgaaacagtttcatatccaggcgctcgcccaaatagatattattgaaggtataagcgccttcgcaatattgccagtcggcatcactaccgatgatcatttcgcgatctgcaaacctcatataaatgtcagcgatgacctgtggttcaccgatggttaaggtctctctcaggttatatttaccaaataatttaagcggtgctggattaaaccagccatcggctagctcaacaatgacttcatttttcggctgattaataaacggctttatattgtaagtatcataataaataattttagcataatttgtccagtcagtattgagctcaccgcgtgtgacctctttaccgttgatatacaatttataaaaaccaagaccaacaatactgatataggcatcgaggaggtcttcgtcgagataaattgtttttctcatcaccacattacgtttaccgcgatagtaatgaatatcattagtgaagtgatacccaccgctcacccagcggccagaaaaatggccaagattactggttgtgaaactgtttctaaaaacgttgttctcaccattgtcaccgtgggtaaggacttctatggtataagaagtaaagctttgtaacgatattgcatcgagagtgacaattgtattattaccctctcttgcgataagagataccagttcggcacctttatacacttttatcgaaaatgacttttgaggataattggtagaccagcacaccataattggcagatgatcgacaataatgttttccgtttggtaattgatacttaacatctttcccaccatggctaaattggcgttgctggcatttttttaaggagcattcaaatggtatccgtctgattttcttcccggcaagcgacaagatcggcagtcttgaagaagaaataccatcctgcaaatcgcgcaaaaagtcctataaattggaaagcggcaattttccagctcccctgcataaaaccagaaataatgatcggcatgccggccggggtactcaccccagcgacgcgaggcaatacgccaatgaccgttagataccatgcaatgccgagcatgatgccattgataaaaatataaggaatcgccagagtaaaattcattaccagcggcacgccataagccatcggttcgccaatggtgaagatagctggcggcaaggcgatcttaccgagcgttttatagcgtgcgctcttcgcgaaaaaagcgagcattatagccagcggcaataaatctccagcagcgccataagtcataaagaacgcaaagccggtgatgttgggtaagtcgacgcctgcagcatacgcagcaagctgctgggcatccatggcaaaccagatcggcgctacgataccgagggtgatagcgtggccatgcagcccaaaaaaccatagcaattgcgcaacaacagcaacaaagatgagtgaccagattccggatccaagtgatgttagcggaacctggattaatttataaataatttcgtgaatgctcccataaccaacgctggtaatgactgcggagataattgtaaacagcgtcaggatggcgattcctggaatcaatgaagagaacgatttggagataaattcagggacattttctggcattttgataatcaaccccttgcgagttatcgccacgaatattcgtgttgaaattatcgccaccagaatggcggtaaacagccccatgggccccagccattggccagggattgaaaatgattgccctaacggccctatttcaccgagatcatacggcgttaaaataaagaaagagatcattgaaatcaggcctgacatgaagccatcaacatcgaaatttttcgctagcgtataggcaacggagaaagcgacaatcacggctaaaaaattattcgtgaaggtaatcgggatatcaaagaagcgagttaagttgtgtcgtaacaaaaaatcctgatatggagcaaacggaaacactttaaccaaagtcgccacagaactcatgatcgttactggcaatatgagcatcataccgctcatgattgacttaaggtaggtattttgaccaatactttgcatcagttgcaaagccttttcttgtacaatgttggtatgagatgacatgtaaacagtccgtaatattattagttttcagacatattcatttaagaattcatatgccggcatgacattaatgcatcataatctaaccaggaagtcagcctaatatatcattagggagtaatacatatcggttgttgttaacttaaatgacggctgttgccatagttaatatttgtgatgtgtactgcaggagggataaaaaattgtcattaaggcttgtaacttctggacagcattaagcggcgccgcaataccgcttttaccaacggtccagcatcaccggggctatattgacactctcccatcagaggggcgtttaggcattttagtgacaagccgccaggtcggcggcccggcctcagccaaatatcccctgcgcctcggcgaagcatttttccgccagggtcgagactggttcctgctggcgcataatcagcgccagctgtgaatcaacatgggtttcggcgatcggcagaatttcaagattatcgcttagcgcttcgaggccgttgttaagcggcataatggcgcagcagatccccgcctgcaccgcctggataatctgaaacgtcgaatcactttcaaagacataccttggcgttagccctttggccttaaagctgatttcaatcgattcccggtaatacatccccttggtcagaaagccgaggggcagcgtcgccagcgtctcccatcccggcgtcccggcgctgaagtcgaaatggcgtttatcgtgcagcagtcccatccgggtttgcggcaagcgagcaatcttgaactgaccttcatccagatgctgcagataacagatccccagatccagctgattacggctgacgccatcgataatctgctccgaggtcatcgacaacaggctgaactgcagcgccggatatttctccgccaggggtttaatcaactgcatcggattgaggctcgccagcggcaccataccgacccgcagctggccgaccatctgcccgcgacagatggccgcctctgccgccaggccgtcatgagcggccagcaccgcccgcgcccaggccaggatccgctctccctccggggtaaacccctcaaagcgttggccgcgctggatcagcgtcaggttcagctcctcttccaggttacgaatgcgcatagagagcgtcggctgggtaatatgacaggccgccgccgcctggccaaaatggcgcgtctgatcgagcgcgatcaaatacttgagttgcttaatatccattctctttcccgtttgaaccccgccgttcacccccggggccgcgcacaggttaccagaatgttagtttcgctagcgataaattcaagcgaggacaccacgaggtgctgcggggcgcagggcggcgcgacgccgctctgcgctatacctttttagcgcccgccggccagtggacggatctctttcgagcgcagcgtcaggcgaacgggaaccgacttatacgaaggggtgccgctctcttcatcgagatagttcagcggcaccagcacgttggcttccggataataggcgccgacggtgcccggtgcaatgccgtaggccaccaccgtgatatcttccagcgtcagcgcgcttcccggcagcgcggtatggatatccacccgatcgccatgctccagaccctgggcggccatatcctgctcgttcataaacagcacgtcgcggcggccaaagacgccacggtagcggtcatccatcgcgtagatggtggtgttgtactggtcatgactgcgcagcgtcaccaggcgcatcacgtcctcaccctccaccaccacgttctcatgcacccctttaaataccgagaacatggctttaccggtggcggtaggccagatacgctcggtcggcggcagcggcatgcggaagcctccaggatggcgaatgcgctggttataatcctcgaacccaggaatggtctgttcgatcagatcgcgaatgcgatcgtagtcttccacgaggtactgccagtccactttgctggccggcaaggtggccttcgccagaccggcgacaatcgccggctccgagcgcagcatcggcgaggcgggcttaagcttgcccgacgaagcatgcaccatcgacatcgaatcctcgacggtgatcgactgccggccgctggcctgcaggtcaagctcggtgcggcccagacacggcagaataaaggtctctttcgccgtcaggagatgtgagcggttgagcttggtgccgacgtgaacgctgagctcaaggccgcgcatcgccgggaaggcgcgttcgtggtccggcatcgccacggcgaagttgcccccaaggcagatcagcgctttggcttcgccggcgatcatggcctccagggcttttaccgcatcgtggccatgatgccgcggcggcgtaatccccatcacccgctgcaggctgtcgaggaaagccgcggagggtttttcgctaatcccgacagtgcggttaccctggacgttcgagtgaccgcgcaaaggacagatcccggcccccggcttgccgatattgccgcgcatcagcagcaggtcggcaatcagacgcacgttggaggtgcctttgttatgctgggtgatgcccataccgtaggtgacgatggtggccctggatttggcgtaagccgccgcaacctgggtcagggattcgcgcgtcaggccagactcctgttcgatgtcctgccagcgggtggcgtggaggtcatcggcgaaggcggtgaatccctgggtatgttgggcaataaacgcgtggtcgagcacattgccctgctcctcctccagctgcagcagcgctttggcgatccctttcaacgccgccgcgtcgccgccggcccgtacctggtagtaggtcgaggcgatcggcgtcgagcgccgggtcgccatctccattacgttctgcggatcggcaaaacgctccagcgcccgttcacgcagcggattgaaaacgataatcggcacgccgcggcgggatagctcatgcagggtgcccatcatccgcgggtggttggtgcccggattatggccgatggagatcaccagctcggtctggtcaaaatcgtcgagggagacggtgcctttaccaatgccgatcgactgtggcaggcccacgctggtggattcatgacacatgttggagcaatcggggaagttgttagtgccatactcgcgggcaaacagctggaacagccacgccgcttcgttggaggctcggccagaggtgtagaattcaacctcatccggctgcaggccgcggaggatctcgccgatacgggcgaaggcttgctcccacgccaccgggcgcagggtatcgctgtcccggtcgtaaaccaaaggatgggttaagcggccgtagccctccagttcaaaatcgctttttgccagcagggaagatacggtatttgccgcgaggaatgcgggcgtcacccgtttggtggtcgcctcccaggtcacggctttggcgccgttttcgcaaaactggaaggtcgatttatgttctttatccggccaggcgcagcccgggcagtcaaaaccgtccggctggttggtacgcagcagcgtggcgggcgcctcaaaggcatccatctgggtgcgcacggcgatggccgtggccttcaacgcgccccacccgcctgccggaccgtcataggggtgaacaccgggaaccgcgcgtcttttattggtcatctctttactcctgctgctctgttctggctgtcgctagccgaaaaaggcgtacaacaaccccggcgacgaagcgtgaatcgcatggcgtcacctgaaaagaatgctgtttctcaaggatagtacgatgggaaagcgtaggtactgcgtttgttaactgaataataacatacaccacaattctgtataattgatgttatctatcaggtgttaaatttaacttatttgcaaattttgcggttttcaccgcggtgctgtgacggataaattgctacggaaagtgatgaccgggcagcgaaaccgcccggtgggccaggctcaggtcagattgaagtaacgatccggacgcagcgtctccggcagcggatgctgaccggtcatgtcgagcagattgcgctcgatggtattgcacatcgcgttcagcggcaggtcattggctgcggtgccgaacggatcttccagctcttccgccagcgaatcccacgataaaaaggtgtaagagataaagaccgagacaaacggcgtcatgtagtgcagatcgccgaccagggcgaacggcagcagcgtacagaacaggtagacggtacgctgcaggatcagggtataggcgaaaggcaccggggtggtggccagcctttcacaaccgcccagcacgtgcgccagctcgtcgagtttgttgtccatcagcccgtaagtgatgtcgctgagcttgcccgcctcccgcagctggccaatttcgttgccggccagcagcaggatccggttggtgggcattgagctggcgaggatctccgtcaccctctcctccggtagcaaccgccgcaggtcagccgtcggatcggttttgcgcagctggtgcttcaggctccagctaaaggccaccagatagctgacgatgcggcgatgggcatcgtgttccgccggcaggatattgcgcagctgacgcaccagcgtgcgttcggcgataagcaccgtcccccacagattgcgcgcctcgacgaagcggctgtagctggcgctgttgcgaaagccgaggaaaatcgcaatcgcaatccccagcaggctgaacggcgccacggttaagtggatccccaactgttcgtaccattgatagctgataatggcgatgatcgacatcagcacatttagcagcaggcgaaagatgattttcgacagcacggagccgtgccagtcaaataggcgaagaaaccagtgttgttctggccgaatgatcattgtctgacttcctgaattaccgctctggtcattatctctgaatacagaatagagattatctatgagccgattggtttattttatcgttaactgcgatgggcagatctgcgccattatttagcgatggtaatggcgtttttagtatgggccttttttatatttcaggcaatcaatgcgccagcaataatggctcagaagaaaaaataaccgctgagccaattcatttttccgcttaggctaccgggtgtatcagaccgctttcgtcaacccctgcgcttcgcagggatcgagatgcaccatcacattaagcaccggatgctgcgccagcacccgctcccgcgcgtgacgggcaatctgatgcccttcggctaccgacatctcgccagccacctcgagatggacatccaccagcaccagatcccccgccttacgggttttcagatcgtggaggcccgccacgcccggcgtagttcgcagcgtatcggcgatcgcctgctgcatctcttcatcaaccgcacggtccattaaatcatgcagcgcgctgacggcgaaacgatagcccatgcgcgcaatcagcagccccaccgccagcgcggcgagcgggtcgaaccaggcgaacccggccagattaccgataatccccagggccaccaccagggaggatgcggcgtcagagcgggcatgccaggcattggcgataagcagcgacgaattcagccgcctggcggccgccagcatatagcgaaacagcccctccttgacggccagcgccaccagcgccatccacagcgccgcgctgtgcaccggcggaatagtttgcggttgcgcgagatggcccgccgcggaccatagcatgccacccccgacgagcagcagcatcgcgccgatgattagggaggcgccgttctcatagcgccagtggccatagtggtgatcgtggtcagacggtcgacggctctttttattcgccatcaataccacgccatcggcgaccagatcggaaaaagagtgcattccgtcggcaattaatccctgagagccggaaaatattcccacgactacctgtaaggcagaaaggaaaatattaaccaccacgctaacaagggtactctttcgcgcctgcaccgaacgctcatgatatttattatcattttcaaaattatgttgtgtcattatttctctccctttgtgagcgggaagaataaactgacaaactgagtttatgcttaacaatataaaagccattgccttgccgtttaacgatatcgcggcggtcggtaatgactatttactgtatgtgccgttggaacgctgcaaccttgcgcctatgaactatcttttgaagggtggccacaggtcgggccactttagcttagccaccacaggagtcagcgatgtcacataacaaaccatcccggctgcgtttcgccattaatctgggcaatgcggtcctggcccatctcggggagacaggaaagcccgcgggcatcaccgtcgagctcagccatcggctggcgacgcgctggggcgtcagcgccgaattcgttccctatcctgccgcgggtaaagtggtggctgacgccggtggcgagcactgggatattgcctttctggccatcgatccggcgcgggaagccaccctgcgctttacctcgccctatatcaccatccagggcaccgcgctggtctgcgttgattcgccctgccagagcgtggccgacatggatcgcccggcaaccaccattaacgtcggacaaaacgccgcatacgatctatggctaacccgccatctgcagcacgccagcctgcatcgccttccctcttcgcaggaggcaatcgacgccttcctcgccggtgaaggggatatggtcgccggcatccgccagccgctggaggcgacagcccgtcagcacgccggggtgcgggtactggcggataattttaccgagatccagcaggccatctgcgtcgcccgggcggacgtggaccgttttcacgcggtaaacgacgcgcttagcgagtggcgggcggatggcagtctgcaggcgctgattgccggtcacctgggccaagcgaactgaatcacgcctccgtcatccggcgcatggcgcaatgccaggcgccgttgcgtaccgaggcgcgcagtacgcgggccacgccatgcaccatcaggcgcgtcgtgcgccgctgcagcggcgtgagcgacaatcccagcatctcctgcgcccattccggcaaaaggtcaattcctgcgttcatcatcacccggccgaccggctggctcatccgccccggcagacgggtggagagcagcacctgagctacctcccgggtacgttcgtcgcagcgcagtcgcgggcgcatcgcctcgagatagtccgccacctcctgcggtgtctgagggatatcccgagcccccagccgccgggcgatttccgccgactcacgaaaatagtcctcctggcgctcgggactgaccaccgtccgcttgtagcgcaggtgggaggccataaagcaactgcactcggcgacgtgcacccaggttaacagcgccgggtcgctcgcctgatacggggttccgtccttatccaccccggcgatccgctgatggatcccctgtactttggcgattagccgttcggcgtcgggggtagtggcaaaagtggtggcagaaataaactggctggtgcggcgcaggcgacccaaaatatcctcgcgaaaacgagagtgatcccagacgccggccagcgccagaggatgcagcatctgcagcaacagcgcgctaatgccgccgcagagcatcgaggtaaaatcgccgtgcacctgccagatggccgactggggaccaaacagccccggctctcctttgggtcgttcaaagtcgatctcttttagcgccatgccggtcaggccgagcacctgcgcctcgatcatccggcgaatgccgatcatgatggtatcccttacgtgcaactaaaggacaaaagataccactgttggacagcattgggagagatattgcggaaagagtgcccgcagcacgcgggcacgacggcttacggattcagctggtaatcgagggtaatgttggccttcagcacctgcgataccgggcagcctgctttcgctttctggatgatctcatcgaacgccgccggagacacgtccggcaggacgatctggctttgcagcgcgatatcggtaatcgcaaagccgccgtcggttttattgagggtgaccactgcggtagtgtcaatggacgttgcggtatatccctcttcgctgagcatcagcgacagggccatcgaaaagcaggcggcatgtgcagcgccgatcagctcctcagggttggtgcccttcaccccctcaaaacgggtgttaaatccgtagggctgctggctcagcgccccgctttctgtcgacacggtgcctttgccatgcttcaggtcgccttcccagtgcgctagccctttcttatgaatcgccatttgattcctcctgtagtgatgtcgaacaaaaagtatagtgcgtgatgccgaagctgcgtctttttgcagcctctggcccccacgttcccctggttttcgtgtcgttggtgaggcagggtgacgctatcggccatcctgcggatgccagggatcggatttgtcatccttgctgtcgtcccgtttacgcggaacttcgccctgctctccgggcgcctcacgggcaggttgcttaccgcgctcttcgtcttgcgagtgagaaaaggtgctcatatcgacgtgctccgcttacttaggcgactgcttgagcagacgatcgattcgcacgaccggcggcgtcattttgcgatccagactgccgttgatattgaccagatcgtctggctctacgtgttgttcgttaaacgcggcgaccgggataataacggtgatggtgccgcttttatcacgaaactgataacggtcatctccctgccgcttgagcagattgccgcgcagcgaaacggtcgcgccatcgtgcatggttttcgcctgctcaacggtcatgatccggccatcctcgacgccgcgatagccgtcatcgagtttgtgcggcggcggcggcgcggcatcctgagtaaaccctcccttatcgtccgcctgcgcgacacctacggcaaacagacaggccatggccaatgctagttttttcatcatgcctccgttttttgctgacgatgagaataaagcctggctgaggctggccatttttacaaagtcaattgttctgatatcgtctaatataagaatgtccttatcgttacgctcctggcgaaacgaaacgcggggaaaatattaatgattaagaatcaacagccttgtcctatcgtcgatgagaatgaacgctccttacgctttgaatatcgcttccgccgctatgggataattgttttgagtctcatcattcttaccgcgttaagcggcctgtggtcctccggttatttcagtgaagcacaccgggaaaccagtggaggcgaattaagcgtcgattatcagcgctatgccaggctgatgagtgaaaccgagtttaatattcagattaaaccggatacggccagcgacaccattatcagcttcgccgccccgttattaacccgctaccagatcggtgatatccgtccgcagccggataaaatgtatagcgccgacgggaaattacatctcgtctatcagcggtcgaaccccccttcaccgatatctgtgtggttagccgttaccccaaaaacggccggtaatatctctctgcaggcggtagttaacgatcgctattctgtaacctggcagcagtttgtctatccgtaggagtcgctatggaaatggtccttagagccgcagcaatctatctgatcctgttgattatttttaagattgccggcagaagaaccctgatgcaattaaccaactttgacctgatactgttgctgattatcagcgaagccacccagcaggcgatgctcagcacagactattcggttaccgggtcgatgctgactatcgttaccctggttagtattgatattttgttcggctatattaagaaaaaatttgctcaggcagaaaattttctcgatggtacgccggttatcgtggtggaaaatggtgctgtcatcgacgagaagattaagctcgtcaatatctctgtcgatgatatcctgctggcggccaggcagcaccatggcatttatgaattgaaagcgatcaaattcgctattctcgagcgtaacggccagatatccattattcctgagcaggaatagtatcggcttcgctatttatcacgctccggttgtttatcacctgattccggagcgcgagtggcgtcatcctcttctttttcaccgttaacaacgttcaacattaacatttttcctcctcgctggttgtcagggatcctacaaattatagaacgccttcgccgaagtatgcaggatctgccgaaactaaccaggagatgccgcctgattcacattgcgcttattccaggatatttcccacctcgtcattgccattggtgagaaataattaaccgatccgtacagtcaatattgtgaaagccaaaacataatgaggtcactatgtctgtgatggttattaccggtggaaccgcgggagcgggcaaagctaccgcgctgcgtttcgcccgcgctggatatcacgtggcgctgatcgcccgagacgaaacgggtttacaggagacgcgacaggcctgtgaacggtttggcattaaaacgctggctattagcgccgatgtcgtcgatgccggggcgctgcagcgcgccgccgccgaggtggaaaccaccctcggggcaatcgacgtctggatcaacaacgccatgaccaccgtgctggcgccctttcgtcagatgagcgaggaggagtttcgccgggtgacggaggtgacctatctcgggtacgtgaacggcacccgcgcggcgctggaggtcatgatcccccgggatcggggggtgattattcaggccggctcggcgctggcctggcgttcaatcccactgcagtcggcttactgcggagcgaaagcggcgatccgcggctttaccgatgccgtgcgaaccgaactgatgcatgagaaaagccacatccagttgaccatggtgcaactgccggggatgaacaccgcccagtttggctgggcgcgaaacaaaatggatcaggccatgcagccggtgcccccggtctatcagccggaagtcgccgccgaggctatttacagcgtcatccagcgcccggtcaacgagctgtgggtcggaaaaagcaccatccagtcgatcctcggccaggtcttcttccctcgcctgctcgatcggctgatggtgaaaaaagcgtgggagggacagtttaccggtcagccaaagtcgtcagaccaacaggacgacctgttcacgccggtgcgcggcaatcatccgggccacggcccctttaacgatggcgcacggcgtaaagcagtcaccatcagcgccgatctcccgggtaaagtcgccgccggcgtcggggtagcggtggcgacgatggcgctgcgggcgttgttccgtcgttccggaaaacggcgctaactcaggctgcggctgaaccaacggtaaccatacccggagagtgccagccgcgcatctttcccgccgtgcagcccatcctgatagagcttatcttccagaattgggctccagtagccctcggccagcggcgggagcaggacctctaccgcctgctggctgcagttggccagcatcagtacctcccgcgattcgctgcgatagagtaagcccagcaccgcgtcgggctttagggtaaggagagtaaaagggagggatcccggttcagtatattccgtgcgcgccaataccatattgcgtacccgatgcagcagcgacctgggatggcgcagcgccgtttctacattgatccgttggtagcggaaccgcccgctggccaccggttttaccggcaaatcatcccgcgccgcccgggaaaagccggcgttggccgcggccgaccactgcatcggcgttctgaccgcgtagcgctccggtaaggagagatcgtcacccatgccaatctcgtcgccatagcgcatcaccggcacgccgggcagcgccagcaggatagcatgggctaacgctatgcgtcgggtatcgccgtccagcatcggcgccagtcttcggcgtacgccgcgctggtaaacggacatcgatttatcaggggcaaaggtgcggataacctggcgcttgttgcgctcgccaatcccctcaagatccagttcatcatggttgcgcagccagttgacgaagcagcacccgtccggcggggtcaccatcgcctgcagggccttcaccaccggcgcggcgcgctgctgcgccaggctgaggtagaggtatttgttaagccagaaattaagcaccatctgcagccgatcgccctggccgaaataatgacggtaatcttctaccgcgacgtccacttcacccaggagtatcgcatcgggattgaggcgctgtacaacctgccggagatgggtcagcagcgggtagccgcgcgtctcgtcgccctttccggcctgcttgaccagatgtgacgcggcatcgagacgaaagccagacaccccagcctgcagccagaaggtgataatgttttcgatttcagcgatcaccggcggatgggcgagattcaggtcgggctcgtggtgataaaacatgtggcgataatattgcccagcctgttcgtcccagcgccagacgctctcctcaacgccgggaaacatgggaggatcgtcgttttccggcggccgatcggcccacagataatacggccgccacggcgaccggggatcgcgtcgcgccgcctggaaccacgggtgctgcgcggaggtgtgctggatcaccagctcaacgatcacccgcagtcccagctcgcgggcgcgggcaatcagctcaatcacgtcagcgatagtgccgaaccgcggatcgggctgcagatgatcgctgatatcatagccatcatcctgcagaggagtgagatagaacggagtcagccagagcaccgtcgctccgaggctgcgaatgtagtgtagcttttggcgaatgcccgcgagatcgccaaaaccatcgccattggcatcataaaagagcgaactgtcaacctgatagatgaccgctctgtgaaaccactcttcccgttgcatcactctcacctcgcgttctgcccgtccctgtcagccgcctcagcgcgatccggaccccgccctggccttcgcgcgcggtttgccgacaggcgatacgggattgcgttccgctggtagcatcctgttcgctaccgcgtccaccagcgcctgctgcctggcggttaataccagcggaacctgttcctcggcggcgaggagcgcgatggtttgccgtttgaccatagcgttctccggcggcttaatgcccggcctcaacgccaggcatatcggtatccataagatattgcccggtcagcgctggcagataatggagcagccaatcagccattcctctctcttcagccaggataccctccagtgtatgcatcgcgctgtggtcgcctactcttttcgccgccgttaataaagcggtatagcaggcgacctcaaaatgggcaaaaacgtaggcagtgataatcactttaataacctcatcaccgggcagcatgatgccaatggtctgtcctaacgccgccacccggctcatcgcatccttcagcgcggagcgggaaatatggttgcgggcgatgatatcctgcagggcggacaattgccgtcgggtttcatagagatgttgttcaaggcgggtgcgtaactgcggttcattatcgaggcgtctgatggtggccaccagcagcgactcagcctgtttttccatggcatgcgcatcgcgaagccagttgtgataattttcgatatccgtcatatacacctctgatcattaaccttttattttgacgtggaatcttcactctcttccgccgcctggtcagctcgcgctgcgctatatccggataaatggccaacaatattggcataaatactgatgagaatgacccacagtacgctgtctttccaccagattaacgagggtatcgccagacccacccacataacggcggcgacaagatgacagcgcttaataaacactggcgtcaacttcattttattaccttaggaccgaacaatattgagcgaccattttatcgacgctctgaccgctgcgtcaggcgctaaaccttacgctgaaaatgtctttcttttgcctaagcataaaaaagaaaacagcgttgcgtattgtcccgttccgttattttctgtctttaccgtccggcaaatttattgccgctgcggccgtctttaattgctagtgatgcggcgacttcctcctcaccttttagtttccccacatcgcggataatgaatgtcgttatagataaataaaccctgaatatgcagaaacctgcggaccatctggcccacaggttttgtctcaacgccgatttgtcggcgtcacagctcatcagtcgctagctgtcaccggatttacggccgccgccatgactgttcttaccacccttcttaccggcttcggatgcacgttcaggatcatttttaaagttcccgccgctgtgctgtccgcctttacgcccggcttcggatgctttctcacgatcttctgcaaaattacctgaaccgcctctatgctctgccataattttcacctttggtttgatcaatatcggttggtaaatggaaaatgaccctgttacaaatcatcgccctcgatatctaacactagaggaatgcctgcaggagtcaaattaatttcagatacccatccgcgcactgacaaaataaagctttactaacgaagcggtaagataaaatatacctcacacaactcctttatttgacgtaggttatgttcaccggcgggtaaaacagaaacgtccaacggccgtttgtaaaaaaatgcaaacgatttaatgaataaatatttctttatctcgcggaacacaatacccagaaatattacccccaaagaggtatcaccttataggacatggtttgcgaatgaacatcttcatcgtttattcaggcagcaccttcatcgtaacttgagaaaaagatcatgcgcgttacgaaaatagcccttggcccttgattaaggatggaataatcctaatttaacgtcagcaataataacgcaacgctatcccccgaaatacgccaaggatcagtcggttaaggcataccgttacgcctacggttggccattgactgcgatgttgcgagtcatccagggtctgtcgccaggagaagctgacctattcttagagctggcccgttctgtctgaaggagatgactatgcaagatgaaaaaccgccaatgaagaagttacccacctccatgttgccagaagagacggctccacgtccggagttcccggagcaagaacaaaccccgccgggtctggatgcggaaatggagccatccccggaccacggtgaaaccagctacaccggctccgggcgactggccggtaagaaagcgttaattaccggcggcgactccggtattggccgtgcggtggcgatcgcctttgcccgcgaaggcgccgacgtcgcgataaactatctgcccgaagagcaaaaggatgcggatgaagttatcgccctgatcaaagccgaagggcgcaccgcggtcgccctcccgggtgatattcgctccgaatccttctgccagtcgctggtggccgacgcggtggaacagctgggaggtctgagcatcctggttaataacgccgggcgtcagcaatactgtgaaacccttgaggaactcactaccgaagatttcgacgctacctttaaaaccaacgtctacgcgccgttctggatcacccgcgccgcactgcctcacctccaggccggaagcgcgattatcaataccacctcggtgcaggcgtataaacccagcccgatcctgctcgattatgcgcagaccaaagcctgtctcgcgatcttcactaaatcgctggctaaacaggtggcgaaacgaggcattcgcgtgaacgccgtagcgcctggcccttactggacggtgctgcaatccagcggcggccagccggacgagaaggtgaaacagtttggcaaagacacgccgatggggcgcccgggacaaccggtagagatcgccccgctgtatgtcaccctggcatccgatgcctgctcatatacctccggacaggtgtggtgctctgacggcggggatggtgtggtctaagcctcccggcataccgacgcgcgccagcgcgcgccggtattttcccggccaacccttgcggctatatactggcccctcgcctcccggttgcggccattttttctttcctccactccgttactctggccgcatgctatgatgtccgcccgccgctgtgcgctaaccctggccccgacgccacccctgaggacgacagatgagtaatgacatccccctgaaattttatgacatcgtggacgaatacgagaccgaagcggctgcgccggtaaaggatgaagaacgcgatgcgctggcgcgctatttccaactgctgattgcgcggttaactaataacgaagagattgacgaagaggcgcagcgagaaatggcccgcgaggcggccattaacgaagaccgcattgacgatatcgctaatttccttaatcagtggggcaacgaataaagctcaacgtcagcctaccggcggaattgccttccgccggtgctgtcggggcgcgaagcgccaagactcagccgtggccagtctcctctcccagacgcctctgcagcgcatcaagaaatagcggtaatccgtgaggttggtagtcgcgggaaagatagatgccgtaaacgctcaacgccttcggcgtccactccggaagcaccacctccagcgtgccgctggcaatcgcgccccgggcctccagttcgggaagcatcgcaatgccgcacccggcaaccgccgcctccagcagcaatgaagatatccctgcgctcagattaccgttcaccgccaccgacgcttcccgcccctgcgcatcgctgaactgccagtgctggctggcgaaatggctgtatagcaggcagttatgtcgttgcagatcgtcgggcgtcgtcaacgggccatgctggcgcatccagcgcggcgcggcgcagagcagcgaacggcacactccgaggcgacgagcgatggcccccgcctccgggttgtcggtaatgcgaatggccacgtcgatacgctcgccgatcaggctgaccggatggttattgatatccagctccaggcgcagcagtggatagcgggcgagaaagtccggcagcagcggagagatcagctgcatggcggtaaagtgcgcgcaggcgacgcgcagtgtgccgctgggatcggcccgctgacgctcgccggcgatttcatcggcgatccgcgtcaaaccgcgggtcttgagcaataccttctccccggccggggttagcgtcagccgccgggttgagcgatggatcagccgggcgccggcccagctctccatttgttccagatagcggctcaccatcgggcgcgacatccccagcgcccgcgccgcggcgctaagacttcccagctcgcagatgcgcagatacacctgcgcagcaatcaccctgtccatcactccccctgatctgcacgttttatgaaactcagcatctcttgtttcaggaattctatcaaatagcgaaatccgtacaatggaacgcattcacctgttactgagaataaatcatgaaattatctgcccttgctgttgctaccgccctgttcagcggcgcggtcttcgcggcgcctctgacgctgcaaacttacaacccgcaggaaaaaggactttttgccgtcaactcgaccctcgtttccggtccgcatgaagcggtacttttcgacgcgcagttcagcgtcaaagatggggaaaagctggtggagatgatcaagaaaaacggcaaaccgctatcgcggattgtgatcacctctggcgatccggatttctattttggtcttgagccgctggtaaaagccttcccgcaggcggaggtggtcgccacgccggaggtcgtcaaacatattgcagccaccaaagcggccaaactggcgtactggggcccgcaaatgaaagacggcgcgccgacgcaggtgtatgtcccgcaggcgctggaggccaacagctttaccatcgatggcgagaaagtgaccatcatgcagccgcatgactacgcggcgttcgtctggatccgggcgaacaaaacgatcctcggcggcaccggcgtggcgtggggtatgcatctctggaccgccgacacccagacgccggccagtcgtcagcaatggcgtaatacgctggaccagatgatcgccctgcacccgcagcgggtgatcccgggccattatctcggcaccccgccggagggagacagcgcggtgcgctttacaaaaacttatctccagcagttcgagcaggcgctgaagacgcattcggattcggccggggtgatcaaggcgatggaggcacagtggccgggcctggcggagaccagctcgctggagttaagcgccaaagttaataccggtgagatgaagtggtgacccctgcggcgcgcaaggaggactgttcttaatctggctacccagggttgctattaccgagaaaatggaccaccctacctgtggccgcacaaaaaacgcgcggccgactttgggttacatttcatccggtcattaccgggtttgcccttgaaaccagaacaggataaaggagtcagaatgaaatcgaaccatcaggcacgtcatcttctcggtctgaactataagctttcccggcagaaaaaagtggtgctggaaggcgatgaagaaaccaccatcaaccacatccatgctaccggccgcaaacgccgcggtggttaattttcagcctgagtgataataaacaacaccgtcctgttgccaggatggtgtttttttatggcaattgactgcttgtttacccgcttgaagaccttctgctctatactctgcccgctgctttccacccgcccttcgcttatcgccgcgccgggactgtggtcatgatcaaggagttagtgcgatgcaatttacccataagaaaaaccgttccctgtacatcccctacgcgggtcccgttctgcttgaattccccctgctcaacaagggaagcgccttcagtatggaagagcgcagcaatttcaatctgctcggcctgctgccggaagtggttgaaactatcgaagagcaagcggaacgcgcctggatccagtatcagggattcaaaactgaaatcgacaaacatatttatctgcgtaacatccaggacaccaacgaaaccctgttttatcgcctgatcggcaaccaccttgaagagatgatgccggttatctataccccgacggtaggcgcggcctgcgaacggttctccgagatctatcgtcgcgcccgcggcgtctttatctcctaccagaatcgccataaccttgacgacatcctgcaaaacgtcccgaaccacaacgtgaaagtgattgtggtcaccgatggcgagcgcattctcggcctcggcgaccaggggatcggcggaatggggatcccgatcggtaaactgtcgctgtacaccacctgcggcggcatcagcccggcttacaccctgcctatcgtgctggacgtcggaacaaacaaccagcagctgctcgacgatccgctgtatatgggctggcgccatccacgcattaccgacgacgagtactatcagttcgttgacgacgtgatccaggcgattaaggcccgctggccggacgtgctgctgcagtttgaagattttgcgcaaaagaacgccatgccgctgctcaaccgctaccgcaatgaaatctgctcgtttaacgacgatattcagggcaccgcggcggtgaccgtcgggacgctgatcgccgccagccgcggcgccggaagccagctgagcgagcaaaaaatcgtctttctcggcgcgggttcggccggctgcggtatcgctgaacagattatcgcccagatcgtccgcgaaggactcagtgaagaagaggcccgccagcgcgtgtttatggttgaccgcttcggcctgttaaccgacggcatgcctaatctgctaccgttccagaacaagctggtgcaaaagcgtgagcagctgcagagctgggataccaccagcgaggcgctgtccctgctggacgtagtgcgcaacgtgaagccgaacatcctgatcggcgtctcgggtcagccgggactgttcacggaagagattatccgcgagatgcacaagcactgcccgcggccgatcgtgatgccgctctccaacccaacctcacgggtggaagcgacgccgcagaatatcctgagctggaccgacggcgaggcgctggtcgccaccggcagcccattctccccggttaccgtgaaaggcaagcagtatcccatcgcccagtgcaataactcctatatcttcccgggtattggactgggggtgatcgcccccggcgcgtcgcgggtcaccgacgagatgctgatggctgccagcgaaaccctggcgcagcactcgccgctggtcaacaacggcgaaggtccggtgctgccggagctgaaggatatccagaccgtctcacgggcaattgccttcgcggtcggcaaggtggcccaggagcaaggcgtggcggtgaaaacctccgccgaagcgctgctgcaagcgatcagcgataatttctggttaccggaatatcgcaattatcgccgcacctcgatttaatcactgtcaccgggtcgacatatcggcccggttattaataacgtcagaataatacctcccgccacagaaacgtttttttcgcccatattcattcatcgtaagaatataaaacggatagcatttgccgcgcgccctccgctgtgcaaaatagttgtttctcaccccctcacaacggaatgtgaaatgctaaaattaacccctggcgcgaataaagcgaatgcgattctgatccgtattgtcttgtttcttatcggcggtatcgccatcatcaccggaatgtgcctcttcagcggtgatatgtggatgctcaccccgcgggcggaacagtatcagcccgccactggcgatctggtggatgtcgtcatctatgaaccgagtaaatttttcttcgctctgctctacgtgtttattattaccctggtctggctactggcggtacgtaaaatcccctggcggccgatacagcatcctatattaccgctgatggtactgattgccgccgggatatttattttcctccacccggaggtcaccccgggtcgggatgccagtgttcagtacggtaaacacaatacctattatgcgtccatattctggatgaaaacccggtcaggtagtcattccgctaagcaatcaaaatatgaaacctttgttgaagcgaaagatccccgctggcttatcgacagaaacaatcttcgccgcgcctggcgctgtgaagtgcagcggcatacccagttttacaccctgtcattcaatgagggctggttcccgaacggcgatccgcaggtccttgccaaccagtgtagtcagattgccgatctggatacggtctctgaagacgagctgcttgtcactaaaaccatcaggagccgtaaatgagccagcaaaaaatggttttgcagccgatattacgcctctggctggggctgtttagcggactgttgctggtgagcgccatcagcgcctttcacggtgagtactggtatttcggcgataagcaggcgttttacgcggcgaaagccggcgaggtctctgtgcatgaactctatacgccggcgaaaatcctctttgcttttatcgtcagcacgatcccgccgctgctgtggctgctgctggttaaccgtcgggcgccgcggctgctgacccacactctcccatcggtgttactcctgctggcgggtttgctgtttttcttcctgagacccgacgtgattcccggcggggaaacccctgtctatcgctacggcgagcgggagcgctactaccagacgatacgctggcagaaaccggagcctggcgcgtggcggggtacccgctctgagtacaacgtgtatatcgaatatcgtgatcccaggggatatcgcaaagtcgacaatattaaaaacgcctatacctgtgaaacccaccgggagtctcgcttttttaccttaacgaccgaagaggattggtatccggattcgtatccgaatattctcgaggctccctgccaggcgataaaggatccccaggcgatgacggaatatacccgcgaccacgcccgctggtttcccattacgttttagcaaacacactagccttttgcgccaacaatatctcgccggtaatggcactgaacacgaaaactggtgggtatcggcccctgccagttttgtcactggcgcgctttccctttccccactacactgccatcacccatccacttactgaataaaaaaggaggccccccatgctgtattgtgaaatgtttattgtttcacatgccttaggcaattgcgccagctcaagcgttatcggtatcgtgctgcgataactatggcttgagcgaagacccttcacgcaatcccttctctccggcttaccgggttatcgtcagcgagttttgacgaggcatttgcatgcctgtaactcttgagtaagttgactatgagtacattactaactgcccatgcgctccacgtggagacggcttttgggccgctgtttaactccctctccttcaccctgaagaaaggcgaccggatcggtctcatcggccataacggttgcggcaaaagcaccctgctgcaggtgctggacggcaccctcgcgcccacctcgggcagcgtctcgcttgccggtcagtgtctgatggcccgcgttgaacagcatctgccggaggcgctgcatacgcagtcgctgctgcaggcggtgctggccccattacccgctgatgtacgggaagcgcagcgctggctggccgaacgcctgctggcgcagatgggctttaccccggcggtgatggagcagcagaccgccaccctgagcggcggccagcacacgcgtctgctgctggcccgggcgctgatccgccagcctgatctgctcttgttggatgagcctggcaaccatctcgatctgcccaccctgctgtggctggaaagcttcctgcaaacctggcaggggagcttcgtactggtgtcacacgacaacaccttactgggtgctgtaactaatgcgagttggatcctccgtgaccagacgctacattgcttcgccttgccctgcagcgctgcccgtcaggcactgcaggagcaggatgaaagcgccgcgttacgtcataaggcggagcaaaaagagatcgaccgggtcagcgccagcgcccggcggctggccacctggggtcgggtctatgacaatgaagatctcgcccgcaaagccaaacagatggagaagcaggtcgcccgtctgaaagacgagcagaccgagctcagcgtcggcccgccgtggcgcctggtgttacagggggacgccctgccggccgaccgccttttggagatggacacccttcccgtctcgcccgcgccgggtcagccatccctcttcaccaccggcgtggcgcgcctgcgcagcggcgatcgcgtggccatcatgggacgtaatggcggcggcaaatcgtccctgctgcgcctgctgtggcagcagatgaacaacgcatcgcctctcccggggctgcgcctgcatccccggttgcaccccggctactatgaccagacgctggcgcagttgccggacgaggccagcctgctcgaggccctgacgccgtttgccccgtcggcggacacccgtaaacgggcgctgatcgccgccgggtttggctgggcgagacatagccagaaggtcagcaccctcagcggcggcgagcgatcgcggctgctgttcgttggcctgtcgctggcgcgctacagtctgctgctgctggatgaacccaccaaccatcttgatatggagggtaaagcggcgctggcgcagacgctgcgcgattaccccggcggcgtgctgctggtcagtcatgaccgccagctgattagcgaaagctgtaaccgcttctggctgattgacagcgccgggctaacggagtggcacagcctggaggaggtctatgcccgtctgcaggccgtggcgcccgccccggacagtcggctcgctttgcagagtacacccgccggggctgacgatgatgaggaggcgctgctggcgcggctgattgacctggagcagtggctggctgacgacatggcccgcaagccaaaacatcaaaagccgtcactgcaggcacagtggcaagaggagattgaccgcctgcttaaccaactgacgtaatctccatgtccccccaccggctaaggcgccacgcccttagccggtgtttccggaccgggtaaactgctgctcggtcattacctttccccactgctccccctgccattcgcggattaacgtgaagccaaaggattcatacagtttgcgggccgcgtccagccctttaaaggtccacagctgcaccgcgctaaactggcgactatcgcagaaagccatcgcctcgctgaggagccgcctgccaatgccggttccccggcagctctcatcgagaatgaaccagcgcaaatgcgcctcctgctggccgaggtcctcgccatcgatagccagcgagccgacgattttcccttcgcggatcgccagccagatctggttggccggggaggagagccgggtggcaaattccgctacgccgctggcgaccttgccttcaaaaaaagcgccaaagtcatgatgacgggcgtaatactccccgtgcatctgggctatccggccgatcatccccggctggtagccggtcatcagcgaaatttgcggagccgtatccgcgagcgcgctatcccgacactgcgccagcgcccgggcataggccgccagtccagtggcgacagtttgctgctgcgtctcatccagatggtctaacgccttcaccacctgacgggtaccccaggcgttaattttcgccaccgtatcgtgcccctttgccgtcagggcgagtgatttcgcgcgcgcatcctccgcgcaaggacgctcctccagctcaccagccgccagcagacgagagaccatccggctgacgcttgatttttccagtcccagcaacgtgaccagctgcgcggccgtcatctcccccctcatcgatacctcaagcagggtgtgcaccgccgaaggtgaataatgggtggcggccagcgtggtgctcataaagcccagctcgcgcaccattaaccgcgaggcggtacgaatctgttggattaagggggtatcaggcatggcggcgggtccagaaaatgaaatggttgtacaatacaaccatcgccttcatcctgcgtcaagatgcaatatggtgggataagcgttgtcgtgtgacgtgtgacgtgtgacgtgtgattttgccgccatagggatcgtgaaagcgaatgccgcgggcgccggacagcgcccgcgatgaatattattgcgagttcttcgccttccaggcctcccaggccgatttgatctcctgcttcgcggccgcggcgtcattaaagccggccagctcgacctttttacgcccctccggcagttctttatagacccggaagaaggcctccagccgctgctgttctattttcggcagatcggagatggtcttgatgtcgtcgtaggtcgggtcaattttactggccggtacggcgatgattttgtcgtctttctcaccgccgtctatcatcttcagcacaccaattgcccgcagcttaatcagcgtgcccggggccatcggcgcgcgggtataaaacaccacgtccagcgggtcgccatccccggccagcgactgggtcagcgagccgtagttcgccgggtaggccaccggcatcgactgaaagcggtcggcgacgataaaccccgttttagcatcggtttcgtacttaatgatcccgcccgtcgggatctcagtgacggcgtaaaattcttccgggttgttttccggctggggaaattccagcacattgtgggcctgggcggcggcggacaaaagcagaccggcggtgaggatggtttttaccagatgcattgttgtatcactctgttgttataagaaattgatgcgcaaaacaatagattcgagtgatgacaaaaacatgaccattcagcgtcaatattattacctaccaaatatagcgatattgtctgaattttgtgctatctctgtagcaaaaagccacattctgtactaagcgccttgtattttaccactcagcgtctaatccttattgggtactattgcattaattaagttaatcaattcccccacaaggagacaggcatgaaggcagctgttgttacccacgaccatcaggttaacgtcacggaaaaaacgctgcgcccgctggaaaacggcgaagcgctgttgaaaatggaatgctgcggcgtgtgtcatactgacctgcacgtgaaaaacggcgattttggcgataaaaccggcgtcattctcggccatgaagggatcggggtggtacaaaaagtcggcccgggcgtcacctccctgaagccgggcgaccgcgccagcgtggcgtggttcttcgaaggctgcggccactgcgattactgtaacagcggcaacgagacgctctgccgctcggtgaaaaacgccggctataccgtcgatggcggcatggcggaagagtgcatcgtcaccgccaactacgcggtaaaagttccggacggcctcgactccgccgccgccagcagcatcacctgcgcgggcgtcaccacctacaaagcggtcaaggtctcccacatcaaaccgggccagtggatcgccatctacggcctcggcgggctgggtaacctcgcgctgcagtatgcgaaaaatgtctttaacgccaaagtgatcgctatcgacgtcaacgacggacagctggagctggcggcctcgatgggcgccgacctgaccatcaactcccgcaatgaagatgcggcgaaagtgattcaggaaaaaaccggcggcgcccacgctgcggtagtaaccgcggtggctaaagcggcctttaactcggcggtggatgccgttcgcgccggtggccgcgtggttgcggtgggcctgccgccggaggcgatgagcctcgatattccgcgtctggtactggacggcatcgaggtggtcggttcgctggtcggcacccgtcaggatctggtggaagccttccagtttgccgccgaaggcaaagtggtgccgaaagtcaccctgcgtccgctggaagatatcaacgctatcttcaaagagatggagcaaggtcagatccgcggccgtatggttatcgatctgcgtagctaatcacccgcgcctctcccgtccgggagaggcgatccccctggcacgtcctctcgcttcccaacccgggaagtaaatgcaatttccgcaaatgcttagcgcaattccttggttcctttgtttttagccgcgcccgatgatggcaacacaatagataacaaaggaattcaccatgcatcgtcattttcgcctgcccgcgctggccgcgctgtttctcaccggcgccttttccgtctgggccgccgacacgccggttaaaggcggcaccttaatttatctggagcagcaaccgcacaccaatctctatccgcccgccggcggcttttacccgaatggcgggattctcaatcagataaccgacaagctcacctggcagaatccaaaaacgctggagattgagccgtggatcgccgagagctggaccagcaatgccgataaaaccgagtacaccttccacctgcgcaaaggggtcactttctcagatggcacaccgctggacgccgccgccgtcgccaaaaacttcgatacctatggtctgggagataaagcccatcgcctgcccgtctcagaggtcatcaataactaccagcgcagcgaagtgatcgacccgctgacggtaaaattctacttcaacaagccgtcgccgggcttcctgcagggaaccgccaccatcggctccggtctggtatctctcagcaccctgcagcgtaattttgaagagctgggcgatgcccgacatattatcggctccggccccttcgtcgtgcaggatgaaaaaccaggccgcgagctgacgctggtggcgcgcaaggattaccagtgggggccgaaaaacattgcccagcaggggcccgctaacctcgacggcatcacctatattgtgacgccggaagacagcgtgcgtatcggcgcgctgctggcaggtcaggcgggctttattcgccaggtgcaggcctacgatgaaaagcaggctaccgatcagggatttaagatctacgctgcccctacccgcggggtcaacgacagcctgagcttccgcccggataacccactggtcgccgacctgcgggtgcgtcaggccctgctccatgctaccaacgccaggcaggtggtggagacgctgttctccgctaactacccgcaagccacctccgtgctggccagctctgccgccggctatgtcaatctcagcgataaactcaccttcgaccaggccaaagcccggcagttgctggatgacgccggctggaagcccgccgccgacggtattcgcagcaaagacggtcagcggctggcgctgaccgtctatgagtcgctgccgcagccgcaaaataaggaagtgctgcagctgatcgcccagcagtggcgccaggtgggtgtggcgttgacggtcaaagccggggatgccggtagccgtacgctggataacctcgacccgcagaaaaccccgctcaccgtctcagaagtgggccgcgccgacccggatgtggtgaaaagtatgttcttccccaacaaccgcgatgcgctgctgcagaaaggcggctccagcgataaagtgcagcgcttccgcgatgataagctcaatgacctgctgaccggcatctccgcggcggtagagccgcagcagcgcttgcagttaaccggtgacgcccagcgctatctgatcgataacgcctatgtgatccctattttcgaagagccgcaggtgttcgccggcgcgccgtgggtcaaaggcgtcagcttcgaggccgtcggtcgtccgtcgttctacggcgcgtggctggacaagcactaagaggccggttatgagcgcttatcttctgcgacgattcggccaggggctgctggtcctgtgggcggcctttaccctcacctttttcctgctgcaggtcctgccgggggatgcggtgctgatcaagtttcagaacccggacctcggcctgagcccggcgcaaattgcggagatgcggctggcctacggcgccgatagcccgctgtggcgccagtacctgcacacgctgctggcgatgctgcacggcgacttcggctattccctgcaggcgggtctggcggtcagcagtctgattgccagcaacctgccggataccttaagcctcgcgctgccggccttcctgctggcggtggcgctggcgttcgccctcgctttcgcctcgcggctgccggggctgcgctggctgagcaattttctgcagtcgctaccggtgctgtttatctctctacctaccttttggttgggtatcgccctgatccagctcttctcgtttcagttgcgctggatcccggtaatcaaccccggcccactggaaggactgattttaccggttatcgccgtcgcgctgcccatctccgccccgctggcgcagatcctgatgcgcagcatggatcaggtggcggttcagcccttcgtcgcggtcgcccgcgccaagggcatgagcgaaacgggcgtcctctggcgccatgtgatggggaatgccctgctgccggcgctgaatattgccgggctgctgctcggcgaactgattgccggggcgctgatcaccgagaccgtcttcggccgcagcggcctcggccagctgacccagcaggcggtcaataaccaggatatcgccgtactacaggcggtggtgatgatctccgccctcggtttcgtcctgatcaacctgctggtcgacctggtcatgccgcgactggatccccgactccatttacagaccggaggtgcgaaatgagcctggtcgactataccatcgcggttcgccgccgcccggagtggcgtagagtgcgcctgcagcctggcctgtggctggcgtgggcggtgatgatcgccgccctgttaatggccattgccccacagtggtttacctccgctaacccgctggaggggatccccggcgctcagcgcctggcgccgcaggcgcactactggctgggtaccgaccagctggggcgcgacctgtggacgcgggtggtttacggcgcggtgcattccctgtcggcggcgctgatcgccgtcgccatcggcctggtggtgggtaccgcccttggcaccctcgccggggcgctggccggacgcgtggaatccaccatcatgcgcctggtcgatgtcctgctggccatcccctccctgctgctgcagctcacggtgattattctgctgggtttcggcacggtaaatgcggcggtggcggttggcatcgcggctatcgccagcttcgcgcgcctggcgcgagcagaagtggtacgcgtgcgccacagcgattacgtcgaggcggcccggggcagcggcggcacttttttcgccgtcttctggcgccatattctgcccaactcgctcactgcggtgcttgctttcgcgacgctgcagttcggtcaggcgatgttggccctggccaccctcagcttcctcggctacggcactccgccgccggtcccggagtggggactactgatcgccgaaggtcgcaattacctgtcaaccgcctggtggctgaccaccttccccggcctcgccgtggtcgccgtggtccttgccgccaatcgtcttagccgccagtggagtggagcacgcccatgaccgttctgtccgttgaagatctacgcatcagctaccgctcgcggggcgaatggcgcgaggtggtgcacaacatcagcttttccatccagcgcggcgaaatgctggccttcgtcggagaatccggctcggggaaaaccaccaccgcgcaggccattatcggcctgctggcggataatgcccgccgggatgccgggcggattgtcctcaatggcgaagtgattagcgactggtcggataaacgcctgaaccgcctgcgcggagtgagcatcagcctggtcccgcaggatcccggtaattcgctcaacccggtaaaaaccattggtcagcaggtggaagagatcctgcggctgcatcagtccctctccgccgctgagcgccgacagcaggttcttaacctgctcgctaaagtcggtctcagccacctggaacagcgttttgaccagtatccgcatcagctgtctggcgggatgaaacagcgggtgctgatagccatcgccattgccctgcaaccggatctgattattgccgacgagcccaccagcgccctcgacgtcacggtgcagaagcgcattctcgacctgctcgatatcctgcgtcgcgagtcgggtaccgccgtgctgtttgtcacccacgatctggcgctggccgccgaacgcgccgaccggatcatggtgtttcgccagggagagattcaggaacaaggcgccaccgagacgattgtccagcgtccgcagcatccttacacccgccagctgctccacgacctgcaggatgcgccgttgaggctaacggcggcgcgtcaccggccgctggccacgccggccattcgcgtggaggggatcagcaaacgcttctcgctgggcaaacaggcgctgcaggcgctcgacagcgtcagctttgaggtcagacgcggcagcacccatgcgctggtgggcgaatccggctccgggaaaaccaccctggcgcggatcctgctgggctttgagcgcgccgacgccggacaggtcatcatcgacggtatcgacgccgggcatctcagccgcgaggcacagcgtcagctgcggcgcaagatccagtttgtctaccagaaccccttcgcttcgctcgacccgcgccagacgctgtttgcgattatcgaagagccgttaaaaaactttgagcgcctcagcgcggcgacgcgtcgccagcgtgtggagagcgttgccgcccgggtggccctggcccccgagctgctgtcgcgtacgccgcgggagctttccggcggccagcgccagcgggtggcgattgcccgggcgctgatcctcgagccggcgatactggtccttgacgaagcgacttcggcgctcgacgtcaccgttcaggcgcagatcctcgccctgctgcagcagctacagcagcagctgggtctgagctacctgttcattacccacgatctggcgacggtcaggcggatcgccgacagcgtcacggttctgcgcgccggccaggtggtggagcatggcgacgtaaactgcctgttcgccgccccgcagcaggcctacacccgcgaactgatcgccgccattccccaggtttccccccgcttagcacaggcccacacggagaacgcataatgcctaaacgcctcggtttttttacccgtctgctcgatcagggctccgcgcaaacgcgctaccggctggcggccgaacagatccgccacgcggagcgtttgggcttcgacagcgcatggattgcccagcaccattttcatgaacaggaaggcggcctgccttcgccgctggtgtttctcgcccacgtcgcggcgcagaccgaccggatccgcctcggtacggcgattatcaccttgccgatggaaaatccgctgcgcgtcgccgaagacgcggcggtactggatttactcaccgacggacgtctggaggtgggttttggctccggcggcacgccaacctcgtttctgcccttcggcctgaccagcgagcagcgcggggcggcgtttgccgaccatctgcacctgatccatagcgcctggcgcggcgacacgctgagccacccggacaaccgtctctatccgccggcgccgcagttggcggagcgtatctggatcgccaccttctctgcggagggcgccatccgcgccggtcaggcgggacacgggctgatgctgtcccgcacccagccacggccacccggcgagccacgtctgccgctggacgccattcagaacccgatcattgacgcctacctggcggcgctgccggacggcgttgcgccgcggatcctcgcctcgcgcaccgccttcgtcgccgacagtcacgcccacgccctgcaggtcgccgagcccggtctgcgcaagcaggcaactcagcaccgggcggcgggtcatacgatagaaggtgacagtgtcaccgactatctgcaacagctggatgcccacgttggcgatcctgagcatgttattgcctccctggcgcaggacagcgtgctggcccgcgccaccgatatttcgtttcaggtgcactcggtcgagccttcgcaccgggatacgctgcgttccattgagctgatcgctcagcatattgccccccacatcagataaggagtccccatgacgctgagtcaggatattctggccgaactggcggagatcgcccccggttccccgctcgatcaggcgcgcgccgtccgcgatgccgccacccgtcacgcccagggaagttatgaagtgctgttccgccagcaggacgctgactttcctcttgatgaacgcttcgcggtggccgcgaaggtggcaaaactgcaccaggcggacgcgcttgcggcgcactatgccggtttcggcctcgccgatccgaccaccgatcgtctggtcccggcgctggcctttgcccgcctgctcaccttcacccccgttgaagccactcccggcgcgctgcacaccttaaccggcgcgggctggagcctgcggggcatcgtcaccctggcgcagctggtagcctttgtcagcttccagagccgactgctgctgggcctgcgggcgctcaaccataagcccatcgtcagcgcagatacgccgctggtcgccggatactggcataccaccccgtacgcgcagagcggcaaagcggccccggttcgcttcacccgcgacgagctgcactgggaaccctggctggccgataaaccgctggaggaattcaacgctgaagaacaggcgattctggccaaatatggccatagcgactccccctactttcgcctgctggcgcgcaaccagccggtgctggagcagcggaccctgaccgataggggcattttctataccgcgggaggattgccgcgcgccgaacgcgagctggccgccacggtcgccagtaaaatcaacggctgtatctactgcgcctcggtgcatgcccgcaaagcggcgcagctggcgaaggacgagaccgccgtcgacacgctgctggcggtgacgccgggagaggatctacgcgatgggcaatcgccgcgctggcaggcggaaatcgacgccgccgccgcgctatcggtgacgccacccgcgttaaacgccgatcatctggcggcgcttgatgagcagggcttagatactctggcccagctggatctgctgcagtccgcggcctttttcgcctgggccaaccgcctgatgcttaccctgggcgaaccctggcgtgagtaggcgtcgttagtaagcttgtcgccgctgatggcagccatagatgagcaaggcgctcatcgccagaaacgacagcgcggcggcggggagcgccacgctgttccagccaaagccctgggcgatcatcattccgccgcagaaggcgccgatggcgctgccgaggttaaaggcgatctgtcccccggccgcccccagcatctcgccgcctttggcgttctgcagcagcaggatctgcagcggcgctgacagggcgaatagtcccgcgcagcagagaaatgccagcgccagcgaagcgactttgtgttcaccgaaggcaaagatcagcagcagcgtcacggctatgaccccgtcggtcatggccgcaatgcgcagcgggctgtagcgcccggaaattttgccgctgaacagattgccgaccaccattcccagccccgccagcatcataatcagcatcatcttgctttcagcaaagccggatacattgagcataaagggcttgatatagctgaaccaggcaaacacgccggcgttaccgaacatggtggcggcgaaaatcagccacggcgccggggaggcaagaaaacggaactgctcgcgcagccgcgtgctggcccggtcataaagcgtgggcacccagcagaagatcgccagaaataccgccacgttaaataccgcgataagcgcaaaggtatagcgccagctgaagtgatgcccaagccaggtgccgcccgggacgcccaccaggttagcgatcgtcatgccgccaatcatccccgccaccgcggcggtcaccttccccggcggcgcgattttcgacaggataatcgcgccgacgccaaagaacgccccgtggggaaacccggaaaccagccggccaagcgccagcatggcgtagctactggagaaggtaaacagggtattgccgagaatacacaggccagccaggaacagcatcaccgatttcagggaaaaccggctggagagcagcgccatgatcggcgcgccgatcaccacgccgaaggcataccaggcaatcatattgccggcggcgggaatggatattccgacatcgtgcgccatatccggcagcacgcccataatgccaaactccgccatgccaagtccaaaggtgcccagcgccagtgaaaaaatcgtttttttcatacatcttataggggtattgagagccggccggcattatttactatcccgccccgacacaccagctaaaaacgcccgacggcagtttcctccatacaacagcctgattcgttcatgttccccagccgcgtggcataccggcggcgtggtttcgcagtaacaatcccctatcaaaatcagtgggctcaaagagataaacacctcattgatctcaagttaacttgaggttgtaaagtcaaaacatcgttcaccttgggagaattatccatgcaaagtgttgatgtcggttttactcatgtcgcctttaccgtccgctgtctggccagcagcatcgatttttatacccgctataccgcgatgaccgtcattcaccagcgcgagcccgccctcccctcggcgcggaaagtggcatggctcagcgaccgcacccggcctttcgccctggtgctggtgcaaagtgacgatccggccgatacgccgctgggaccgttcggccatctcggcgtcgcctgcgccacccaggccgagatcgatgagaaagtggccctcgcacggcgggaaggtgttttacgccgggagccggagcagctgggcgatccggtgggctatttcgctttctttgccgacccggacggtaacaccctggagctgtcgtgggggcagcgggtgggactggaagtcatcctggcgggaaaacccggcgaataattttccaccgcctcgccgggggaggattacacttcaaagggatacctcggcaacacggagcatggcgatgggcaacaagaaaagcggtaatccggtcgacacggcggcaaaaatcgcgccgctcgacaacaaagcgtacgagaaagcgctgcgcaaactccacgttgagctggtgaaactgcagcgctgggtagtgcacaaaggactgaaagtgtgcattgtctttgaaggccgggacggcgccgggaaaggcggcaccattaaggccatcaccgagcgcgtcagcccgcgtatctttcgggtcgtcgccttaccctcgcccaccgagcgcgaaaaaagccagctctactttcagcgctatatcaagcatctcccggcggccggcgaaatcgtgattttcgatcgcagctggtataaccgcgccggcgtcgaacgggtgatgggcttttgtacgccggaggaggtgcagaagttcctcgacggcgcgccgatggtggagcgcggcatggtcgaatcgggcattattctgctcaagtactggctggaggtctctccgcaggagcaggagcgccgtctgcgggatcgcatcgacgacgggcgtaaaatctggaagctctcgccgatggacattaagtctttcaaccgctgggatgaatatactgctgcccgcgacgccatgttcgccgccaccgataccgcctgggcgccgtggttcgtcgcccgctcggaggataaaaagcgcgtgcgtctaaatatcatcacccatctgctgtcgcagatcccctatgaagctttaccggtggagcctgtgacgctgccgaagcgcaaaattggcaaaatgaaacagactaattttcctttccgcttcattccagagaagttttgattatttctcgtcgcgctggttaatgccagcgccaggtttattactataaccatgaatatttcaggctgttacttccctctggaagctgtctcgcaaaataaatattaaacttactgctggtatttattttttagtgggtaaagtaaataatcacagaaccaaccgcaaggagcctatgatgaaaagtaatacgctacgtaaaagacccactgacgtacccgtccagaaggcgtcagaacagccaggtaaggatttacgagaagcagataaacagcgacaacacaaggaattcattgccgcaatgaatgaatttattgcaaaaggaggcactcttactgatgatgaatttttcagggtgctatgatgcttgaataattcaatgtttatcgaaattgttctgctcagacaaataaaaccctgccatattatatgatcgtgcagaatgattattatgcagacctggccacgagagtcattattcctttaatgcgaccacaacagttaccacgctggcatcagcatgccgtaccaaggataaatatagaatttgacagctttttactttgtacgccaatgagcagtaacttaaataataaacggatcccgccacaggatttcgtctgcaatctgagtcatgcgcgccagggcgttatcgattcaatcgatacacttatcacgaactgctgactgccgggaacccgctccgacatctccggagcgggtttcgcgccgtgaaggcttacttcatcccttcacgactctctttcatcgcttccaggcgttcgacatcgcgataccagcgcgggtggtgtttcttcgcccagcggcggctcaccttgccttcaatcattcccttaatcgaccccttcacccagaacgccatatacatatggataaggatggcgtggatcagaatgatggccgatgttgcgtgaatcagcaggctatagcgaatcacctgcatcgggaaatattccgcaaaatatgggcgccagataatcaccccggtcaccagcagcacaaatatcatgctcatgatggtccagaacatcatcttctgcccggcgttatacttaccgacgcgcgccaccttatgctcgttgcctttcagcacctcgacgatgcctttcagccacggaatatcctgtttatcagggatgttatggtggacaaagcgcacgaacataaacatcagcgcgacaaaaatcagcaccccaaagaacgggtgcagaatacgccccatctgcggcgtgccgaaggtttccgttagccactgtagcgtcggaaagaagaacgatattcccgacagcgccaccaggaagaaacagataaccaccgtccagtgacaggcgcgatcgataaacgtcgtgcgcacaatcatcttcgatttactcatcatgcttctcctcgtcgtcgtcaacttccttgttcggcccgataccgatgtagtggtaaatcagcccggcgaaggtggcgataaagcccgctgccgccagcggtttcagcgcccccttccacagactgatactggtatcgatctgcggttccttcggcagcttgtgatacagctccggctggtcggcatgatgcaggacgtacatcacgtgggtgccgccgacgcccggcgggttgtaaatcccggcgttggcataaccgcgttttttaagcttagccacccgctcctcggccacctccagcatctctttcttcgtaccgaagtggatcgcgccggtaggacaggttttcacgcaggccggctcctggccgacgctgacccgatccacgcacagggtgcatttatagacccggttatcctctttattgaggcgcgggacgttaaacggacaccccgcaatgcagtagccgcagccgatgcagttttcctgctggaaatcgacgatgccgttggcgtactgaataatcgccccagcggacgggcaggccttcaggcagcccggctctgcgcagtgcatacagccatccttgcggataagccactccagtttgccgttctgttcggtctcgctaaaacgcattaccgtccaggatttggcgctgagatccgccgggttgtcgtacaccccgacgcagtgccccacgtcatcgcggatgtcattccactcggaacaggcaacctggcaggctttacagcccacgcaggaggagacatcgataagcttggcgacttccgctttatagtcccgcgcgcgcggcgcgggggtgatcgggttggtcgcggagcgtttaataatgtcttgggtttccatcgccattgaatcgctccttacgctttctcgatgttgaccaggaacgccttgtattccggcgtttgcgagttggaatcgccaacgttaggcgtcagggtgttggcgatgtagcctttgcgggccacgccttcaaaaccccagtgcagcgggatcccgacggtctccacctgctggccgttgacgttcagcgtgcgcagtcggcgagtcaccacggcaaccgcgcgaatgaagccgcgcttgctgctgactttcacccaatcgccgttagcgatacctttgcttttcgccagcccttcgctgatttcgacaaactgttccggctgcgcgatggaattgagcaacgcatgcttggtccaggtgtggaaatgctcggtcagacgataggtggtcccgacatacgggaatttatccttcttacctaagcgaatggcgtcctcttcatacaaccgcaccaccgggctggagaccaccttcgggtgcagcgggttagtgccaagcggggtttccatcggctcgtagtgctccgggaacggcccttccgccagtttatcgagcgcaaacaggcgacccagcccctcctgctgcatgataaacggcccggttttgctccctggcggcgcggtattgaagtccggaatatcattcccgacccacttgctgccgttccactggatcagcatccgcttcgcatcccagggcttgccgttgatatcggccgaagcgcggttgtacagcacccgacgattgagcggccacgcccaggcccatcccagcgtattgcccaggcccgaaggatcggcgttatcacgattcgccatctggttaccctgctcggtccagctgccggtatagatccagcaagacgacgcggtgctgccgtcatcgcgcagcagcgcgaagctattgagcagttggccttttttcgccagcaaagtgccattttgatcgtagagatccgccagcgcgtagccgttgttctcttttgccacctcttccgattccggatggtccggctgcttgtagcgccagctcatcttcagcaggggttccgcgcccttcccgccttcggtgcggtacagttcgcgcaggcgatggtaaatcccggcaaggatttcgccatcattgcgcgcttcacctggggcatcctgacctttccagtgccactgcagccagcggccggagttggcgatcgaaccgtcctcttcggcaaagcaggtcgacggcagacggaagacttcggtctgaatcgccgacgggtcgacatcattagactcgccgtggttctgccagaaggtcgaggtttcggtcaccagcgggtcgataaccaccatatatttcagcttgctgaggctgcgaaccactttgtttttgtccgggaaggaggcaaccgggttaaagccctggcagatatagccggtgacgttgccgttatccatcatgttgaagtatttgataacgtcgtaagcctggtcccacttcggtaaccattcaaagccccagtcgttctctttttgcgccgcctcgccgtagaaggatttcatcaggctaacgaagaatttcgggtagttgctccagtagttcacctgctcgggcaaggtcgccttcggcgtgttggcgctgaggtagctatgcagatcggtctgtttgtccgatggcagcgtcaaatagcccggcagactggtcgacagcaggcccaaatcggtcagcccctgaatattagagtggccgcgcagggcgttgacgccgccgccggccatccccatattgccgagcagcagctggatcatcgccatggtacggatgttctgcgcgccgacggtgtgctgcgtccagcccagggcatacaggaaggtggtggtgcggtccgcggcgctggttgaggccagcacgtcgcacactttaaggaagtccgctttcggcgtaccgcagatgttttcgaccacctcgggcgtgtaacgcgaaacgtgctgcttcagcagattccacacgcagcgcgggtggctgagcgtttcatcgcgtttggcgtagccgttttcatcgaactggtagttccaggacgatttatcgtactggcgtttttccgcatcgtagccgctgaacagcccctcttcgaaggcaaaatcatcccgcaccagcaggctggcattggtgtaatgcttaacgtactcggcattgatcttattgttttcgatcaggtacagcagcacgcccgacaggaaggtaatgtcagtaccggaacgaatcggagcatagatatcggccaccgacgcggtgcgcgtaaagcgcgggtcgacgacgatcagcgtggcgtcgttattgtttttcgcctccatcgcccagcggaaacccaccggatgggcttcggcggcgttaccgcccatcaccaccacgacgttggcgtttttgatatccacccagtggttggtcatcgcaccgcgaccaaatgttggagcaagacttgctaccgttggtccgtgtcagacgcgcgcctggttgtctaccgccagcatacccagcgatcgcacaaatttttgcgttagcatgccggtctcattgcttgccgccgaggcgcacagcatgccggtggaaagccagcggttaaccgtcacgccctgttcgttcttttcaataaagttggcgtcgcggtcggctttcatcagtcgggcgatgcggttaaaggcttcatcccaggagatgcgctgccatttatccgagcccggggcgcggtattgcggataacgcagacggttttcgctgtggacatagtccagcaggcctgcccctttcgggcacagcgcgccgcggctcaccggatggtccgggtccccttcgatatggtagatcgcttctttggcgtttttcgcaccgtcgccgaggctatacattaatagcccgcagcccacggagcagtaagtgcaggtgttgcggatctctttcgcacgcagcaatttgaaattgcgtgcctgagccagcgccattttaggggcaaagcccagggcggcggcggtagttccggccataccgcctgcgcagatcttaaagaactttctgcggctgacgtccattgcattcctccatgcaggatgttgattcatcgcgcggaggaaactaacagcaaaatcccgggaaaatttgcgtcaaatcaaggaggaaaaccttcgcccccttaatcgccagccctggccattttcgctaatccctaagggttagcaacggcggaaaatttcgcccctcaccgataaaaagatgatatatatgccggctgcatttgcgtaaccatcaggaaaagcatggagaaaaagagagccacgacgatcggcttcgccgccattatcttatggagcacgatggtcggattgattcgcggcgtcagcgaaggactgggagcggtcggcggggcggcgatgatttacagccttagcggcctgctgctgatctttaccgtcggctttcccaacctgcgccagatcccgcgtcgctatctgctggccggcagcgtgctgtttgtcagctatgaaatctgcctcgcgctgtcgctgggctatgccgccagccgccagcaggccattgaggtggggatggtcaattacctgtggcccagcctgacgattttattcgccattctctttaacggccagaaaagcagctggctggtgatccccggcctgattttcgccctgctgggcgttggttgggtgttgggcggtgagcatgggctacagcccgatgagattatcagtaacgtcatttccagcccgcttagctatctgctggcctttgtcggggcgtttatctgggccgcctactgcacggtgacggccaaatatgcccgcggtaaaaacgccattacgctgttcgtcctgttaaccgccctgacgctatggctgaaatttctcgccagcgaccagccgccgatgctgtttagctggccggtggtcattaagctgatgacggtctccgtggcgctggggctggcctacgcggcgtggaacgttggcatcctgcacggcaacgtcagcctgctggcggcggcctcctacttcacgccggtgctctcctctgcgctggcggcgatcctgctgagtgcgaccctgtcgtggtccttctggcagggggccgggatggtatgtctcggctccctgctctgctggtacgccacccgccgttagccgagatcgcctccggctaccggcagcgtcacgccggtgatatagctggcctcatcgctggcgagaaacaggatcgcattcgcctgttccgccagcgtgccgtaccggtgcagcagactgctcgccaccgtctgatcgacgacctgctgataccacgccttttcctgctcgctcggctgctcttcgttacgcggcgtcaggcgcggcggcgcctcggtcccgcccggggccacggcgttaatccgaataccgctgccgctgtactccatggcaatcgagcgggtcagcgcgttaacgccgcctttcgccgccgagtacggcacccgattcactcccgccgtcgccaccgacgaaatgttgacgatgctgcctttgccctgcttcagcatccatggcagcgccgcgcggcagccccacagcgtggggaacagcgagcggcggatctctttctcaatctgctccggctgatattcggcaaaggggcgcgcccagatggtgcccccaacgttgttgatcagcacgtcgatacggccaaaatgagcgaccccggcggcaaacgcctgctcggtactttcccacgcttccagatccgcctccagcgccagcaccagacagccggattgcgccagcgtcgccgccagctcatggacgtatgacgagcgatcgatgagcagcagagccgcgccttctgcagccgcctgctccgccgtctggcggccaatgccctgcgccgcgccggtgatgacgacgactttatcggtaaaacgcattttgtctccttatgccgccgcgctctggctggcgataaatttctcataccagaaccccgccggggtgatcccgcggtcgcgcaacgccgtggcaaccgcgttaaccatcggcggcgggccgcagagatagatgtccacgtcgccgttgttcagcatcgcgtcgtcgagatggtgggtgacaaagccgcgctgcgggcaagtgctgttttcatcggccaccaccggtagccaacgataccccgtcagctgttgaataaaggtatccagcgcgtcggttttcaccagatcgcagtcacgagtaacaccgtacagcagcatcaccggacgctggctgccctgtgtctgcagggtatggagcatggagagcagcggcgccaggccggtaccgcccgccagcatcagcagcggacgttcgccgtggcgcagatagaagctgcccatcgggccgctgagggtaagacgatcgccgggccgcgcccgctgggttaaccactggctcatcatgccgccaggcacgttacgaataaggaaacgcccttcgagggaacccggttgcgagctaaatgagtaggcgcggacatgaagcgtgcccggcacctgaatgttgacgtactgccccggcaggaaggccagcggctcatcgagggcgaccaccagttcgatggcggtatcggacagtaaattcacctgccgcacctgcgccccgagcgtcgccagggccgttttgcactgcgcggcggccaccggcacatcgatcacgcagtcgctggtcgggaccatctgacaggtcagcacctggcgggcctgcgcttcgtcgtcgcttaacgcctcgtcgagataatcttcacccaggtcgtactcaccgctggcgcagtggcatttgcaggtaccgcaaacgccgtccgagcaatccatcggcagattcaccttctggcgataggcggcatccagcaccttctctccggcatggcattgaataaagcgggttacgccgtcctcaaaattaagagcaatattgaaggtcataagcgcctcttaaatgtggtaaacgtcaatcacctgacggatataatcgttattcaggcgcacggttttgcggacgatctgcggtctgccgtcctgttcgattagcgtgcagcaggtagagccaaaataggcatccgtgtgctgatagcgatggctccaggtgacccagctgtaacgcacctccagaccctcgtcgctttcgcccatcagctcaacgttgctgatgatatgggtggtccgcggctctggcgtgctggccccggagcgctcggttttaatgcggtagacgcgatcctccagcccttcgcggttggggtagtagataagcgaaatctctttttgcgggtcgcgggtcagctggtcatcgtcgccccacgccggcatccagtagaccacctgcgggctgtagcagctgagccattcgtcccactgacgatcgtccagcagacgggcttcgtagtagagaaactggcgaacctgttcgaggttaagcatcaggccacctccacgcgctgggtaatggactggtcgtaacgctgttgttcctgttcaatggccgccagcatcagcgtctgccagtggtggtgatgggcgatgtacagcgcttcgtcctccgatttcaccccgcttaaccgcggcgaaaagccggcatgttgcgcatgctcatccgcgccatcgacccagcgcagcgcgccgcggctgaggtcgctccatggcagattttcgccgagaaagccgcgctggcaggcgctgaactcttcgaggtcgtccggcgtccccattccactgacgttaaagaaatcctcgtactggcggatacgcagcgctctggcctggtcggattcccctttcggcgcaaagcaccagatggtgacttcggttttatccaccgcaatggggcggatcacgcggatttgcgtcgagaactgatccatcaggtagacattggggtacaggcacaggttgcgggtttcgttgaccatctggtcggcacggcgttcgccaaattccgcctgcagccgttcgcggtgggcatagaccgggcgcacttccgggttcagcgcccgggtccacaacagcatatggccgttatcaaatccatagccgccgccgaggctttttgaccaaccgttggcatccaccgcgtgcgtcccttccgcttcatagttgcggcgtgacatggttgaggcgtagttccagtggaccacgctgacgtgatagccatcggcgccgttttccgcgcccagtttccagttgccctcatatacatagctcgacgaacccttaagtacctcgagcccctccggcgcctggtcgacgatcaggtcaataatcttgcaggtttccccgagataggcctccagcggctgcacgtcggccttgaggctaccgaataagaaaccgcgataggactgaaaacgcggcaatttttgcaggtcgtgggagccgtcttgtttaaagctcggcggatagccgccagtgctctcatctttggcctttaataatttgccattattgctgaaggtccagccgtggaacggacaggtaaacgaatttttattcccggttttgcgtcgacataacatggcaccgcggtgagcgcagctgttaattagcgcgtgcagctcattctttttatcacgggtaataatgacaggctggcggcccagcgtcagggtataataatcacccggctggggaatttgactttcatgagcgagaaatacccagttaccttcgaaaatatgcttcatttcaaattcaaacagctgcgggtcggtaaatatagagcgatggcagcggtaaatatgattttcacggtcgacaactaaggcattattgattttgtctttgagcgtcgagagcgttttttgcatgagtcggtccctcctgcaggattcaggatgaaagaaacagggtgaattcttcgttttcgagtgcaatatctggcccgggcagtagcgtgcccggggccgataatgccgcttactctttggcgcgcaggcggatcccgcgctgctcttcgtcggcgctcagcgctttacacagggtgaaatcaaaacaaacctcggtgtgctctccctcaagattgcgctgcgcgatgatctcgcggtcggtcacttttaccggatcggcaatcaggccgtcgcgggtggcaaaggcaaaatcgtcccacaggtatttatcgccattgaggttaatctggctggtcagatgtttatgacccggcgcggagacgaaaaagtgaatgtgcgccggacggttgccgtggcgacccagtctgtccagcagtttctgggttgggccatccggcgggcagccgtagccggagggcatgatgctgcgcacgctgtagcggccatcggcgccggtgcggatccgccggcgcaggttgtactcactctggcctgggtcgaagaaggaataatttccgagggtgttggcgtgccagatatcaacaatagcgttggccactggccgaccttcggtgtctttgacttcaccgtgcagccacatcacttctccggcgtcggcgccgtcatccatgcgggcgtgaccctcggccagcggcgcattagccacgtacagcggcccttcgatggtgcgcggggtgccggtttcccgatgcgctgccgcgtcgatggcgtcctggcgcagatcgaggaaatgctccagtcccagtcccgccgccagcagcgccgcctcctgacgcccgcccagctcgtgcaaatagtttaccgcgtgccagaactcttcttccgtaacgttatagtcgtcgatgagcgtgcagatattttccagcagacgatgaataatcgccttaaaacgttcatcgccgccggcaacatctaatccggcactgtcgcgtaataatttctgaatagctggttgttgtacgaatacattactcatactggttctctcttatattttgcagggtatacgccggtaataccggcgtgaggtcagatattattattagcgatcgtcatcgcgaattgatgacggatgacgacagagggcttccacttttatcgccataaagggatatagcggcaatcccattaatatttgatgcaattcttcggcatcttgaacatcgaaaatactgacgttggcataaaggccggcaacgcgccagatatgccgccatttgccttcccgctgtaattgttgcgaataggctttttcgcgttgttttatttcctccgcctcgttggcgggaaagccaggcggaatattgacggtcatctccactttaaataacatttttttctcctgttccccgctacggctggcgggtataaaaatgcagtttgtcttcatccagctcgacgccaaggcccggcgtttgcggcagcgccacctgaccgtcggcaaaggtgagcggcacgctgacaatatcgtctttcagcaacagcgggccgaacatctcggtaccccactgcagcggcagcgtcgaccaggcgtgcagagaagccacggtccctacggtgccttccagcatggtgccgccgtacaggccaatccctgccgcctgcgcgacgcgggccagcgccagcacgctgttcggccccccggctttggcgattttcagcgcgtaagcgccggtaaagccctgctgcgccagctgataaccatcgtaagcggtcgcgaccgcttcatccgcgaggatcgcggtttcaatttgctggcttagccgcaccagggcggcattatcgtgggcgctgaccggctgttcgataagatcgacgcccatcgccgccagttcgcggcagcctttcgcgccggtggcagcgtcccaggcctggttgacgtcgacacggatgctggcgcggtcgcctaacgcttcaacgatggcgcgggtatgacgcaggtcggtggcgagttcacgcgcgccgatcttcagtttgaacgcccggtggcggccttcggccaacagtttttctccttcagcgatatctttcgcggtatcgccgctggctaaggtccacagcaccggcaacgccgtttgcagcgcgccgccgagcagggctgataccggcagacctaaggctttgccccgggcgtcgagcagcgcagtttcgatggcggacttcgcaaaggtgttgcctttaatggcgccgttcatacgggcggtcagcgcattcaggttatcggccgactgccctttcaacagcggcgtcagataatgggtgatcgccgacgagatggcctcggggctctcaacgccatagctcaagccgccgatggtggtggcttcgccgatgccgcagatgccgtcggaacgggtaaggcgcacaatcaccagcgactggcagcccatggtggtcatcgacaatttatgcggccggatggtcgggacatccacaatccagctctcgatttgctctacggtggcagtcattttctgttcctgatgagatatataactttttgtacccacatccataacgggggtctgtgccattgacaatagggttcagcctggcggatggtcaacggcgataatcgaaatgttgtgcgattatcgacgcgtttgttaaaagacggttattaatgtgatcatggtggtaaaaccggcacaattcagcgcgccccattttgcgcaaggtatagtgatctgccgtgagctttacgctgcaacggagaaggatgcgatgagcgacaatatccccaatacgctgagcgccaggcaggccgagcacgaccctaactttatgctatctctggcccgcgggctggaggtccttaacgccttcaccccccagcgccagcggctgaccatttcccagctcagccagaaaacgcaaatctcgcgcgcggcggtacgccgctgtttgtataccctcgccgcgctgggcatggtgcacagtccggatggccgtagctatgaactgctcccccgggtgctggccgtcggccacgcctatctggcaggcacgccgctggccaaggtggcgcagacggcgctggataatcttggcaaagcgctcggcgaatcctgttcggcggccacgctcgacggggataacgtgctttatattgcccgcgcggcggtcaataatttactgagcatcgatctggggcgcggcagccgcctgccggcgtgggccacgtcgatggggcgggtgttgctgagcgcgctgccggaggaacagctggaagtgacgttgtcacgggctacgcttattcgctacactccgcataccctgtgcgatttgtccggtttacgtgcagagatcgcccgggtgcgcatgcagggctatgccctcgccgaccggcagatcgaggtagggttgtgctcgctggcggtacccgtgctgtcgcgtcacggtcaggtggtggccgccctgaatgtcggggtacctgccgcgacggtcagcgccgcggcgttaaaagagaaggctctcgccccgctacggcgcgcggcgatggatctgtcgctgcagctatagcgccgactgcggtttcgccacggtggcgaggctgcgccagatcccggcggccagcagcagaagcaatacacccgccgtcgccagcaccaggctatgagcctgaataaaagccgtcttcgccgccgccatcagcgcctgcgccaccccggcgggcagcgcctgggacagactcaccgcctcgccaatcgatgacgccgcctgctgcgccatggcgccactcaggccagacggcagcgcaatagaggcgctgtagctgcgggtcaggatcaggccgaacagcgctatgccgagaccggcgcccagctcataggccatggtttcaatcgcccccgcggccgccgctttctccttcggcgctgccgccataatcgcggaactggaggccagcagcgcgctggccacgctaaagcccagcagcgtcatcagcccccaggccagccactgctgggtactgaaatcggtcaacgccaggccgagaaagctgaaggcgctgagcagcatcccgccggtcgccacctcgcgcagcccaagccgcgataccagcaggccggcaatcgggccgctgaagccgctggccaccattaccggcagcataaatatccccgcctcgaacggcgttttctggtgcacaaactgcagctcctgggccatcagtagctcaaaaccgaccagggtaatcagggccgtcatcgccatcatcaccccgcttaagattatgcgatgggtgaacaggcgcatatccaccatcgggcgggccgccgacagctgcttgcggataaaccaggttaacatcgccgccccgccgagcgccaccagcgcggtgagccacagcgccagctggcccttcagcgccgatttcgcgctaaacaccagcatcaggatcgcggcaatcaaaacgagcgcctgcagtagattgagcggctgttcgcggcgcgcgggctggcgcggcaccactttcgcattaatcgcgataaccaccagcacgatcggcacattgatcaggaacaccgacccccagtagaaatgctccagcaggataccgcccaccagcgggccgaaggccgcgccgccggagccgaccgctgcccacagccccagcgccatattgcgctggctggcctcggcaaaggtgctgcggatcccggccagcgtcgccgggacgatcatcgccgcccccaccgccagcaaagcgcgtgaggcaatcagcgtcatggccgtcggcgacagcgcggcgcacagcgaggcgatgccaaaaatggcgctgccgagcagcagcaggcgcttaaagccgatcttatcgccaagggcgcccatcggcagcaccatcccggccatcactaatgagtagatatcaatgatccacaacagctcattgccgctgctacccagcgccacgctgagggtcggcgcggccacatgcaacaccgtagcgtcaatcgccaccggaatataaaccagcaaaatcgccatcagcgtcatccattgccgtgacatagcttgtacctcaatcaatattgaatattggacacacgtccaggatggcgatcctgccggattgttgaacacatgtccaactttttgttacactcggccaaagccagatgacagcggggttctatgcactatttacaacgtgatgcgcgacgggaagggattatgcaggccgccatgcgcctggcgctgcgcggcggctttgccgccatgaccgtgcggcagatcgcccgcgaagcccaggtggccgccgggcagctgcaccaccacttcacctccatcggcgagctgaaagcgcaggttttcatccgcctgatccgcgagatgctcgacatgccgctggtggctgaggacgccagctggcgcgagcgcttgttctcgatgatcggcagcgaggatggccgactggaaccctatatccgcctgtggcgcgaaggccaggtgctggccgacagcgatccggacatcaaagcggcctacctgctgaccatgaatatgtggcatgccgagaccgtcgccatcatcgagcagggcctcgccagcggcgaatttcggtcggctgagcctgcggcggatatcgcctggcgctttatcgccctggtgtgcggcctcgacgggatttatgcgctggacgcgcaggccctggatgaggcggcgtttagccgctatgtaaataagatgattacgctggagttgttttaggcatatttacatttagtaacaattaattccgctacgcttaccacgtgctctctgtcagcacgttttttttatctacgcttcatagataacgcaaattaagcgttattcactatccccttgtattcagctgttgaccttatttatttactcctttccgggcaagtagagggcaatatgtcggtgcagaatgataaagataatcattaccttttgaacaactggcggcctgaaaacaaggcgttctgggaaaataaaggccaagccattgcgcgaagaaatctatggatatcagtggcctgcctgctgcttgctttctgcgtatggatgttattcagcgccgtagcggtgaatctcaataaggtcggttttcatttcaccaccgaccagctttttttattaaccgccctgccttcactttccggcgcgatattacgggtcccctactcctttatggtacccctttttggcgggcgctactggaccgtattaagtaccgttatcctgatcgtgccttgtatttggttaggggtggcaatccagaatattactactccgttctgggtatttattattattgcgctgctgtgcggttttgccggagcgaattttgcttccagcatgggaaatatcagtttctttttccccaaagcgaaacagggcagcgcgctgggagtcaacggcggccttggcaatctgggcgtaagcgtgatgcagatggtcgccccggcggtcatcttcctgccgctcttcacctttctcggcgtccatggcgtcacccagcccgatggttcgacaatcaccctgagtaatgcggcgctcgtctgggtaccgctgctgctgctcgccaccgtcgcggcatggttcggcatgaacgatatcgccggttcaaaggcctcgattcgcgatcagcttcccgtgctcaagcgaccgcatatgtggctgttaagcctgctctatctggcgacgtttggctcgttcatcggcttttccgccggctttgccatgctggcgaaaaccccgtttcccgcggtcgatatcctcaagctcggcttctttggaccgttcatcggcgcgctggcgcgctcgttcggcgggatcatctccgaccgtctcggcggcgtgcgggtgacgctggttaacttcgtcctgatggcgctgtttaccggcctgctgtttctgaccctgccaggcagcggctccggcagctttctcgctttctacgtggtgtttatggggctctttttaaccgccggtctgggaagcggctccaccttccagatgatcgccgtcatcttccgccagctcaccatcgacagcgtaaaacagcgcggcggcagcgatgaagaagcgcagcacgaggcggtcaccgataccgctgccgcgctgggctttatctcggcgatcggcgccatcggcggcttctttattccgaaagccttcggcacctcgctggcgatgaccggctcaccggttggcgcgatgaaagtcttttttgtcttctatgtggtttgcgtgctggtgacctggctggtctacggccgccgtaaacccgcttaaccataacgatttatctgccggatagcggcttacgccttatccggccttacgagttcgttcgctcatccggccgggtggcacgatgccggacatcatcggagcaggagaaatgtcatgagtaaacttctggatcgctttcgctactttaagcagaagggcgagacctttgccaacggccacggccaggtctacaacaacaaccgtgactgggaagatagctaccgtcaacgctggcagttcgacaaaattgtccgctccacgcacggtgtgaactgcaccggctcctgcagctggaaaatttacgtcaaaaacggtctcgttacctgggaaacccagcagaccgattatccgcgcacccggccggatctgccaaatcacgaaccgcgcggctgcccgcgcggcgccagctactcctggtatctctacagcgccaaccgcctgaagtacccgctggcgcgtaaacgactgattgagctgtggcgcgaagccctggcgaagcatcccgacccggtgctggcatgggatagcatcatgcaggatccggcaaaaacccgcagctataaagcggcgcgcggcaaaggcggttttgtccgctccagctggaaagagctgaaccagctcatcgccgccgccaacgtctggaccatcaaacactatggcccggaccgcgtcgccggcttctcgccgatcccggcgatgtcgatggtctcctacgccgcgggcactcgctatttatcgttgattggcggcacctgcctgagcttttatgactggtactgcgatctgccccccgcctcgccgatgacctggggcgaacagaccgacgtgccggaatccgccgactggtacaactccagctacattattgcctggggctccaacgtgccgcagacccgaaccccggacgcccacttctttaccgaagtgcgctacaagggcaccaaaactatcgccatcacgccggactattcggaagtcgctaagctctgcgaccagtggctggcgccgaagcaaggcaccgacagcgcgctggcgatggccatgggccatgtgatcctcaaagccttccacctcgataacccgagcgattactttctcaactactgccggacctacaccgacatgccgatgctggtgatactcgagccgcgcgacgacggcagctatacgccgggccgtatgctgcgtgcttccgacctgcttgacggtctcggggaaaggaataacccggaatggaaaaccgtggcctataacagcgacggcgaactggtggcgccgaacggctccatcggctttcgctggggcgaaaaaggcaaatggaatctcgaacaacgggcagacggcaaagatgtcgagcttaagctgtcgctgctggatattcgcgacagcgtggtgtcggtgggcttcccctactttggcggcaacgaaaacccgcattttcgcagcgtagcgcagtcaccggtgacccttcacccgctaccggctaaacagctgacgctggccagtggcgaaagcggcctggtggtcagcgtctatgacctgattctggccaactacggtctggatcgcgggcttgacgatgtcaatgcggcgaaggatttcgccgaggtcaaagcctataccccggcatgggcggagcagatcaccggcgtaccgcgtcaacatatcgaacaaatcgcccgcgagtttgccgatacggcgcataagacccacggccgctcaatgattatcctcggcgccggggtgaaccactggtaccacatggatatgaactaccgcgggatgattaatctgctggtattctgcggctgcgtcggccagagcggcggcggctggtcgcactatgtcggtcaggagaaactgcgcccgcagaccggctggctgccgctggcgttcgccctggactggagtcgtccgccgcggcagatgaacagtacctcttatttctacaaccacgccagccagtggcgctacgaaaaactgaccgcgcaggagctgctgtcgccgctggccgacgccagcaaatttagcggcagccttatcgacttcaacgtccgtgcggaacggatgggctggttaccttctgcgccccagctcaacgtcaacccgctgaccattaagcagcaggccgaggccgccgggctctcccccgcggagttcaccgtccagtcgttaaaatcaggcgatattcgctttgccgccgagcagccggatagcggcaaaaaccatccgcgcaacctgtttatctggcgctcaaacctgctgggatcgtccggtaaggggcatgagtacatgttgaaatacctgctcgggaccgacagcggtattcagggtgatgaactgggcgccagcgatgaggtaaaacctgaggaagtcgagtggcagaccgcggcgattgagggcaaactcgacctgctggtgacgctggatttccgcatgtccagtacctgtctcttctccgatattgtcctgccgaccgccacctggtatgaaaaagacgatatgaacacctcggacatgcacccgtttatccacccgctctccgccgccgtcgacccggcctgggaggcgaaaagcgactgggagatctacaaggatatcgctaaatccttctcgcaggtctgcgtcggccatcttggcaaagagaccgatgtggtgctggtcccgctgcagcatgattcccccggcgaactgtcgcagccgttcgaggtgcttgactggcgcaagggcgaatgcgatctgatccccgggaaaaccgcaccgtcgattgccctggtggaacgcgactatcctgccacctgggaacgcttcacctctctcggcccgctgctcgataagcttggcaacggcggaaaaggcatttcgtggaatacgcaaagcgaagtcgatttcctcggcaagcttaactacgtcaagcccgatggtccggccaaaggccggccgcggatcgacagcgccattgacgcctccgaagttattcttagcctcgccccggaaaccaacggccaggtggcggtgaaagcctggcaggcgctgggagagtttaccggccgcgatcatacccatctggcgctcaataaagaggatgagaagatccgctttcgcgatattcaggcgcagccgcgcaaaattatctccagcccgacgtggtccggactggaaagcgagcacgtctcctacaatgccggttataccaacgtacatgagctgatcccatggcgcactctctccggccgccagcagttgtatcaggaccatccgtggatgcgcgccttcggcgaaagcctggtagcctatcgcccgtccattgatacccgcagcgtcagccagatgaaggccgtgccgccaaacggctttccggaaaaagcgctgaatttcctgacgccgcaccagaagtgggggatccactccacctatagcgaaaacctgctgatgctgacgctgtcgcgcggcgggccgatcgtctggcttagcgaaaccgacgcgaaagagctgggcattgaagataacgactggattgaagcgttcaacgccaacggggctctcaccgcgcgggcggtggtgagccagcgggtgccgccggggatgaccatgatgtaccacgctcaggaacggattatgaatatcccgggttcggaagtgaccggtcgtcgcggcggcattcataactcggtaacccgcgtctgtccgaagccaacgcacatgattggcggctacgcccagctggcctatggctttaactattacggcaccgtcggatcgaaccgcgacgagttcatcatgatccgcaaaatgaagaatattgcctggctggatgacgaaggtcgcgatcaggtacaggaggcgaaaaaatgaaaatccgttctcaggttggaatggtgctgaatctggacaaatgcatcggctgtcacacctgctcggtcacctgtaaaaacgtctggagcagccgcgaaggcatggagtacgcgtggttcaataacgtggagaccaaaccgggcattggctaccccaaaaactgggaggaccaggatcagtggcaaggcggctggatccgcggcattagcggtaagctgacgccccgcctcggcaatcgggtcagcgtattatcgaagattttcgccaacccggtgctgccggcgatcgacgattactacgaaccctttacctatgactaccagcacctgcacaacgcgccggagggcaaatatctgccgaccgcccgcccgcgctcgctgatcagcggcgagcgtatggataagattaactggggcccgaactgggaggagctgctcggcggcgaattcgagaaacgcgcccgcgaccgtaacttcgaagccatgcaaaaagagatgtacggccagttcgaaaataccttcatgatgtatctcccgcgcctgtgcgagcactgcctcaacccgagctgcgtggccacctgcccgagcggcgccatctacaagcgtgaggaagatggcatcgtactgatcgatcaggataaatgccgcggctggcggatgtgcatcagcggctgcccgtacaaaaaaatctactttaactggaagagcggtaagtcggaaaaatgtatcttctgctatccgcgcattgagtccgggcagccaacggtctgctcagaaacctgcgtcgggcgcatccgctatcttggcgtactgctgtatgacgccaaccgtattgaagaggcggccagtaccgaacatgaaaccgacctctatgagcgccagtgcgaggtgttccttaatccaaacgatccggcggtcatcgaggaagcgctaaagcaagggatcccgcacaacgtcattgaggcggcgcagaagtcgccggtctataagctggcgatggactggaagctggccctgccgctgcatccggagtatcgcaccctgccgatggtctggtacgtgccgcccctgtcgccgatccagtcggttgccgacgccggcggcttaccgagcaacggcaacatcctgccggcggttgagagtctgcgcatcccggtgcaatacctggcaaatctgctgagcgccggcgataccggaccggtcttgcgcgcgctgaaacggatgatggcgatgcgccactacaagcgctcgcaaaccgtcgagggcgtcaccgatacccgcgccattgaagaggtgggcctcagcgttgagcaggtcgaagagatgtatcgctatctggcgatcgccaactacgaagaccgcttcgtgatccccaccagccatcgcgaactggcggaggatgcctttccggaacgtaacggctgcggctttaccttcggcgatggctgccacgggtcagatacgaaattcaacctgtttaacagccggcggatcgacgccatcgacgtcagcggcgtgcgtaagcatggggagggcgagtgatgcggatcctgaaagtgatcggtctgctgctggagtaccccgacgagttactgtgggagaaccgcgacgacgccctggcgctgatcagggccgatgtcccttccctgacgccgtttgtcggtgagctgttgacggctccgctgttggatcgccaggccgaatggtgcgaggtgttcgagcgcgggcgcgccacctcgctgctgctgtttgaacatgtgcatgccgaatcccgcgaccgcggccaggcgatggtcgacctgatgaatcagtatcagcaggcgggtctgcagatcgattgtcgcgagctgcccgaccatctgccgctgtacctggagtatctcagtattctacctcccgcggaggctcgggaggggctgcagaatatcgcgccgattctggcgctgatcggcggccgtcttaagcagcgagcctgcccgtactaccagctgtttgacgccctgctggcgctggctaaaagcccgctcaccagtgacagtgtcacaaaacaggtggcgggagaaaagcgcgacgatacccgtcaggcgctggacgccgtgtgggaagaagagcaggtgaagtttatcgaagataatgcgaccgcttgcgatagctcgtcgatgcaagcttatcaacgacgctttagtcaggatgtggcgccgcagtacgttgacatccgcgccggaggcccgaaatgatccagtatctgaacgtcttcttttacgatatctacccttacctgtgcggcaccgtctttctggtgggcagctggctgcgctacgattacgggcagtatacctggcgcgcctcatccagccagatgctggataagcgcgggatggtgctatggtcgaacttatttcatatcggcattctcggcatcttctttggccatctctttggcatgctgaccccacactgggtctactcgtggttcctgccgatgtcccagaagcagctgatggccatgatccttggcggcatctgcggcgtgctgaccctggtaggcggtatcggcctgctgatgcgccgcctgaccaacccgcgaattcgcgccacctccacgaccgcggatattttgatcctgtgcattctgctgattcagtgcgcgctggggctgacaaccatccccttctccgcccagcatccggacggcagcgaaatgctcaagctggtggactgggcgcaggcggtggtcaccttccacggcggcgcctcggcgcatctggacggtgtcgcatggatttaccgcgtccacctggtgctcggaatgaccatctttctgatcttccccttcacccgcctggttcacgtctggagcgcgccggtggagtatttcacccggcgttaccaggtggtacgctcccggcgctgagcgctggcggtgtttaccattcatccttaccggtagcccggacgaggccttcgcgccaagtccgggtatttatcgtacctggctccaggctttatgccggatggcggctgtcgccttacccggcctacagggtcctctcacaggctcataccccgtaggcccgcgcaagcgcaacgccgccgggcaagatatcaggcacggtacctgtaatttcgccgggtggcggctacgccttgcccagcctacagggacctctcacaggctcatacctcgcaggcccgcgcaagcgcagcgccgccgggcataaggagatttacttcccggcttccggatgggtatcgaacgccgccatcaccgccgccagcgccgcttcgctgaagccatgtttaggatcgtccacccccaggccgaagcgggtctgcagcccttcatacagcgcggagacatcggcaaaatcgatcttctccaccacatggttattctcccagtgggtaaagtggaagttggtgagggtcattttgccgccgtccggcagatgacgacacatcagcagatggtgacggaagtgggactgcggccagtgcgccgaccagaagttgcccatcacataatcagatgcatactggcggcctaaatcgaaatggtacatcgactgccagtgttcgtgatggttgaactgcagcgtccactcatccccttcatgcaccagacgatagctgccgtgcggcgtttgctgtaggatatcggccagcagtttgatcggcgcggtcagcgtctggccgccgaagccgacgtcggcgatccagcgctcccccgccacctccaccagcaacagacggtgagtacgcggcggcatctgcggcgggttggccagcaccacgcggcccagcaggctgcggacgttaaagcctatctcgcgcagcgcgcgctccagcaggccattctgttcaaaacaataccccccgcggcgggcggcgatcagcttctcttccagcgccccatcgtcaaggtggatttcacgcggcagcaggacgtcgaggttttcaaaggggatggcgctgttatgctgcagatgcagttcccgcagggtatcaatggaaacatcaggctcacccgtccagctcagacgggaaaaataggcgcgtaaaaagggactcatcagggcctccagctgtaggtgtccgacatttatagcctatttttccgcgccgaccgtcttttttgtgcgcttagcgttaaccgcacgtgcggcgctgcatcagcgccagcgacgtcagcatcaggaccagaccggtcaacaacgtcaggctggccatcgccatgccctgaccgacggaaccctgttcgaactggcgccagataaacaccgccacggtttgcgtaccggccggagagagcagcagcgaggtcaccagctcccgggaggccaccgcgaacaccatcagcatcgccgccagcagcgccggaaagaccagcggcaggacaatcaaccgcagcgcctgcagtggcgacgccccgtgcaccctggcggcgggctcaaggttcgggcccagctggcgcagcgcgctgccgacatagcgcaccggccagggcaacagcaggcagcaataggagagcagcagcatccacagcgtgttatagggcgagcgcggccagaagggctgattccacagcaggatcaaaccgacccccaccaccacgcccggcagcgccgccggcatcagcgacagcgcatccaccatcccgcgccctttaatcttctgcaccatcaccagccaggcggccagcaggcccagcgcgccgacgattagcgccgaacccagggccagcgacaggctggtgccgagggccgacagggcatctccctgctggtcaaacagcgccgcgaaatgacgcagcgtgacattctcaacactcacgccaccggagagcgtgcccatcacgctggtgagcatcatcgagacggcggggacgccgaccgccaggccgccgacggccgccatcgccagcacggcgggcagcatcatccagcccagcgatgccccgtggttctcccccggcttaccggtgacgctggtgacctctttctcccccaccagccgcctttgcagccaccaggcgaataacgccaccgccatcagcagcagcgacaatagcgcggcgccagggagatccaccggccagtcggccagctttttctcaataccgaccgtcagcatcaccactcccgcccggctgcccagcgccgccggtacgccaaactcctcgatagcgagggtaaacgccagcagcgtgcccgccgccagcgccggggagagcatcggtagcgtcacgtgccagaaggcgcgccaggcgctggcgccatggacgcgggcgaccaccgccagccgggtcccgctcgccagcaggctgcgggagacggcaaagtagaccaccggaaatatgttaaaggtcatcaccagcacgatcccgctgcggctgaacagcagatcgttcagctgccagccggtcagctgctgcagatagccctggctttgcagggccagcatccaggagagcgccgagatatagggcggcgtaagaaaggggatcaaaaacaggagatcccacagccggggcagcggcagcgaaaacataccgcgcaggatgccgagcggcaggccaatcattacgctgaccagcgccacgccggcggcgatccatagcgtaccgccgagcatcgccggcagctgaggatcggccagcagcgccgggatgccgccaaaggcgtccccgagcgaaccggcgctaaaatggggaaaaatcgcctgcagcacaataaacactaacggtaacgcgaccagcatcaccagggcggcaagggtcgcgccggaaaggaatgtttgtttcacaaccggttcctgaagctgagggtcctccggcggccagcgccggagaaacgggatcaattactgcgcgtacagctgactgaagcgggcgagcacggcgccccgctcgctgctgccctcgctggtggtgggcagcaccttcagcgcgtccagtaacggacgtttagccgccacgtcgcggcgggcgggcatcagccaggcgtcggcgaccttcgcctgaccttccggcgacagcacgtaatcgataaaggctttggcctcgccgggatgctggctggttttgaggatcatcatcgggcgcggggcaatcaccgttccgctggccgggaagatcaccttcagcgactcgccctgctgaatgttgccgtaggagacataatccaccgcgccaaacaccgccgctttcgctccctgcatcaccggcgtcaccgcctgggcgttgggtccgctgactaccatgccgttctttttcagatcgtcaaacagttgccaggcctggtcgcccatgctgttttgcagcccgatcagcaaatccagcgacgcgccggagagcgccgggtcgggggttgtcaccttgtctttaaacgccggctgggtgagatcccgccactctttcggttccggggtgccgcttttactgttccagacaatacccagggcggagacgccctgggcgatatagtccgccgatttcaggttcgccggtacctggtcggcgttggcgctcgcaaaaggcagcaaccagccccgctggtgcagatcttcggcggtatcccacgaggcggagatcagcacatccgcctgcgggttggcctgctcggcctccagtcgggccatcactttgccggtggtggcctgaaaaacggtcaccttcaccccggtctgttgttcaaaaccgctggccaggcttttcgccagcgagccgggtccggcggtgtaaacggtcagcgcatgggcgctggagagcatcatggcggaaagagccatcgcgagtaccactcctttcttaacggtcataacggtgttcatgcaacttcccctgaggttggcgtaacggcgcggacagcggccacgcggcccgcggataaatagacaatctggtcggctaacagctcggcttcacgtcggtcatgggtgacatacagggcggtgatgccgagctgtcgcagcaggcggctcatttcgccacacagcgattcgcgtagttcgctgtccaggttggagagcggttcatcaaacagcagcacccgcggcgcggcgacgatcgcccgcgccagcgccacccgctgctgctgaccgccggagaggcctgaaggcttacgttcggcaaagccgttgaggcctacccgcgccagcgcctcgctgacccggcgctcgcgttcgctgcgggagacgccgcgcatgcgcagcggaaaggcgacgttctgcgccacgctcatatgcggccagagggcgtaatcctgaaaaaccatgccgatatcgcgctgctccgggggcaatccccatcctgcgcgggcgaccagcctgtcgccaaagcggatttcgccgctggccggcacgctcagcccggccagcagacgcagcagtgtgcttttgccgcagccggaagggcccagtagcgccacgatgcggccgggttcgatatgcaacgtgaagcggtcaagaataggggtctctgcgaaggcgaaagagacctcctgcagggtgataggggtcagcgtgcgcatcatcgccctccctttcgggacagcgagaccagcccggcggtcgacatccgacggggcacgctcacctgggatagcatcaggggagccaacatattgtgatcctctttgggacttagtgctggcgactatagtcagacgagatgacgtattgattacattttcattgcggcttaacgtgttacctgccaaccgacccattattcaaggaacgcctatgagccgctttcgccacgttgaactgcagtacgccagccgcctgctcaaccacggcccaaccattttgatcaccagctacgatgccccgtccgaccggcgcaacgttatggccgccgcctggtcaatgccggtggaattcgccccgccgcgggtggctatcgtggtggataaaagcacctggacgcgggagatcatcgagcgcaatggcaccttcggcattgtggttcccggcgtcgcagccgccagctggacctacgccgtcggcagcgtcagcggccgcgatgaggacaaattcaatgcctgggggatcccggtagtgaccggcccggagctggggctgccgctgatcgaggagaaatgtctggcatggatggagtgccggttgctgccggcgacggcggcccagacccagtacgataccctgttcggggaggtggtctctgccgccgccgatgagcgcgcgttcgtcaccggacgctggcaattcgacgacgataagcttaataccctgcatcatcttggcaccggcaattttgtcgccagcggccgtcatgtgcgggcaaactccctcgacgaataagcgtgacttgccgcgggcggccggtttttcccctgcccggcctgcggcccccttttaacccggtgggcggcggcgatcggcgctgggggtcaggccaaacacttttttatacagggtggtaaagtggttgctgttggcgaagccgcacagataagccacttcggtaatggtcatctccgtttcgcgtaatttgacccgcgcggagaccagccgcagacgtttcagataattatccggggttaatccggtggcctctttaatatggcgaaacgcggtgcgggtggtgagatgaaattgctccgccagctgctgccagttatgttcttcgaaacagtgctcctgaagccaggtgagtaatttatgcagtttatagcgagtgctgctatattcggcttccgactcggctgtgagaatggtggtcaccagctggaaaaagagagactcccgtagcggggtattatccgccgccctcagcgccggggaaaatatcttttccactagttcccggcaatagctgcgagtctccggcgccagccagccatagcaggcggcgcgctgcgcggataattgctgcagcaatccctccatctgctgtaaatagccaaaggccaccgccggattaattaagacattaatcagcttcagcgtccccagctcatcataataatgcacatcgccaggctggacgtaaaatacgtctccctgttggatatacagcgggcgaccattaataacgtgtaacccatgcccctcctcgacgatcaccagttcggcaaattcatggccatgctcctggctattatcctccgggtcactggcgtatatgccgagcttatcctggggatgggtgaaataatactcaacggtcagtgtcatcattacagcaaatcctgaacaacctatggcgcaggggcacgataatctattccagccctcggcacgcgcccgatgtgcggatttgtgatcgccagcgcccccacctcattattcctgccattttcactgacggtttggcattgccagagtggtagccgcgccggacgacggcctatgctgcgcctaacctaacggagaggacgcagtatgtcacaagcaattcaatacaattccagcgtggcgatgatccgtcacccgcgctttttacagcgtgcggccgacctgacgcccgcgctgcaacgcctgcgccagacgccgcaggccatcgtcgaggccgtcgctgaaccaggagcgctgaacggctggcgggggaataccgtctgcacgccggagcagttttatcagcaaccgctcaacgtcggcgacagcatcattattgattttggcagccattttgttggctacctgcagttcagctgccgcagcgtcggcagcccgcccgatgccccggcccatctgcacttcaccttcggcgagacgctgagcgaagtctgtgagccgttcagcgaataccagggatggctgagcagcagctggttgcagcagcaggatctgtggcttgacgtcctgcccgcccgggtcgctctgccacgtcgctattgcctgcgctacctgaaggtggaggtcaaagcgctgtcgcgcaagtttcgtctgcagttcgatgagatcgctctggaaaccgtcacctctgccggcagcccgcacccggcggtcatcgccgatccgcagttgaaagccattgatgacgttgccgttcgtaccctgaaaaactgcatgcaggaggtgtttgaagatgggccgaaacgcgaccgtcggctgtggctgggcgacctgcgcctgcaggcgcaggtgaatgacgtgaccttcggccaccacgatctggtccgccgctgcctgtatctctttgccgcccatacccgggaagatggcatggtttccgccaatgtctttgttcagccagaggtacgcgccgatgacacctttctgtttgattactcattgttttttgtcgacgtgctttataactacctgcaaagcaccggcgacacggaaaccgtcggtgagctgtggcccacggcgcggcggcaaatcgagctggcgctgacccgctgcgattcgcaggggctggtgcgcgacagcgatgactggtgggtatttatcgactggcaggcggagctgaataaacaggcctcggcgcagggggtgctcatctactgtctgcagcgcgccctctggctggcgcagcgttttgaaccgcagcgggtacccgactacactgccacgctctggcagctgaaggaggccgccctccaccatctgtgggacaacgagcggcaggtgtttatcagcggcgccgtgcgtcaggtctcatgggcgtcgcagatctggctggtgctggcggaagttggcaccgccgggcagcgtcaggcgctgatgcgccgcctgcagcagcagccgcccgccattgccatgaacaccccgtacctgcgtcatcatcacattgttgccctgctacagtccggcctgcgcgaggaggcggtggcggagatcaaagcctactggggggcgatggtcacctacggcgccgacaccttctgggaaattttcgacccccaacatcctgacttttccccgtatggcagtaagcttatcaacagttactgccatgcgtggagctgtaccccggcctggtttattcgccagtacggactttaacaacaacgataagcgagtgatttatggcagaaacaacgtttaccctgtggcggcagcgccttggctatggcattgccgatctctcctgcaaccttgtgtggcagatgatctctctgtatctgatgttcttttacaccgacgtcatgggtctcccggcctattatgtcggcctgatgttcctggtcacccggctggtagacggcgtggccgacgtgctgatggggctggtgatcgacaataccaccacccgctgggggcgctgccgcccctggctgctgatcggcgccctgccttttggcctgctgtgtattctggccttttatgtgccggatttcggcaccaccggcaaactgctgtacgcctttgtcacctatctgtgtctgtcgttcctctacaccctggtgaatattccgttctgcgccatgctgccgtttttaaccagtgattccgcagaacgcaccacgctgtcggcggtgcgcattttgctgggctcccttggcgccaccatcgtcgccgtggctacgctgccgctggtcggcatgctaggcaaaggcaaccagcagcagggattcctctataccgcggtgatttttggcgtactggcggcctttttcctgctggtgagctttcgcaacgtcgaagaaaagatcacccttaccggggagcgcatgaccctgaaacgcgcctggattagtctgcgcgccaatcgtccgtggtgggtcttcgccagcaatatctttctgatgtggggtgcctttttctttcagaccggggccctggtgtacttcttccattattacgtcgggaataccgagctgacggcggttatcgccgggatctccaccttcgttcccctgctcggcaccctcaccgtcccgctgctggcccgacgcatgaaaaaacgtcatgtctatctggtggccagcgcggtcaatctgctcgggatggggattatgatggtgtctggcgcccacgttctgggactgatcgtcggggccgtgatcctctccctcggcgccggccaacgcacggctatctatttctcgatgcaggccgacccggtggattacggcgtgtggaaaaccgggattaataccgcagggatcctgacctcgataaacggttttctcggcaaggtggcgatggctggtgccggggctatcaccggcgtgctgctctcctccagcggctatatcgccaaccacacgcagagcgacagcgccctgttggccatcaaggcctgctatctatacattccggcgctattgatcctcgcctcgatgctgtggatgggccgcttctaccgcctcgacgatcagtatgagcagattcgtgccgaccttgatgccggacgcggcgcctcgccagccccggccccgaccgccggagaatcccccgccatgtaaggcgcccccgctgatttaacctctggataaattaaggatttttatgcgtatctctgtgattagcgcagcggtttgctgcgccctttttccgctcatcagcgtcagcgccgccggcttgagcgtggagcaacggctggcgcagctggaagcgcgcctcaatctcgctgaacagcaggccagcgaggccagccgccgcgcgcagcgggcagaacagcaaactgccgccgccgagcagcgcgccgcggcggcggagcagcaggtgcaggcgctcagccagcagaccacggctcgcgaacaaaaacagcaggccactaatcagcaactgagcgagcagctggcgaagcgcgccccggacgatgggtttacctttaacgcctacgcccgttccgggatgttagtcaacagccatggtaaaggcgcccgcggcgggccgggcgtctccccggccagttcgctcaacggcgatgcccatgtcggtcgtctcggtaacgaaaaagataattacgctgagctgagctttggcaaaaagctcaccttcaacgatggttcatgggcgcgctttaagaccatgctcgccgacggggccaccaacccggatccgtgggttcaggataacgacagccaccatctgaacattcgtcagctgtacgtcgagatgggtaactttgccgaattcaccggtccgttaaaacgcgcctcaatttgggccggcaagcgctttgatcgggataacttcgatatccactttaccgatagcgacatcatgttcctcggcggtaccggcggcgggatcaatgatgtcgactggggaagcggcctgcgcggcgactattcggtgtatgcacgtaacttcggcgaccttggcagcgataattacgcggataatgacatccagaatctgctgttcaccgccaaccatttttacggcaactggcaactgatgaccacggtgatgaccgcccagggcaacgatgatctgaaagataatacctcgaccaccgggagctatgccctgcgcagcgataacaccgccataaacggctactacgcgatgctggccctgcacgacaaacagcagttctacggcctggcgccgggggtgtctgaaagcgccctgcaatacggcgtcgggctgggcgccgaagcgcgtcagccggggagcgatggcgatctgaccgagaacgcggcctccctgcgctttgcgtcgtatggcatcctgccgttggggaaaaactggcagctggcgccgtcggtgatagcccagcatagcgaagaccgctatcgcgacggcgaccgctacgactgggcgacgtttaacctgcgggtatcacaggggatctccgctcacttcgccctgctgtatgaggcctcgtggcagtatatggatctcaatccgaacgggcgcagctatcgctataatgacaacgtttatcagtatcaggcggtgcgcggtgatttctacaagctgaccttcgcccccacctttaaagtgggtgatgtgctggatatcaaggcgcggccggaaatccgcttctttgccacctggatgaactgggataaagcgctggatcgctacgcgataaatgacgatttcggcagcaaaggctttaccgccggtgggacatggaacttcggcgtgcagacggagatttggttttaatcaaacggcccgtccggctcaaatgccaggacgggttgatttaaatacacgctgttactttgtcactatgccagtgctgtatgaagtaatataaactcataaaataaaaaccataacaggctaaaaagataaaggttgtttttataattccaacaagtgactttcgttttttctcaacgatgagaagatcatggaacctttcttgctgttgttctggtgttaaattatcaactattttattttttatatcatcgtgaatctttttaaacgttcgcttttcacctggaaagctaccgtgtagaagaaacaaaaaaataaagaaaagcataacgaatgctaatatccgaatactgggctcagttaccccccagcatccaagggtagcaataaacaaccagataccatgagtgtttgctcgcgctctaaacctatcaatatgagcgctgtatttcttgatttctttcaaaatagaatcgttggtttccatacgtaatgcactcctttttaaagaccccggttacgaaagggggcaaactctgccattttccttgcgaagaataacctttcaaacaaccttcaacaagttgataatcaatggattaccctgaagcaataaaagcagttttctggctgcaccggttggctgacgtcgtttcgtttcccagcttttaaccaactcgtagctaacgccaacggccgctgcaaagtcctgctgttttaaacctgtggcttcacgtatcgctttcacgtcaatttcgctgaaggtatgaacgtgctgctccatcggcatttgttcacctttctcgatcctgaccatttcttctgcactcgccagcagatcggcaaacaattcgtctttcatatacacctcagttggctctctggcgctatcgacttttccatcattaatagctcagccttactttatgtttatatgctagtttattaaatcagccacttgtctcaacatctttttttgctcctgatttaactcatcctgttcatttttaggatagatgagcgccaggtaaattcttccctttttcgttacattatagtaaatcactcgtacaccgccgcgcttccccatcccgggacgactccagcgaattttacgaaaaccaccggttcccgaaattgtgtccccagcctcgggatcgtttataaggatttcctgaaaggcccgaaattcatcatcctgcaacagcacctggcgtcgcttactgaaaccttgtagttcaataaaagtcaacatctcattccctgatgtcctgacgacttaccaaataacatacatgtacagggtacactaatcaaggagtttatgtacccggtacattttaaaaaattcacccatgacaaaattcatcaatcagcacttcgccagagaaacacctgccggaggcggcgcaaagccgcttgccgttggacaaatgcgcagcatcgcctccgggtgtcgggttacatgctataacccggcttcttaatcaactgcgccatctgcggggcgatctcactgtcccacaccgcctgccacgcgtccggctcaacctgagtgagtgcgacgctgacggcgctctctttgctgttcagatggcggatcagcacctcagtgatgtcggcggccagcgcggttttttgttcatcagtcagttcacggggaaaacatttaatatcaacatgcggcatagcaaagactccttgtgatcagagccataacgctaccacagaatggccgttctggttggcatcgcgtgcgttaaatcagcttgttacggcgtagcgccgcggccagctccggtcgctgacagaccgcccgggcgatggcggcgaattttggcgcgtggtcgtcaaaccacgcctggcggggtccccagctgtacatcgccgcgatatagcaatccagcaacgttatcgacgcgcccagcgcccacggcccggcggccagctgctgttcgaaccagagatagagatttttccggtactggcgacaattctccaccagctgctccgcggcggcgggcgcccagcgttccgggtaatcggcataggtaaaggtaggatagacattggccaccagccagaccagcaggcgctgaaactgcggacgctgtggcgtccccggcgcgggggccagatcgggacgctggtcgaggatcatcagcgcgatggcggcggtttcggtcatgatgctcccgtcggccagcctcagggtgggcacctggcacagcggattaatctgccgcagacgctcgcgcgccggaccgggctgatcaaagccctccacgtcaaccacctcgtagggaatatcggccagggagagcatcagctcgctaatcgtcgagccccatcccggcacgccataaacggttatcatggtcggcctccagggtaaagcctaagtgtaggcagaaaaacgccgctcacctacccggcacaccatgccactgggggttagtaggttatccccggcgggttgaccaccgactgcgccaccgcttcgccctgctccccccaacgcgccagcacctgctgatattcaccgcgggcaatcgccccgtcgagagccgcctgcagggcatagaccagaccgttgccttttttggtggttgtcgccacccacgcttttttcggccccaggcccaccacccgggtctggccgttaagcgccgctttataggctgccaccgactgcgggccgaaaaagatatccgcccgcccggactggatatagagattgccggaggcatcatcggtcaggtagaccggctgggcctgcggccgtccggcggcgcggttgtcctcgttccagcccagcaggatccgctcctgattggtgccggacccgacgatcactttgcgccccgcgagatcggcgggtccgtttaccgcggcgatgtcgctggtggatttcaccgagaaggccagggagtccacccggtaagtcgcaaaatcgaacttctctttgcgcttctcggttaccgcgatattgatcagcgccacatcgtagcggccggaggcgatgcccagcggccagtcctcccacgcggtgggcaccagcctgagcttcaggccaaggcttccggccagcaggcgggctatatccgggtcgctaccgatccgcgtgcggttgtcgctggccagcagggccagcggcggcgaattgagcgccgagatcgccaccgttagcgtccccggctcgacgaagcgatagcccggcggaattttcgctatcgcctgcgggtcgcgggtgaccggcaatggctgctcattggcgcgcagatccagcgccgcgtaagcgctcatggcaaaagcgctgagaacaagggtcattagcgctctgttcatgacggcagcaccctggataaaaactgccgggtacgcggatgctgcggatggttgagcacctcgtcgctgctgccctgctcgacgatcctgccgtcgaccataaacaccacctggtcggccacctcgcgggcaaagccaatctcatgggtgaccaccaccaggg

SEQ ID NO: 64 - DNA, 140607 bp, Unknown
  source: /note="Description of Unknown: MKP2_coc_1 Mutant Bacteria sequence"
ggtccagtgtcggcgatcctcgtgcatggcgtggattgccgccagcagcccggcctgcgccggacggcagcgttcaatggtgaatgtcttgtccagatgggcatggggttccaccaggccggggagcgtcagggctcccgccaggtcccacaggccgggagtcggctggtcggttggggtcaatgcggcaatccggccgtcgcgaaaggccaggtccgccagcagcggctcaccgttggcccgcgtcggccagccgtcgggcagcgcccaggccgggagtcgggcgcggctgatcccgacgagcggcgcggaagaggaggggaacgtcatcgtcagtctcctcacagatccaaaaccagaagcggggatttcgcccgcgaacagcagagcgtgatctggtcgttgccggctttctcttccgccgtcagcacgctgtcccggtgctcggggatcccgtcgaggaccccggtaatacaggagccgcacattccctgttcgcaggagagcattacctccaccccggcgtgctgtaatacctgagcaatggtttgatccgcggccacctgcaggcgctgcccgctggaggccagctcaatataaaacgcatttttcgccgcagtattattttccgccgcgggagtaaaacgctcgaagacgaattgcgacggcgaccagcgatattcctccatgaccgaccgcagtcgctgaataaaaccctccgggccgcaggctattactgcggtatcagggtggggcacggttaagcattcggggacccgctggcgaaacgacgcgccttcctcgctgcagtgaatggccaccgtgccgttcgcagtcagctggttcaggcgcggggagaaggcggtctggcgcgaactggcgacataataatgcagctccagcgccccctttctggcggcaatcgcttcagccatcgccagcaaaggcgtgatgccgataccgccggcaaacagcaggtagcgcccggcctgcggcaggggaaaatggttgcgcggcggcgaaatggcgagccgatcgccggctttgagctgctggtgcaaatagcgtgagccgccggtggaggtgtcagtcagcctgacgcaaatttcataagtattactgcggtcaggcgtgccgcacagggaatactgccgcggaccgacgccgggaataataatatcgatatgcgccccggcggagtaggccggtaatatttccccggccgccgtctgcaaaattatggatagatttccctgtccgttggggcgtatttccccgaccgagaccgaaataagatcgtggctgtgcattaccgtttactctccctcattccgctgtctgcagggcggccaggggcggcgaagagataactccccttcgcggtgaactgtccggcatgcaagaaaatgggtgaaacgatcgtttctccgctatgaatgctacggtattgtgataaaactgttgcgtccagagctttgattcgcacaacccgttgcaaaaaagagagcacccaaaccatgtttgccttctcccgatttctgctctatttcactgaagtggcccgtcagggatcgtttcgtaaagcgtcagaggcgctgcatgtgtcggcgtcttccatcgatcgtcagattttgcgcgtggaacaggaactggcgatgccgctcttcgagcgccatcccaccgggctgaggctgaccgccgccggggagctgctcctgcacgcggccaataactggaaaaaggactttacccgggtctgcgagcagctggacgatctgcgcgggttgcggcgggggcatgtgcgcatcgccaccatcgatgccattaaccggcatttcttttcgacgatgctcaaagaggtgcataaacattatcccaacatctcttttacattgaccaccatcaacaatatccacatccagcaggcgctgatctccggcgaggcggatttcggcatcatgctcaatccccagacctctcgtgaactgcaggtccgggcgtttgccgagatgaatatggggattgtggtgcccaccggccatccgctggccagccgcagcgcggtgcgctttagtcagtgcctcgactacccctttatcctgccgtccgccccattgatgatcagcgagccggtggaggcgctggtgaacatcagcggcaacgaggtaaaggaggtggcggtatcgaataacattcacatgatccgcaccctgatcaaagagcagatgggcatcggcatcctgtgtcggctggatattctcgatgagatcgagtccggccagctggcgtttgtgccgctaaccgatccgcagcttaagcctttcaccctggcgctgtgcgtctcgcccgcccgccagctttcccttgccgcctcgatgatgctgaaccagctggagatgctcttcagccagctgtgaaatgtcgggcaggcactaaaatcattcattagcgcaccattatggtgcgtttcttgtgggcatgaatcaaaggttgcatgcccaaggggggcggcgcaggcgatttctcgcggccgctcgcaggcgtttaaatctggcattgtttttgtatagctgagtgtgagtagaagcggtcagtacgggttatccatacgggacattgctcagtcaccatgtcgcggttcaatgttgaccgggatgggaggctgagccacattcgctcgctccccctcccggcgtaaagaggagagggatatgaaaacaggcgcacgccttccccggggcatacgctggctgggcctgatggctctcggcggtgtctcgctggccgttcaggccgaggagaaaatcgttctgctgacctcctggtacgcccaggcggaacagggggggtattatcaggctcaggccaccgggctgtacaaaaaatacggtctcgacgtcgagatccgctccggcggaccgcaggtcaacggcatgcagttgctgttgtcgaagcgggccgatgtgatcatcgggtacgacctgcagctgctggaaggcattcagcgcggcttccaggcaaaggccattgccgcgccctttcagtacgatccccaggggctgctgacccatgccgatgtcacctccctgcaggggctgaaagacaaaaccctgctggtctccagctccggtcaggcgacgtggtggccgtggctgaaggcgcaataccagctgagcgacgcgcaggttcgcccctataccttcaatattcaaccctttgtcgtcgatgacgctgtcgcccagcaggcctatgtcagctccgaggtgttccaggtgcagaaggccggagtgaaggcgaacttcttcctcttttccgagcacggctatcccccctacggcggcatccttatcgcccgcccggataccatcgccgagcgtaaagcggcgatggcgaagtttgtccgcgcctcaatggagggctgggtgagctatctcaaggatccggcgccgggcaatgcgttgattaagcaggacaacccgaaaatgaccgacgatctgctcgcctggggcgtgacccagatccgtgagcatcacctgatcgacggcggggatgccgccagccagggctgggggacgatgaccgacgcgcgctggcagaagacccgcgactttatggtcagcgccggtctgctggcggcggctaccgactggaaacaggcctacaccaccgaatttgttcaggccatgcaggttaaaccctgaggagcgacgccatgtcattaatgattaaaaatgcccatgccatcctcagcggtctgcccggagaggcggcgcggctggccgggccggatattcgcatccgcgacggcaagattgccgccatcggcagcctgacgccgctgccggaagagcgacagatcgatgcccgcgactgcgtgatctatccggcgtgggtgaacacgcaccaccatctttttcagtcgctgctgaagggcgagccgcaggggctgaaccagagcctgacggcctggctgagcgccacgccgtaccgctttcgcgcggctttcgatgaacatacctttcgtctggcggtgcgcattggcctggtggagcttctgcgctcgggctgcgccagcgtggcggatcacaactacctgtactggccggatatgcctttcgatacctcggagattgtcttcagcgaaggggaagcgctggggatgcgcatcgtcctgtgccggggtggggcgacccagggccgggcggtggaacaggatctgccggtggcgctgcgtccggaaaccttcgacggctatatggcggatgtcaaacggctggtcagccgctatcacgacccccggcccgagtctctgcgccgggtggtgatggcgcccactaccgtcctgcactccgcgccgggcgcccagctgcgggagatggcgaagctggcccgccagctggggatccggttgcacagccatttatcggaaaccgtcgattatctcgacgccgcgcggcagaaattcgccatgacgccggtgcagttctgcgcggaacacgactggctgggaaatgacgtgtggtttgcccatctggtgaagctgctgccggaggagattgccctgctgggccgtaccggaaccggcatcgcccactgcccgcaaagcaacggccggctgggcagcggcatcgccgatctgctggcgttagagcaggccggggtcccggtctcgctgggggtggacggcgccgcctcgaatgaagcggcggatatgcaaagcgaagcccatgccgcatggctgctgcagcgcgcgcgcaaggggatgctggcgcagccgcgctacgccgggggcacctttgagggtggggccgatgcggccacggtggaggatgtagtgcgctggggcagcgccggaggggcgcagatcctcggcttagcgcagagcggcaccctgcaggtcggcatgcaggcggaccttgccatttaccggctggacgatccgcgctacttcggcctgcacgatatggccattgggccggtggcctgcggtgggcgcgccgcgctgaaggcgctactgctcaatggccgccccatcgtggaagacgacgccattcccggtctcgaccttgacgcgatgcgtcacgacgcgctggcggccgtccgtaccctccaacagcgcgccgctgtttaactgataacaggataatgacgatgaacgcaaccacccagaatcaacgctacgccttacaggaactggaaaaagaggcgctgatgggcgccgagggtgaagagaccttcgcccgcgaagtgcgctgtatcgacctgtcgaactttgccgcaagaaaaaatgacattgccgaacaactgtgggaggcggcggtggagattggcttcttccaggtcagccatcacggtattccgctggcggatatccgccaggcgttcagcatgaccgaggcgtttttcgaccagcccgacgaggtgaagcgccagtatccgctggccggtaacgccggctgggaaagcaaagcgcaggttcggccgtcgacccgcaccccggatcaaaaagagtcgtatcagataacccggccgttgatggctgggcgctggcccagcgatcgggagctgccaggtttccggcagacgatgctcgggtttgaatcgcagtgctggcagctggggatgaagatcctctcctgctttgctttgaagctcggttttccggaatcgtttttcaccaccgcgcacgatccgcagcgtgacacctatcagagcaccttgcgcatgctgcattactatgcaaccgagcagtcgcagcaggggatgtggcgggccggcgcgcacaccgattttgactgtctgacgctgctgttccagcgccccggccagggcggcctgcaggtttgtcccggtaaagaccgcgaaagccagcagtggaccagcattgagccgcgcgaggaggtgatcacctgtaatatcggcgatatgctgatgcgctggagcgacgaccagctgccgtctaacttccaccgggtgagaaacccgctgctccacgaatatcaggggccgcgctacagcctggcgtttttctgccaggccaataaagatgtcgagatcctcgggccgcagaggaagtacccgcccatcagcgccgaggattatctgcagcagcggatccaggccaattttgccaaagggtaagatgctgccttgagaggtatacctgccgccggctttcgctggccgggcggcaggatatccggcgctgagcttttcagctaccgtgttaagttccctggtgtcgttgaaataactgaagaatatcccctaagcgtcagcagcaagctaccttggttaaggccctgaaaatcacgtcctttacgtcgtaaacgccgtaaagccagctcaccggggttaaagggattaccttaacttctttattgctgttagtgggttaaggctaaccagggcagggggaccgaatttatagctcggtaaccggctacaccgggctttcggcgccatgtgactccacagacacatgtaacctcatctggcacctccatgccgctgacgcggcattcagaagcttcccgatgctgtaggtgttaacgtctgctctgtgccaggagcggacattccctgcgctattgatagctatgttcagtacgccattatatgattatgcaatccaaccgaggactcacaagaagagtctataaatactaagatgctgagggttgatatgggcgatgtatcaattattactaatgctcttgggcgttttgccaacaatatgcgactctatggggaagcatttttaagataccgagaattggtagcaatcgaccgtgaagaggctatccacaacctagatcgagcatttgagcaaaatcttgagggttttcatacgttatatgatgtatcacaagcgatatttgacttccatgagcatcctgagactagcctcttaatttcaattcgaaatgctcttcatcaccgcgatcatcctctattccatagccttctccagactatttggttggatgggaaacctgagcgtctacttggggctgaatatttaattgctaggcatcgaacgacaggtggcaatcctccgttgatgatgcatttgataaagttagaagatgtttatagtcgcttagatccacgcagcgaatcggactacttaaacccaatgggtaaagcaaatgctttatccagattcgtctctctggaaaatggcttggcctttgaaaaagtgtgggaaaaaacgaaagtagatcgataccccgcaaagcaagtgtatttggacttgttgccgatattcaattctgctgtttctagagtttttactgcattggataatgctggagtgttattccaagggtttgatgcaaatgcttataaatccgtatttattgaagaattaaaaaccgatcttcagcattttgatttttttggtcttagaataaatgcgctacagattgagttgggtccaaaatttacaatccaagaagcttctatccgacgaggttgtacctaacaagggatgatgttagacgaataggtataatggcacactaaatttgagtcaagagcatttattcgactattaaagttggaatggagaggtgggatggaacattgtcattgcgagacgctcgaagaactcaaaatagttattaaacaatatgggccaggagttctctacagaggacaaactaaacattacctatcttcagatggctcgccctcaatgcccacgtcatttcagcgtcaagggtgcgtaccagatttgatgattatgtggacctattatgcaaagagagccttgcaacacttagtacgcggttggaatgataccggcgataatgcaaccaaccaagcaatccttcagcattatgggtttcgttcctttttccttgatgttagtggcgatccgcgtgttgctgcttggtttgcatgtaataaatttgattctaagtatgtggtcaatttggtagaggattgctttgaagatccagtttggttgcgtactctaaatgcttgtttcgctccatccgaagatattggccacatttatttaataagccagaagttactacgacaatacaatcttcaagctgttcatctatccgaaattgcgacagatcatggcgctccaagatatgtgcgacaggatgcgtacatggtggggcctttaattcgtgaagggttagatggagactgtattatttgtcatatcagcgctccagcagaggttctgcgtaaatatgcggagggatatagtgttggctggctatttccagaaccatgtgaggatcctgtttatcgcgaacttttggcaatgccatgggtgaagatgcgacacctttcggatgaaggtcttgaggcgttcaagaggtcattggagttaccagagtattcctgtcaccttcaaaaacgcatgccttctagaagtgcaatgtatagacccttttggactagggaccttccgcctccggacggtttggccattatctcttcacaaatagttcagattctatgtggaagcgccctgtatcatggtgtaagtgacccttgttttgttcttcctgaaatcaacaagctattagaaaagtataatgagatatcaattgaacttgatggacttgtttaccatggtatggacacaagatatgggaagggcgttggaatagtaaaaatgcctgaaaatattgtatgtgtatttgaatatggtatcgatcatccagggttgcgtatcatgagtattggtcgcttctgtgggatgcactatctaatcgatagtaacggctgttgggaacgtgttattcatgaggaagactgcaagtgtggttcagaacatattgacaatatatccttacttggccgggttgatgtttccttgaggaacaagttactagaagatatcggttcagattcatatgttcagaaaggtattgacccgacatctgacaaattggctacatggggggaaccttactagcgtgattgagctggcaaggaaatgtctaaattatccgtggcggttcacttatcgttaagtattacagtattctatggctgtatgaatataacgttgagtcaactgaccaccaaacgaatcggaaaaccttcacatgaaaaaatctaacttggcgaccagttttatttgacaagtgtctacattggtgataataaagcttattcgaaagctttcgctaaaatttaatttagaagaaaaagcttttatgtattggcgttagtattagtcaactattggaaaataagaaactcatggcgaattatgataactattggaattactacagtaatgactttgattggccaaataatttttaccccccaaatttagagaagactcgacagatttattctgaccttggcatccaaactgcagaagccgaagcgctaatctcgtcagggtatgtgaatatgggtggtgacataattatagatcgttactatggcggacctctagccagttcggatcttgccacacgtattcacaaaaataattttaccgagtggtatcagatagcaaagtccggtaagaccttctgtaaagatatttttttaaacacagcaaaatcatatgacgaattaacgaggcaggttaacaaaatccaagaatctctagggcaaaaactattgttccgtgggcagattatgcattacgagattactcgcccaataagaaatccatactttcttatcgaagggcttggcgagacttcttttattccttctatttggcgaaatctcctccagaatcatccgcgatcatttcaccatttcaatggtattaacttgtatgagtggtcgaagattatctattcacaattcgacatcgaggaagtggatcgacgaataaacgaactcataaaacgaggtgagtcgatatattcagcacaagatatggaggattcagatgatcctttagtgagtctctttggccgcgttcgattggatttgagtatgggccataattacaatctggctgacctacttaatactctactgcagcactatggactgttttcgccgtatttggatttaagcagtgatttgcgagtggcaatgttttttgcgagtcatcgttttgttcccaatgctggcaatgatcattaccagttcgtcggaagtaacggttcgaagtccatcctgtacttgtttaagcataaacaaaatgaaatggcggtgtatgcacacgatcgagttcttcatggtttacagccacttagaccggagaggcaatcatgtgtaatctgccgatcaggtccgtacgcacttaatcttgcgggcttatatcttgttggagcgattcgaatcgatttcgaactgccggagtctgaacgtttatcgtcgcatgtgctctttcctgatgaacatgaggataattttctcgcggccctaatagaaaattgcaggcatccagaaagagtgaccacttttcgacatcgatagccactcttaaatagcacaataaactgtggtagctcaaactcatttgacagctactgtcaggtcaaatcacaatgagtctttaaattatccacatgcgactttgggtcgaaatcggtcataaataaccgataggtctggtcaaaagcgtaagttgttactgtggttagtcttagcggatggggagctggtccatttgacctactccccgatgattaaaattcctcaatgttagtcatgtagctgttggcgttgccaacttccgcttctcgctcatagcagaccttcaactcaggtagcttgtctgctctgtgccagaagcggacattccacacttctgctaatgtggctaaaatcggtatgccactacaatctagtaaaggatagaaaatggataaaaatgagccatcaatatggcctccgtaccatgtcttctatatccaatcgatgttgttcaatacaacatcggctctacaggccgtggatagagcatctaagtacatccaagctatcagtgaagggaagctagggccacaagatcggaaagatgagcttctagactgtctacaaaacttcatcaatcatagtgctgctatagctcggtacttctttccatcaatgattggtggaaaaggtgagaaggttttacataagaaccgtgctgagtttctgaggcaaatttttgatgtgacagaaagcagccctttgcatgataagaaacttaggaatgcaatagagcactttgatgaacgactggatatgtatcttgaaggtggaattgtaggaaatatcttcccaagtctaatcttgaacaaaccagaagaaacagatgtgccgcatcacatcttcagagcctactatctaaatgatggaatttatcaagtattgggggaaagacataatgttcaacctattcttgatgaagtcatgagagttcatgaactgttggagatatttgatgaaaatggtggaatgtttgggaaataaaaaagcatcttcgggcgtaatgccactttctctttgctcgtatgccattccaaaatcagaagtggatgacagtcaatataattttgtggcgggcatggcgggcgccattgacgtttatttaaataacgaccttatggattaccagatagctgggaccggaaaaagttttatcggaaaatacttggacgtgtggaactacgatagcgcggaatatcagcaacgttgccaacaggctgtcaaaacgtttacgaataaaccgatcacaaaaggagattgtaatcatctgagtgctgatatttacaggcagaatcaggcactggccagcgtcgaccaacagcgccagctggagcaacaggaacgccagacccagtctctcaatgatgtcttgaaagcacctgtgcagaccaactgcacccggtacgggaattccgtttactgtacgtcctattatctctttatgacgcgtattgtcaccaccatctggcgccacgctgatttatcccggtaaaggaaatgcgcgcctttacaccctgttcagagataaagtaagaacattcagttaggaattttttttagcggagtgattgcattttggaaaagatccaggcgactgctgttaaatatatcaagctgggagagggaggcgaatgggaacatgagtgcctgacatctggcattattaagtttgggtaccacaaaacgccccatcagatgtgccttgagggaaagtgggaggatgtgaataaagtctggttagaagaaaggaaaaataaccagtccactgccaccagtgatgtcagacagataaggacgttttacaccgccacccccgatatactcttcattacgttcagccagggattattgcattggtgccagccttccggagaggtcatcgaactggatgatggcagtaggacccgccccacggtgagcggatggcacagccatagtctggccgggaaccttctatcccacagcgtcctgagcggtgctttactcgctacacagaattaccgggggaccatctgcgatgtgcgtttggccgattacgccctgcgaacaatcaatgatgagcaatcgccggaaatcatcagcgctgatattgctaaagctcagtacctgaaggctattaccaggctgtgtagtttgcttacctggcaggactttgagttgctcgtagatctgattttctccgccagcggatggagaagaaccgggagccttggcaggacacagaagactgtcgatattgagcttgaactgcccaccaccggagaacgggcatttgtgcaagtgaagtctgttgctgagcagtctgtattctctgactatctgtcacggttccaaaccagtgacagctatgatcggatgttctttgtctggcatcatgggacattgagtgaggatctccgtgctgaaggcgtcactatgattgggcccacgaggcttgcagaactcatactggacaccgggctggcacgatggcttagaaataaggtttcgtaatagcccggtaccttatcggttacgggcatttatgctagaagatgccttttcttattctgtgtagtggatagctaaatttggccactttcaaaggtatgttaatttccgctgttcgctcgcagcggaccttcaactcaggtaaccgttcacccagatgaactggtgtgaaaggtaaagcgaagggccatgtgctgcaaatcaagattcagcggtgcagacttttctgaccttaggggaagggggcggcacactctgcttcagtgggggtagctaatcaccacaaattgttagacacaaggggtagggggcgccgatgcgggtgacaagggtatctctgccgcagccataaaatcgataaaacagcgtattctcggtgacaggtagcggctggcgggccacaggacggagaaatgcccatccttgacgcaacagccgggcaacacctcctgcagttgtccctcatccatggcctcgcgcacgacaaaatcaggcacataagcgatgcccatccccgccgcgcttaagcgaatggcggcctcaatgttattgaccgtcatcacggccgtggccctgaaatctcccgtcagccgcatatcgcgcagttcccagggctggatcagccccgtcgcggggaagcggaaaaaaatgcacttgtgcgccgccaattccgctggcgagtcgggggcgccgtattccgccagataggccgggctggcacagagcacaaaacgaaagcctcccagctttctggcgatcaagcgggagtccgctaattcaccgctacggatagcaacatcaaatccttcatcgatcagattgaccagccggtcactaaagtcgagatccagttcaacctgcggataaagacgggtaaaggcggtgagggcggggagcaacaggcggtagccaatgacgggcagtgaaatcctcagtttgccggtgggctgtgagagactgctggtcagctctgactcggcctcctggatctgctccaggatactctggcagcgcgtcagaaatgcggccccctccgccgtcaggctgacgtttctggtgctgcggttgaacagtcggacccccagtttatgctcaagccgggcgacattcttacccaccgccgaggcagatatgcccagcagcctggcggcctgaacaaagcttagcgtttcggcggtgcggacaaaggacgtcagcgaggtgaggctgtccattgattataaaccttatgtctcttaagaagatattttcagtctatttatcggcaataacatccgcaataggatggcgacagtttattcattccttgccgactgatgagggccgcccgatgttactcaccgccagaacaccttcccgatccgccagcgccctggccgcgctttctgtctttatggcggccttgctgctgccgttaagttttaccggcggcgtcatgaccacccccgcgatacagcagtcgctgggcggctctcccgctgcgctgtcgtggctgaccaatggctttatgttgaccttcggcagctttttgctggccgcaggggtgacggcggatgccatcgacagaaaacgtatttttatcgccggcgccgcgctgttttgcctgagcagcctgctgttttgcctgacgcacaatctcttcctgtcaggcgtgttgagggctctgcagggcctggccgcggcgatgattttagccagcggcagtgcggcgctggcccagctgtatgatggcgctcagcggacccgggcattcagtatcctgggcacggtgttcggcgccggcctggcgtttggcccgctgctgatcggcttcatgaccgacgcggtgggttggcgcggcgtatacgccctgtttgcgctgctctcggcgatagttctgcttatcggtctggcgtatctgcccgcggcagaaaaaagcgagccgcggacacccgacaacctcggcttactcctgtttacgctggccctgatgctgtttactgcatcgctcatggtcattccggcccgcggttttttatccctgaccacgctggccttgctcatcgcgtcgggggggctgttcgtggcgtttgtcgtgcgctgccggagggtgaacaacccggtgctggaactctccctgctgcgtcatccgcgttttgtcggcgtactgttgctgcctgtcgccacctgctgttgctacgttgtcctgctgattattgttcccctgcattttatgggcggagaggggatgagtgagtcgcagagcgcgctgtatctgatggcgctgaccacgccgatgctggttttcccatccgttgcagccctgctcacccgctggttttcaccggggcacgtgtccacggcgggactgatgatggcctccgtcgggttgctgttgctggggaacgcttttcacagtaaccacctcccgcagctggtgctggcgctgatcctctgtggggcgggggcggcgcttccctggggactgatggatggcctggcgatatccgctgtgccggtcgccaaagccggtatggcggcaggcctgttcaacaccgtacgcgttgctggcgaggggatcgccctggcggtcgtctccgcggtattaacggcaagcaataccctgaccctgcagagtcgcgttcacgggtatgcgcctgaggtgattgaccgcgccgcaggctggctgggggccggcaatatgccgcaggcggctgcgcttttgcctgatttttccctccgggtgctgcgcgagagctatgactctgcttatacgctactgtttagcgggctggcggtcgtcaccctgctgtgcgccctgatgatctggctgacgttatgccggaaggggggcgctatccaaacccgcgacagtggatcctgaacccccttgatagccttacatctgggcgtatctatcgccacgatcggaacccaccttagcgccctgtaccagaaaacccatactcgacatcaggcagagctcctgctgattctccgcgtaatcgacggcgaatggtttcgctcggtcaggaatgatggtcgcgcaggaaaacggtcagcacctctttcggcggcacgccgccgcattcgccaatcatccagcccaccgcgccgcggtgataggcgccgtgaaagagcatgtggttcagcatctccatcgcggtcatattgccgtcgccgccgtcgacaaatttgaaggcgatacgttcgtggaaatcggcgggggtcatggcgctgacgtactgaatgtattcgtccgtacaggcggtcatggccgtttccagctcatcaacggttggcgtctcaggggtattcagcgcggtgtagccgtgcggcctgccgcgcaggttcgcccggaaaatcatatcaacgacatggatatggttcatcagcctgatggtcaggtgacgcttttcgccatgtcccgttccgtcaatcgcgcggatcgcctgtaaggtggcaaggtcaatccagcgcttgtatttcaacagcgttactactgtgtctttgtccatagtcggtcccgggttggttgaaccgttatcatactggttatgccggtgagccgtcactcaccggcatcaggcacaaaaaagcctcgccgaggcgaggcttttcaataagcagatgatttagtcaaacacaccgttaatcacggcggtgacgatcgcggtgctcagggccaccagcaccagatcatcgccgaccgcccgccattcatagcccggataatagggcaggtcgttaatcatggaagccggcagggtctttttggcgatccccggagggagcggtttgccgcgagcgacatttttggcgatacccggcggcagcgcctgatagccgaccagaccgtagtttacggcaagggagcgcgcccgtgagaagctaatatcgctgtcgacgtggtcgggcttgccgtagtttttccgtttgccgtgatcttcagtggactggcctttattttgccctttattgccatggtcgccactgttaccgttgttaccatgattgccgctattgccatggttaccactgttcccgtgattaccaccgccgttgccattgccattacccgggttggcatacgctggcgcggccatgacggcaagagaaataaccgccgccagtgctgttttgagagtgcgacgcttaagcatgatgttgataccttaacagggagtacacgcttaaaaaataagataaagctataccccaggcaatctcatgttgtcttatttttttgcccttatttaattagcggcgggaaaagggtagcgggacgcggacgagcaattccattgctgcgttttgacagacgggcgaccgcgccccgctaaatatcttgccgggaggatcgctcccgggcgtggagaaaaaatgcccgaagccattgggcaaaagagtacaaagatgttccgcttcatttatcgcgcgtctcacaagacggggcggacagtaaatcctggcgctgccgcgcacaatcggtcggttgtttagaaataaataaccccattgaccgcgctcaggatgcgacccaatgacaggcgacccgatggcccggggccacctcgcgcagcgccggaggctctctgcggcaacgttcgctggccagcgggcagcgggatgaaaagcggcagccggcggggggattggccggatccgggatctcgccttgcaccagcgcctgcggttcgctgtgcgggtcgagggtcggcaccgcagccatcagggcgcgggtatagggatggagggggcggctgaacagcgcatcgcggctggcgctttccaccagttgcccgagatacatcaccgccacatcgtcacataaatgctccaccaccccgaggtcgtgggagataaacagaaacgtgacgccgcggttgtcgcgcaggtcggaaaacaaattgatgatctgcgcctgaatcgacacatcaagggccgagatgggttcatcggcgacgataaaatccgggttgaggatcagcgcccgggcaataccgatccgctgacgctggccgccggaaaactgatgcgggaagcgggcatagtgttccggcgccaggccgcagatcttcatcacgtcgattacccggtcatatagctcattgcgggcgcacagtttgtgctgcagcatggcttcgccaatcgcgtcgccaatacgcagccgcgggttcagcgagctataggggtcctgaaacaccagctgcatcctgggccggatagcgcgcagggcaggcgcggtcaggtcggccagctcctgaccgtgaaatttcacgctgccggcgctcttctcgtacaggccaagcagggtccggccgacggtggttttaccgctgccggactcgcccaccaggccaaaaatggtgcccggacggatattaaagctgacgccgtccaccgcgcgaagctcgccggtctgctgaccaaacaggccgtcgcgtagcggaaaatattttttcaatccatccacttcaatgacatagcgttcgctcatgctgtcacctccgcaaattcgctataaaagcaggcagcacgttggcggtcgccgagcagcggcggaatcgcctcccggcagcgcgccgtcgcccgctcgcagcgcccggcaaaggcgcagcccgccggtagggcggccagatccggcacctggccgggaattgagtacagccgccgacgccgctcaccgggcaccggtcgggaggcgatcagcccccgcgtgtagggatgctgaggatgccgtagcacttccgcggtggcgccttgttccacaattcgtccggcatacatcaccaccacctgctcggccatctgcgcgatcacccccagatcgtgggtaatcagcatcatcgccatctggctggcccgggcccgatcccgcagcaggcgtaggatctgcgcctgcacggtcacgtcgagagcggtggtgggttcgtcggcgatcagcagtttgggccgacagctcagcgccatggcgatcatcacccgctgcagcatgccgccggaaagctggtgaggatagcgggtcatcaggctgtccccgcgcgccaggccgacctcgcttaacagctggatggcctgatgccaggcggctttcggcgtggcgctgaggtggcggatcggcggttcgcacagctgctccccgatggtcaacaccgggttgagggccgacatcggttcctgaaaaatcattgccagctggtgaccgcgcagatcggccatctgtctggctttcagccgcagcagatcgcggtccgcgaagcggatctcgccgccgtcgatgcgcgccgtctgcggcggcaggaggcccatcagcgccatggcagtgacgcttttgccgcagccggattcacccaccacgccaacggtttgcccggcctgaatggtgaaagagacctcctgcaccgcgcgcacgcgagagcgttcgccggcgaaagagacggagagatgattaaaggagactaacggcgtggtcatttcagcctcggtttcatattgggatccatggcatcgcgcaggccatcgcccagcacgttgatggcgatcacggtgataaagatggcgatgcccggcggcatccacagccaggggcggcgctggaaatcgatcaggctgttagcggcatccatcatattgccccacgacggcgtcggcggcaccacgccgaggccgagatagctcagcgcggattcactgagaatggcgttggcgacggccatggtcgccatcaccaccagaatcggaatggtattcggcagcaggtggccaaacagccggcgacgcgccgacaggcccagcacctgggtggccagcataaaatcgcgttcgcgcagggagagacattgcccgcgcaccagccgcgccagtcggggccactccagcaggctgagcatcaccaccaccatataaatgcgcgagtccggcgaaaaatcgagctcagaaagcatcgccccggcgacgatcaatagcggtaacccggggatagtcatcaccaggtcggccacgcgcatgatcagtttgtcggttaacccgccgacgtaacccgagagggcgccgagcaggtagccgaggcacaccgacatcaccatggtcagcaggccgataatcagcgagatgcgcccggccagcagcaggcgggtgtagacatcgcgaccgaggaaatcggtccccagccagtgttccgccccgggcggctggttgatgctcagggcgtcggtggcatcatcactccacggcgaccagacgggccccagcacgcaccacaccgccatcaccgccagcaggagcaggcagaacatggccagccggttacggcgcagctgtcgccacccctggcgccagggagagggagtaatgtgcgccagcgccgggatagccgcctgccgctggcggcgacgggaagctaagtaagacaggatcattatgacctcacccgaatacgcggatcggcccaggcgtacagcacgtcggcgagcagattcccgacgatcgtcagcaccgccagaaacagggtaaaccccatcagtaccggatagtcgcgggcggccagcgagtcgatatgaatgtggcccgcccccggccagttgaataccttttcggtaatgatcgccccggagaacagccccggcagctcgaagcccagcagggtgataatcggcagcagggcgttgcgcagggcatgtttgaggatcaccgtgcgctcctgcaaccccttggcgcgggcggtacggataaaatccattttcaccacgtcgagcatactggcgcgcacatagcgcgtcaggctgcccgcctgcagcatcaccagcgccagcaccggcagcgccagatgggcagccacctgcagcacatactgccagccgctctcgtcgctgccggtattggtcatcccgcctaccggcagccagtggagatcgacggcgaaccatttaatcagcagcaggcagaggaaaaaggtggggaacgacatggcggcaaacaccgcgacgctcaccagatgatcaaaccaggagccagggcgcagggcagaaaccacgcccaccgccaggccgatgccccagtaaaagaccagcgcgacgctggccagcagaaaagagttccagatgtactggttgagcaactggctgaccgggatctgatactgcagcgaaaagcctaaatcaccgcgcagcaactgtcccagccagtggaggtagcgggtcaatagcggctggtcgaggccgtagatcgccttcagctccgcggcgcgggcagcggtcagggtgatattgccatcgataaagtcgccgggggttttggcaaacagcaaaaaaataatgaaggaggccagcagcagcatcggcagcgtttgcagcaggcgcctcaggatgaaatttctcatgacggtctcacatcagccgccggttaacccggcggccagggatttatttgacgatttttacatccggcaggctgccggtcaggccgttgtagatatccggcttaaagccgctgacgcgggcgctgctggcggaaaggatctcgcgatagccgagcaggatcaccggcggatcgtcggccagcactttatacagctggtggtagatcggcttgcgctgttcgatgtcgagcaccgcgttgccggcgttaatcagcttatcgacttccgcgttatggtagccggactctttagcttcgctgctgtagaaatcccataccccgtcgtgcgggtcgttgagggtgctggtgctgaacgaggccaaatcgtaatttccggctttgcgctgcgccatcagggcgttgaaatccaccacctgcggcttcagcagcacgccaatctgccgccagttctccttggcgatggggatcagcgcatcgttgagcaccttcttgctcaccagcagggtcagctccaggcgctggccgtctttggcgcggataccgtcggctcctggtttccagccggcctcatccagcagctttttggcctgggccggatcgtaagggtaagggtcgacgccttcagcgttaaaggcccaggagatcggcgcgatcggttcgatggcgactttgccgtatccctgatagaccacgtcgatcagcttctgcctatccaggccgtaaatcagcgcctggcgcacccgcttatcctgtagcgccgggcgatgcacgttgaattccacctggctgtagtcgctggagccgtaaagattaatattggcgaagccgagcatcttcagttgctcaatatcgtcggggcgcgaggtaaaggcgtcgtagtcggtctccccggtctggaacagctggaagttggtggacggattggtcacgcgatagataaagcgcggcgttggcggcgtcccacggtaaaaatggctattggcatggaagcgtatttcctgaccgggaatatatttgtcgtacacgtaagggccgttgcccagcggcttgccgtgcagtgagcgcagatagtcgagattcccccgctgataccctttgccgtaccaggctttcgacagtacaggcccgccaattttggccagcgtggtggcgcctggctgcgtggtggtcacctgcagggtgagcgggtcgatgaccttcaggccgctgacgctgtcagccttgccggctttgtagtccgccccgccggcgatattggccagggtgatgtcggtatcgccatcatagctggggtcgagcaggaccgtcagggtaaaggcgacatcttccgccgtcagcggtgagccgtcgctaaaggtgagaccagggcgcaatttgatggtatagactttgttatccgggctgaccgtccagctctccgccagtcccgggaccagcttgccctggctgtcccagtcgatcaggcgtgaaaaaatgacgttagtcacgttctcatcccagccgttgacgaaaaagtaggggttaaagatcccctgcggctcggagatcccggccaccaccgtgtctgtgcgcagtttggcgctggccgggatctggctggcgtcagtggccggggtgatgccttctttcaggatcacttccgcatgggcaacagaagaaaatgctaccacgccgccgagcagggccacttttagcgccagggcgaagcgggtttgtctggtttttaatccttgttgtaatctggacaaaagtgctacctcatcaaatgattgcgtggttatttacaattcatgacgaaagataagaggcgcacttcgccctgtctaacactgaaacgctatgatttataactaattatccttagcaaaggatcggcaatataatcccattttatggctatgaagcagtggtttccgctgtctgatgatggttggtcagcatgctgtctgcgacccagcttttcaatcgcgaggttctgaacaggcgtcacacctgcgcggtattcgccggctgaaagggaacgatgatagtggccccgtaccgaccgccgtgcagggagtaaggttccctggcggtcagttccgggcagacgttaacgctccctcgccgctgggggaagcagggagggtgcggtttcggttagcggcaaccagagccgctcggggtcattaaatccctcttcgacaagggcataaaagcggctggcgtggagaccatcgacgaaggcatggttaaaccgcccggccaccgggataacgccattctgcaattttccccaggtgagcgcggggaccgccgcgccgacggcatattccgcatgggtcatcgaggtgaagtggagccatggcagacagctggcgcagataaaatgctcgccatcgacgatgagcggcgccggggatgtctctcttgccgcgacaatcttcggcgtggccgcggcgctgaaggcggtgaactcgggagcattgtcgcaccacacctgacggaatccctctccgacggtcatcaccggcgtcattactgccagactgtcatattcaatcacctcatcgttccgcactcgctggcgtagctgcggtaccccgttggccgcgcgcagcagggcatagagcgcgagctgaaaaaacgagacccgacggtccttcgcacattcgtacaggcgctgcgccgctatcggcacgcagagattaaagctggggttggcgaattggcggtaaaaagtgaaatggtcccggcggggccaggatgcggtgtcgataatccggtaatgtgccatggctgcctcctgaatactggcgttctgctgactatgcgacgatttcgatcaggttgccatcgggatcggcgatcaccgcctcataatagccgtcgccggtggtgcgcggcggcgaaatcagtattccggcggccccggcgcgttgggcgatggcatcgacctgttccgccccgcccaccgagagggccagatgcgcccagccggtatggttattatccgcgctggcctgctgcaggccaggcttgctcatcaactctatcaccacctcgtcgtcgatagtaacaaaataggaggcaaagccggggttggtctggctaaggtatttttcattgatgctggcggcaaagaagtccacccagaagcgggcctggacgtcgagctgttgggtccacagggcgaaatgggcaattttcatggtaaacctccgggcaggaacgttgacaaccagagcagggcagacgatcatgcttgctactgctcggttttgatcatttaaggattgtgttatgctcgattatgctgctttccctcaacagcgacaagcgctgatttgccagatcctgcaggaaaacggcagagtggtgtgcgcggagctggcggcgcgtcttcaggtgtcggagcataccatccgccgcgatctgcatgagctcagccgcgagggattctgtaaaaaggtgtatggcggggcggtgctgagtctgccggaagcgggggattacagtgagcggaaagataaaaaccgcgcgataaagctcaggatcgcgcaacagtgtgcccggctggtgaagcccggcggcactattttcattgataccgggaccaccaatctggcgatggccgaggcgctgcccaccgagctggcgctgacggtggtaacgaactcgccggagatcgccgcggtactggtgaaaaaaccgctgtatgacgtggtgatgcttggcggccaggtacagcgcgcgagcggcggttgcgtcggcgccgcggcggtggctcaggtgcagggcatgttattcgaccaggggtttatcggcggctgcgcgatggcgccagagtcgggcctgaccggctttgactatgccgactgcgagttcaagaaagcggtcattaaacagtgcagcgaaattattgttggtctgacttcggataaaattccggccgcagcgcggtttgtggtggccgccagcagcgatatcgatgtgctggtggtggaagagaatatcagtcgcgaatatcgcgttgcctttcagcagcacgatattcgcatctataccgtgtaacccgctagcgggtgagggaggtggcgataagccgcaggcccagcgcccccagcaccgtcgcggtggcgatgtcgatccgccgcttcagccgcaggtagacgcgccgcgggcggtcagcagacagcaccagcgccaccagcgaataccagctgacgtcgatcagaaagctcatcagcggcacgatgtaatagaaggcggtggggatctgcgccggcagcagggcggtaaaaattgaggcgaacaccagcgcagttttgggattgctgagctgagtatacagcccgtcgcggaaggtcttcagcaaagagcggttgccggccatcccgctggcggaaaagtccatcggctgcgccgacccgcgaaaaattttatagcccagccacagcagatagagcccgcccgccaccttcaaaccaataaacagctccggcaccgcggtgagcaccttctgcaggcccagcatcgccataatggagaaaatggccgcaccggcgccagtaccgagggcggtcaccataccgtgcagacgcgagcgagcgacggcattgcgcgcgacaaaaataaagcttgggccgggactgatcacgcccatgatcagcaccgcggcaatggccatcaggctggataggaacatagcgactcctgttatgtccgccgcaggcaggcggtcggtaacgtgtggacggttggagcagacagagtagcaaaatggttcaggaaagcacgtcaaaaaggtgtgtattagacggggagaagcaggcgttggcggcgcgcgttttctgcgcaactgtttgaataacgattcccattcttgtcatcgatggtaaactgaataactgtgatctttgtcataccgtaataactacagagaagagacactgctatgcaacatatcattgagggcttcctcaacttccagaaagagatcttcccccagcgtaaagaactcttccgcagcctggcctccagccagaatcccaaagcgcttttcatctcctgttctgacagccgtctggtgccggaactggttacccagcaggagccgggacagctctttgtcattcgtaatgccgggaatatcgtgccgtctttcgggccggagccgggcggcgtttccgcgaccatcgaatatgcagtggttgcgctgggcgtgacggatatcgtgatctgcggccattccaactgcggcgcgatgaaagcgatcgccacctgtcagtgccttgagccgatgccggcggtgtctcactggctacgctatgccgatgccgcgaaagcggtggtggaaaagaaaacctgggctagcgaaaccgataaggtcaatggcatggtgcaggaaaacgtcatcgcccaactgaataacatcaagacccatccttcggtggcggttggtctgcgcgaccataccctgcgcctgcatggctggttctacgacatcgaaaccggcgatattcaggcgctggataaaaacacgaaatcctttgtttcgctgtcggaaaatccggacgtctttttcgaataaagtctttccagggcacggaggccctgcaaaccctcaccacgccacgcaaattttgccaaaatgggcgccgctttgcagacagcggaaggcctccgactgattcgcggcgacagacctctccgctttacgccgacaagccgcagataatccagccaatcgggtatttattgctatcaggctctttttgtgctgagagtcagtattgtccgggatccggcgaatgccgcatggacctgccgggaaaggtcaggaagggggaaaaactaaagcgccgtccaggcggcgctttaggaaacgtttaggggcaagggtttatttgctcagttcagccgtcatatgaacacggttgttaaactgggcgctggtaattttataggatgcaccctgttctgcggcctgggcggcaattttagcttccgcgcggtccagcgtggaggcagtggcgctgacgctctgagcaaagctggcagcagagaacagagatagcgcagcaacagcaacgaaagttttgatgaatttcatggtcgtattccttaatttggtgtctgataaagggcctgttgccctgatgtgataaagaatacgcttgattgctggagcctaaaatcaaaacaatttgcgaaactctttcaaataatatgaatgattttccgccagccgcgaggctgcgcgcggcggcagggttgcattagctgctgtggtcaggcatcggaggtcggcagacaggcgactaaaagagagcctgtcggtcatgaaatgatgaaaatggctatgactgaccaggcggaaattcactttaatcctttccaggccgttatagacccgcttgcgattaatccccagcgtagcggccatttgatgaaccgactgacccttcatggtggcatcaatcatccgcatctccaggcggttgagcggggctcgttgacggaaagaaacgctctgacgttggtgacgcggcacgagtggccagcggcgctcggccaggcagcgcagaaggcggctcacttcacgtaccgcttcgcgctggctgacccacagtagggtatccgcgaaaaaggcgcgtccgcgccttacgttgccggctgacgtaaagccaatgaccaggccctgaaagtgctgagcgatttcagcggcagccaggtaatcatgatagttttccagtgacaaaataatcacatccagcccggacagttctggaagatggctgaggggcagggagtgaataacctttaattcgggcgctgttttctgaatatcccgaaaacactgggcgataccgatattaaaataaatattattgctgtgaattaaaatattcaacgaataaaccctgttgctggcgatgtaaacggcgcggggaggggattagctgcgtaccagaagcttattcatatcagcaggcgaagtgtttatataattcatcatccccggcggtttgtatgaataaatttcggctacgtaaacgttattaatataataccccgcgcacttaacgcggatgattaacgcgctctccacgccagcctggtgtaagcgagactttaagctctgaataacctgccataggcgctgcgcggaagggcggagattatttttttcccaaacgttaatcattaactcttcatcgctgaccagacgttctctgccgtgcgccagcaggtactccagtaaacaggccatggtgctgcgtagctggacttgcgtccgtgtcccgcgcagcgtgataatttcccgatgatgcaggcagtagaaaatattatccgctaacttatagccaagtagtttatagcctttagtcatccaccactccctgacaaatcctcttcttgccggtgcagagtacctgcccgctgctgactgaccaagtgaattttatcagttagaataatcaaaacaaataaccacacagccatacataactagaataaaaatctgataatatcgcttgattctgttgtattatgcggtataggaaaagtcttaatcaggcgactggcgaaggtaagcgcttgaaaatataggtggcatcgaaaaataaatgcacttaaattgatttggatcaatttaagctatttcagagggcgatgaccatttacattctaaaacaaagattgaaataacttccgttacgcggtgatacgctaattctgaacttgtggaactacccagggaatggttcattacttttcaggagcgtttttatggtcattgcaactcgtaagcctctgtgcaacaaacgctggtcggccagcccggcctcccaggatcttcagttgactcagctacgtcacccgtgggtcgccaccaaagctagctgcaaaagtaaaaaaggctggaagagccgcggttaacggctcgtccactttcccggacaaaacgccccggtcgtgctcatgccgcgaccggggttttactgtggtcattgttctgctcaacgatcacaccgagcgcagacaatagcctgaggcggtgttctccactctggcgaatcccggcaggccaagatgcataccggcaatcaaccaccgttcgctggcggcctggcgcagcaggatctccctggtacgccgggcctgttcaggatcgacgtcgaaggcgaccgaggcttctggccgcgcagactgaatggacgggaaatggacgatatccccccagatcagcagcgaggtatcgcccgcttcgagacgatacccggtatgcccgggcgtatggccgggcagagggcacgggcggatcccggcgatcacctcctcatcatcaaccccgctgatttgcgccgcgcagttcgccagtacacggcgaacaagcagcacgttgcgccgaccgcgatcgctggcgttgtcgaacgtggatgttgccagccagtaagcgctttcccgcgtaggcaggaacaccgtggcgttgggatacgctggcgtaccagcggcggacagcaggccgccgatagggtccggatgggcgtgggtgagaaggatggcgtcgatctcctcaggaccaacgccgagccgcgccagattggcgataagttcgccgccaacgccattggctccgccggtgccggtatccaccagcaccgtattcccgcgaccgcggatcagataggcgccaatcgcaatggtctccggcgaggctaatcctgaatgccgctgcagatgctccgcctcctcccgcgagatacccgagagtaaggacagcggcgctgacatcagaccatcactcacggcagtcaccgtcaggtcgccagcggtcaacgtataaaagggagcaggtgacatggcgacctcacgcgcgctgcgccgggttgcgtaaccgggcggtgatgggctgatagataaagacggcggcagtcgtggccaggtgatgcaggttgtcccgtgggaggatggcggcataccgggtttgttcggtcgccaggccgcctggctgcaggtgtatcggcgcagcgacgggcaagtcctccgcggtatcgcccagcagcagcacttcatccggggcaacctcccgcagcgtattattcgttagatagaggtggcgatgccagtcggcgatcgccgattgccagcgggcaaaatggccgccgccgttgcggcggtaggcgtcgctgtcgatgacggtagcatcgtggatatcgtgcagcgccaggtagcaggggcagccctcgctgagagcgcggaagcgctgggaggcgtagaaaccgggcacagagaccagcgccggtagtttttcctgattgtaaaaggtattccacgccgcttcgctttggggatcggtgtaggcgcattcgacgacatagagcatagtgacctcgatgaacagatgatgtgcgcacaaggcgctttagtgagttttcatcatcctatcggctaaaaatggcgctgaaaaacgatgttaattcaaggcgtagtgatattctgtcactgactttcggtgagcctgcacaaggagcattggctatgcgtcgtaaaatccccagcagcgctgcgctactggcttttgaggccgcggctcgtcacggcaactttgcccgcgcggcggctgagctcgcgttaacggaaggggccatcagccggcagattgcccgtctggaagcgctcctcgacagtaaactctttgacaggacggggagccgggtgcggctcaatccggcaggcgcccgctatgctcgtcaggtccgcgagatcctcgctcgcctggaacgggacacccatgacgtcagcgggatgcccgtcgatggccgcagcctggagatcgccgtgctccccaccttcgccagccgctggttaattccccggctcgggcgctttgcggcgcagcatccgcatatcgtggtcaatatcgccgcccgcagcgatcccttcattctgccgggaagcggatttgatgccgccatccattttgaacacccggcgtggaccggaatggaggtgacgtttttatttgcggagtatttgctgccggtctgccatgctgcgctgctgacggatgacgatcttccggggctgcttaaccggctaacgcgcattcaccggcggcaaaacccggacgcctggctgcactatgcccgcgagtgcggtctggcgctggataaccccgcccaggggccgcgctacgatctgcatgagatggcgatcgccgcggtactaagtcagcagggagtggccctggtgccgaagatgtatgtggaaagcgagctgagcgccggaacgctggttgccccgtggccgggctccccgacgctggctaagcgcttctgcttgatcaaacccggcggcggggagggggagccagcgctgcagatgtttgagcgctggctgcagacggagattgcggcaggttaagtcagagctggccgggagacatttagcgccgcccatggtttcctccctgttataccgcgcgctcgcttttttacaccagggaatagttatcagtatggaatattgttgttgcgaagccaccgcttctgccctgcgtccagacagcttccttctctcgcatgacaaaatattatcagtttatttgttttattctgtttatcgtctttgtcagtattacgcagtcactcccgagctgaaccgagatgccactgaattaaaactggacttactccggcaggatgtggatacgaacgggatttccttggacatttattgctgagcgactgttattccgggcgttaaataaaagatcaccgttctgccttacccagtgcgctttgggttcctgtagggagacagcgacgggcggtagcgttcgcgaaagcaggcgggtgcgatagcgcggccagtgggtggggtggcgaagggtaacgaatggaggacgtaatgatgaattttaacgccagaaaagatggagtgaagcgatgaggaacaggctgataaacgatgcaaccagtttggtaaagcaaccgccggggcagtcacgctaccggatggttgttctccggagggcgcaatatcgacagcctgctgaatcagcaactgttaacccatatggcggcaggaccgaagccgcagcacctgacgcggagcgggatgaggaagaggggaacgcctcaagaggagtgtccgctttttttgcaggaagtcttgccggattattattatccgttggagctgaaacatccagagcaatatacacgtcccgatatctgaagcgcagaaatccggtactgcatgataaactgcaaaatctgggagatctggatcttctgtattttcttgttgaggatattgtaaaacctttcgaaacagcgtgtatggtcagtgataagaatccagcagaatttaacaaaatatgtgaatatttctttggtggactatgaatataaaacgaacattactcatcctgctttcccgtgttatcagaggggctgggatgggattaggtgcttcaggtatcgcgctggctggctggttcttttttttctcagtaaatgaatataaatttctctggggtttactttcagttgtgggattcctggtggggtatctgatatatcgatttgcatatgcatatatttatgatgaatggaattattatcattaagaaattaaacggcgtggtctgttgatcgatttttgatgctcattaaaagggttggcttccttagcactcatgtggactagtatggactatgcaaggaaaacgctttgccaatacacaacattttaagtcagcaataccaacggggagcaggtgataaaattcaggaattacagaaggaaaaatgattggtgcgtctgaatggactcgaaccatcgacccccaccatgtcaaggtggtgctctaaccaactgagctacagacgcattatggtgcgtttaattggactcgaaccaacgacccccaccatgtcaaggtggtgctctaaccaactgagctataaacgcattatggtgcgttcgattggactcgaaccaacgacccccaccatgtcaaggtggtgctctaaccaactgagctacgaacgcaatgttgtggtgacaacggggacgcatattagcggcagggaggggatgtggcaagaggtaaacgtcacttttcttgcacattgcatgcgattgcggaacttttactcattccggatatattttactgaaccacaaggatatttcttcgccagcgagcatcacggctcttatttttcagccagtccaaacctgcgcggaagggttgccgatgtgttaaattatcggccaccagaagagaaggagtcataacgaagatgaaatcgattggtattttttgcggttcttcagctggcgaacatccgctgtacctcgaaaccgcccgtctggttggacgtacgctggcgcagcaggggttggcgcttgtctatggcggcggcaaagttggtctgatgggggcggtcgccgatgcggcgctggaggccggtggcgtggtgatcggcgtgatgccgcgcggcctggtggagcgggaaattgcccaccgcggcttgacggagctgcatgtggtcgaggatatgcacgagcggaaaaccaaaatggcggcgctggcggatggctttattgccctgccgggcggggcggggacgctcgaggagattttcgaacaatggacctgggcgcagctggggatccatgagaaaccgtgcgcgttcctgaatattaagggttattacgatccgcttcaggcgatggtcgataacatggtacaggaagggtttatgcacccgcgctacgcggaaatgctgccgttcgctacctcggcagacgagattatcgccggttttcgcgactatacgccgccggcccgtaaatgggttcagcagccagctatttaaacatcaagcgcagggtaaacagcgcgcagacgatgagcagtaacagcagcaattcgaagcgatagcgttgcagcatgatgtcctcctgaaaaaaaaccggcgctgttcagcgccggtttatcaccttaacgccctgaccattatgccgccggtttaaccgccggtttagctgcgtggtgtgccgctttatgatgtttctttgcagcctgcgctttctgcgcgactgccggtttcgcagcggttttgtggtgtttcttcgccgcctgcgctttctgcgctactgccggtttagcagcggctttatggtgtttcttcgccgcctgggctttttgctcagcagccggttttgcagcggctttgtggtgtttcttcgccgcctgcgctttctgctcggctgccggtttcgcggccgctttgtgatgtttcttatggtgaacggtagtatggctggctgctgcactcggggtggtgcttgccgcatcggcagcgaaagcaactgatgacagacccatagcagcggcaacgaccagagctaatacttttttcattctgaaatcctcgacttggtttcttgagtaaccccactgcggggctgttggcaacactataagcgcctgccgggaggctatcagtgagtctttggtgtcagggagtaacggaatgtacaacgcgccgttatagcgaagaacgaaaaagcccgccggagcggcgggcttagacaagttagcgcgcagcgcgctgtaagatgatgctggaaggctggcgctgcagaaaacgcatccgcagcatcatcatgatggcggcggaggtcagaccgatgataaatccgcaccagaaaccggcaggtcccatgcggggcacaatcatatcggtcagcgccagcagatagccgctcggcaaacccagcacccagtacgcggtaaaggtaatgaaaaagatagaccgcgtatctttatagccgcgcagaatgccgctgccgatcacctgaatagagtcggagatctgatagatagctgccagcagcatcaggtgcgaggccagcgtcaccacttcgggattatcgttatacagcagcgcaatctgcttacgcatcaggacggtaaagatagcggtaaatactgccaggcagatccccacgcccacgccggtgcgggccgaaacctgggcatcgatcgttgagccctggccaaggcggaagccgacgcgaatggtgaccgccgccgccagcgacagcggcagaacgaacatcagcgagctgaaattaagcgcgatctggtgaccagcgacgtcaatgatcccgagcggggagaccagcagcgcgacgacggcaaacagagtgacttcaaagaacagcgccagagcaatgggcagccccagctgcaccagccgtaacaggacggcaaaatcagggccgctgaagcgctcggcgcagcggatatcgcgcatcgtacgcgcccggcgcacccaccacagcatgctggcgaacatcacccagtaaacggaggccgtcgccacaccgcagccgacgccgcccagctcgggcatgccgaaatgaccatagataaaaatatagttcaccggaatgttgaccagtaatccaataaagcccatgaccatcccgggcttggtttttgccagcccttcacactggttacgggcgacctggaagaacagatagcccggagcgccccacagcagcgcgcgcaggtagccaaccgccttctctgccaacagcggatcgatgttatgcatggagctgatgatgtatccggcgttccacagcacgaccatgatcagcaccgagacaaagccggccagccagaagccctgacgcacctgcggcgcgatacgctctcgccgcccggatccgttaagctgcgccaccaccggggtcagcgccagcagaaggccgtggccgaagaggatcgccggcagccagatggaggtcccgatggccacggcggccatatccgtggcgctgtagccacctgccatcacggtatcgacaaaacccatcgccgtctgcgctacctgcgcaaggatgacgggtatagccagagctaataactgacgcgcttcaacgaaatacttctgcacgtgaacaccttcgaattgttgttattttgagactaaaaaagccgccgtaactggcagcaaggggataaaaatgaggaatttccagtctattgtagcgaggattggctattaagccagtgaaaaaagagtcgaggcacgaagcgcgctggcaaccgctttgccctcctgttattgttcccgatagcgaaagcggtaatgataccgtcatgattttcaacaggagccaaacatgtttactggtattgttcagggaaccgcgaaagtggtctccattgatgataaacccaattttcgcactcacgtggttgagttaccggcacatatgctggaggggctggaaaccggcgcctcggtagccaacaacggctgctgcctgacggtgaccgaaatcaacggcgcgcgcatcagcttcgatctgatgaaagagacgctgcggattaccaatcttggcgatattcaggtcggcgatgaagtgaacgtcgagcgagcggcgaaatttagtgatgaaatcggcgggcatttaatgtccggccacattatgaccaccgcggaaatcgtgaagattctgacttccgaaaataaccgtcagatctggtttaaagtgcaggatccaacgctgatgaaatacatcctctataaaggattcatcggtattgacggcattagtctgacggtgggtgaggtgacggcgacccgtttctgcgtgcatcttattccggagacgctgcagcggaccaccctgggagcgaaaaaactgggcgatcgcgtcaatattgagattgatccgcagacccaggcggttgtcgatacggtcgaacgcgtgctggccgcgaaagagatggcggctaaggtcaatgaagcctgaaaaaaaatcccccgccgataagcgggggagtgttatttaacgggcgacgcgcagtccatgttcaataccgcgcgagaacaccacctgccagagctgaatgtcgcgggcgcggaaggcgccggcgcaggcgttcagataataggtaaacatgcgtttgaaacgctcagaatagttatcggcaatttccggccagctggcgaggaaacgctcataccaggccatcagggtcgtgtcataatcggcgccgaagttgtgccagtcttccatcacaaaatgcttttcgctggcttcggcaatgtgacgcacggaaggcaggcagccgttcgggaagatatatttatcgatccacgggtcaacgttatggtcggtgaccttggaaccaatggtatgcagtaaaaagcggccgttgggtttcaaattacggtcggcaacctcaaagtaggtagcgtaatttttcggccccacgtgctcaaacatgccaacggagacgatgcggtcaaagctgtcgtgcagatcgcgataatcctggagacgaatctctacatcgagatcggcgcagcgcgcctgggccattttttgttgctcggcggagatggttacacccacgacgctgacctgataatttcgcgccatatattcggcgagaccgccccatccacagccaatatccagtacccgcatgcctggctccagctccagtttgcggcagatgagatccagcttagcctgctgggcggcctcgaggctctgcgcctctttccagtaaccgcaggaatactgcatatagggatcaagcatccggctgaagagatcgttgccgaggtcgtagtgctctttaccgacaatccaggcacgttttttactttgtagattaaacagacgagcgcctgcgatgcggagtgtgtctttgaaatggtgtgggagctgcttttccaacccggcgcgtaacaccttgtggaagaatatatccagacgctcgcattcccaccagccgtccatatagctttcgcctaaacccagcgaaccttcctgcaaaacccgtttaaaaaagagaggatttttaacccgcaggtcggacggcgcggagccattgatttcaattcccgcacggcctaataattcagctgcaatccggtaccagtcatcatttggtacacttacttcttctatacacgatgaactcatagcttctccatcacgcccaagtgatcagaaccttaaaacagcgtagacgcttttttggctttgtgagaaatctcacggataatccgtgaagtcgctatccgacgtaaacagaggaagggagataacccttgccgaaaggccttccatggtgaaacggaggcatcctgcatccgttaatctgtaactattttctatttatgtgaacccggatccagtataggacgctaagtactggctttcaataaaaatttcttagcatgctaacgactggtccgggccctggcgacgggcattacgcgtgggaagagtggggtgtcagctccggcgtctgctgcaggcgatagcctattccggctaagccaatcgaaaccagcattacgctggtggtagtcagcagcggcgtggcgatcagcgcggataccagcagactggtcaggaagcacaggccaagctgcagggtattttgcagcgccgccgcgcggccggtcgcctgcggaaaaggcttcaacgcctgagcaaccacgatggggtagatcccgccgttgaccaccgccatcatgcagaacgggatcattaacgccaccagcgaggcatgggtttgcaggcccaccagccaggtggcggctacgctgacggcaaaaatcaccagcagccacggcagcatctgttgaccggaccatttctgcagcagcgcgcgacagccatagcctcccaccagaaaggcgatggtctgcggaatatagctcaggccgatagcggttgggccatagcccatttcatgcaggataaaaggtgaaccggtaagccaggcgaagaagctggcggaacaggcggcgtagatcaggacgttgccgctgtattcccgggagcgcagcagcgcgagaaaggtgatcttttgctgcgtcactactactgacttcgcggctgccttcaggcgcagggcaggcagcatcagcagcagagtgatggcgaacagggtggcgaagatggcttgccactcgaagtgcaccagcagccagctgcccagcagcggggccagcgccggcgacagtcctaccagcggcataatggtggcgaagatgcggttcgtgcgctgggcaggatagtaatcggcgaccatcgcctgccaggtaacggccgcggcacagacgccaatcgcctgcagaaagcgcagcgccagcatcagggtggcgttgtgcacccacagcatccccagacagccggccgcgaaaatcgccaggccgcccagcagcaccggtttacgtccatagcggtccgacagcggtccccagaacagctggcccagcgcgaagccggcgaggaacaggctcaggctggcgctaatggaggcggcggaggtgttgagatcctgctgcatggcggcaaacgccggcaggtacatatcggtggccagaaagcccagcacgctcaggccggccagccagactaaaaatcctttcccgggttgtgacataacgttctcatagttggtgtacaggtacgatgccgcagagtgtagggagtgcattgtggcttgtgaaacgctaatatttgtcacatgcattcaaaaattttgcaggcagaaaatgtggtctgaatactctctggaagtggttgatgccgtcgcccgtaacggcagcttcagcgcggccgcgcaggagcttcaccgggtgccttccgcggtcagctataccgtgcgtcagctcgaagagtggctcgccgttcccttatttgagcgtcgccatcgtgatgtggagttgacccccgccggggtctggtttttacaggaagggcgctctgttatcaaaaaaatgcagatcacccgccagcagtgtcagcaaattgcgaacggctggcgcggacagttgtcgatcgcagtggatgatattgtgaaaccggcgcggatgcgtcagatgatcgtcgatttctatcgccattttcccgacgtcgagctgatcgtctttcaggaagtattcaatggtgtatgggatgcgctggccgacggccgcgttgagctggcgattggcgcaacgcgatctattccggtcggcggtcgctatgcgttccgcgatatggggatgctgagctgggactgcgtggtggcgagcgatcatccgctggcaaagatggatggacccctgagcgacgacgtcctgcgtaactggccgtcgctggtgcgggaggatacctcgcgctcgttgcctaaacggacaacatggttgctggataaccagaagagggtagtcgtccctgactgggaatcatcagcaacctgtttgtcggcaggactctgcgtcggcatggtgccgagccatttcgcccgtccatggatagatcgcggcgagtggactgcgctggcgctggaaaatccgttcccggatgccgcctgctgcctgacgtggcagcagaacgatgcctcaccggcgctgaactggatgcttgactatctgggggacagcgacacgctgaatcgggagtggctgcgggcgccggagagatccgcgcccgccagatgccttaacgacgataatcgacaaacgggccatccgctaccgagcggcgctcaaccagacgagggtgcacttcgatagactgcgactcttcacgcttgttgacgatacgatccaacagcatgttaaatgcggcctcgcccagggaatctttcggctgatgaatggtggttaacgccgggctgaaatagcgggcgttgcgcacattatcataaccgatcagcgaaatgtcctgcggcacccgcagtcccatttcatccgccgcgcagatagcgcccatcgccatgatatcgccgccgcagaagaccgccgtcgggcggtgctgctggtttaggatctgctgcattgcgcggtagccggactccggctcgaagtcgccctgcacaatccagttttccggcacgctgatatgcgcctctttcatcgcctgcatgaagccggccagtcgccccgcgccggtgttgcgctccagcgggcccgggatcacgccgatttcgcgatggccgcgttcaatcaggtagcgtccggcgatatagccgccctggaaggcgttatcgatcaccgcatcggtgaagtcggctttcgcctcgccccagtccatcaccaccatcgggatatggcggtactcttccagcatgctcaataccgaatccggatactcggaacacatcaccagcagaccgtctacgcgcttttgcgccatcatcgacagataggcgcgctgtttttccagatcgttccacgcgttaccgaggatcagagtatagcccttctggaagcagctcttttcaacggactcaataatttcagcgaaataggcggcttcgctactggtcgccagcaggccaatcgatttggtgtgattgactttcaggctgcgcgccacggcgctcggcgagtagtgcagctctttgatcgccgcccataccgcattacgcgtctcttcggcaacgaaacgggttttgttaattacatgtgacacagttgtagtggaaacgtttgcgcgtttcgctacatctttaatagttgccattacatctcactccatgccttgacctgatcgcctgatcatcgatacgtaaacgtttgcctacacacaccctgaatacaattttcaacattgcatcacgtcgggaaaacgacacagaacgacaggaaggggtcaatggccgatacgcttttaaattagcgtgggattttgtccgatcttggggcaaagtggaagagcaaaaatgtgcatcgccctaaatcccggaagatttttgcgattttttgtgcaaaaatgagcaagctcacttttggtgtggggataacaagagggaaaaatgatggataccaatttaaagttttcgctgatcaccacgattattgctctcggcgtgattgtcgctttcagcctgaccgccatactgcactaatgtttcgctgagggaggagcgccgcttcctccccatatcccgctattattatcaattctgcaaaaatcttttgtcatttcgttcacttttgtttttttgtgattgatgtcatgcttttgacttctgatgttacgccgtcctctctgacggtctgatggagtcattgaatgaaaatcaactttcctttacttgcgctggcgatcggcgcctttggcatcggtaccaccgagttctccccgatgggattgctgccggtgattgcgaaaggtgtggacgtctcgataccggtagcgggaatgctgatcagtgcgtatgccatcggcgtcatggtcggcgcaccgctgatgacgctgctgttgtcgcatcgcgcacggcgcaatgcgctgatttttctgatggggatcttcaccgtcggcaacctgttgtcatccatcgcgccggattacaccacgctgctgctgtcgcggattattaccagcctcaaccacggcgcttttttcggcctgggatcggtggtggcggccagcgtcgtgccaaagcataagcaggccagcgcggtagccactatgtttatgggcctgaccatcgccaacattggcggcgtgccggcggccacctggcttggcgaaaccatcggttggcggatgtccttccttgctactgcgggattaggcctgctggcgatggttagcctgtggttctccctgccgaagggcagcgcgggggaacgtcctgatgtcaaaaaagagctttctgtcctgctgcgcccgcaggtgctctccgcgttgctgaccaccgtgctgggcgccggggcgatgtttacgctgtatacctacatttcgccagtgctcaatacgctgacccacgcttcatcgctgtttataaccgcgatgctggtgctgattggcgtcggtttttcgctaggcaactatctgggcggcaaatttgctgaccggtcggtctccggcacgctgaagggctttctgctgctgctgatggcgatcatgctggcgatcccgctgctggcgcaatcccaggccggggcggccatcagcatgattgtctggggcgcagcaacctttgcggtggttccgccgctgcagatgcgggttatgcgcgtagcgcatgaggcgccggggctctcttcttcggtgaatatcggcgcgttcaacctcggcaatgcgctgggcgccgccgccggtggggcggtgatctctggcggactgggctatgcgtttgtgccggtgatgggcgcgattatcgctggtctggcgctgctgctggtctggtttagcgggcgagcgcagccggaagaggctttcgccagccagtaaccatcggctgggcaagggcaaaaaaaaccgcagccggggagaccccgctgcggtttgtcgtttatgccgccaggttagccgcaacaaacttccagtttaccagcgcccagaagtggtccaggtagcttggacgggcgttgcggtagtcgatgtagtaggcgtgttcccaaacgtcaacggtcagcagcggcttcgcgtcggcggtcagcggggtgccggcgttgctggtggagacgatagccaggctgccgtcggcatttttgaccagccaggtccagccagcgccgaaatttttcgccgcggcatcggtaaatttggctttaaaatccgcgaagctgccgaaagatttggcgattgcggccgccagttcgccttccggttcgccgccggcgttaggcgccaggcagttccagtagaaggtgtgattccagacctgcgctgcgttgttgaatacgccgccttcagacgtgcggacgatctcttcgagggatttgccttcgaacgcagtgcctttgatcaggttgttgaggttagtgacatacgcctggtggtgtttaccgtagtgatattccagggtttctgcggaaatgtgcggcgccagggcgtcttttgcatatggtaatgcaggtaattcaaacgacattgctactctccttataactttttgttttatctcacattgacaggatgaggttttcacctgaatcgtgttctgaccgcccgacgctgtcgcgtcccgggcgtgttattgtattgagaatgttaacatttgccgcaagcagtgaaaagccttacaacgataaaggctattatcaccggtgcatgtggtgaaggcttaatcgttttctgcaggagtgggtgataagccgccaaaattgttgcaaccatgtataaggagatgccctctgcggatttgcgaactcgcatggcgattaactactctgcttcgccgctgtcacgcaatgcgctgaacaaaaaataaaactttaatatcaaacgattaataaaaatatgcgctcaggcaatcgtcgctatgccaataattcattgtctattttttaatttgtatgacaaatatggccgccagcagtaatttccccaggatgacgacgatggcaaaaacagatgaggtggtgagcgcgaaaatgatcccggtggtgcaggggatcgttgactggatcgaagcacatattttcgacaccctgtcggtgagcgcgattgcgaaaaagtccggctactcacactggtacttccagcgacaattcgccatggtaacgggctgcacgctggcgagctacgtcagccgacgaaagatgacgattgcgacaatctatttaacgcagacgcaggcgtcgatacagagtatttctcagtgcctgggatacgagggacaagccgctttctgccggacctttcaccgtcactttggcatgtcgccgacccgctatcgtcgtgatacgccgggcaaagagagcaatctgcaatatcccttgcgggtggggatggagatggagcaggagaggcggtctgccgccgcagcggcagaccgggatcagcgaatggttttcggcgtcatgacgcgacgagcgccaacataatggcgaacccagtaatcctcgctcagggaggtgatttgaatatcacgacctgtgcgcggcgactgaatgaattttccgttgccgacgtagacgccgacatggtcggcagcgccccgtccgcgggtgcggaagaagactaaatcgccgctctgcagttcatcacgatccaccggacgcgcatcgcgcaggtggtacatttcgttggccgtacgcgggatgtggatcttgaccaggtccttataggcgtaatagaccagcccgctgcagtcaaacccggtgcgcggcgaggtgccgccccagcgatagggtttacccaactggcccatcagtttgttcatcgcggtactttgcgctttttgcacccggaccttgtgggcgtcggcgatcgttaaattcgcttcgctggcctcgggcttacagcgttttttatagcccttgcgcaccacgcacttgcttttgacgctgtttagcgccagggtcggctcggcgctggcggcgaccgttttcgcgcactgctttttataacctttacgcagcacgcattttttcgtcgcgccagcggcctgacgatgaagtgcggtttggcttgctgcggtagtgcgggtagggagccgggtgcgcgaggactttttactggtggttttagcggtggttttagttttttgactggttgcttttttcttgcgctctgagccacttttcgcgggcaacgcttttggcgaagcggaggcgtgcgtatgccctgacgcctgagccagtggcgtgaatgagatagacgtgaacagtaatgcacagagcgatatcgcgattttgtttagccgcgccactgagcaatcccctgattaattacagacatgtacaaatgcctgacgatgaatgacaaaccggaatgattctaaagcataaaaagccggaaagttaatattcttttgtatcaaaaatgtcgattggttaacgattgcaagaaaacgcgtcagacattgaccgcctcgcacagaaaatgcgcaatgagcgcccgcctgtgaccgcaaaatgatatttttaaggcaacttcgcgcaacagaagataaaatatgaatagtgaaaaaaatgttattatccgtcctgcctacaggacgctacaatgacaagttactgccgtagaaagaagtttaaggaagcacgacaatgagctcgactttagaaaagatccaacgccaaatcgctgaaaacccgatcctgttgtacatgaaagggtcgccgaagctgccaagctgtggtttctctgcccaggccgttcaggcgctgtccgcctgtggcgaacgttttgcttacgttgatatcctgcagaacccggatatccgcgccgagctgcctaaatacgccaactggccgactttcccgcagctgtgggtagacggtgaactggtgggcggctgcgatatcgtcatcgaaatgtaccagcgcggtgaactgcagcagctgatcaaagagacggcggcaaagtaccataccgacgagccaaaagcggaataattcccgccatcagtgaaaaagcgacttcctggaagtcgctttttttatcactccggggtggccactggcagcggccagccgcccagacgcttccagcggttcacgatctcgcaaaacagccgcgccgtctgctcggtatcatacagggcggagtgagcctgcgcgccgtcgaacggcatacccgcggcaatacaggctttcgacagcaccgtctggcccagcgccagcccgcttagcgcggcggtgtcgaaggtaacaaacggatggaaagggttacgtttaagtcccgcgcgttcggcggcggtcatggtgaagctgtggtcaaaggtggcattgtgcgccaccatgattgcccggctgcagtcgctctctttcatccctttgcgcaccattttgaagatggcatgcagggcatcgtattcgctgacggccccgcgctgcgggtcatgcgggttaatcccgttaaaagccagcgcttcgggctgcagattggcgccctcgaaaggttcaacatggaaatgcagcgtttcatcgggcatcagccagccgtgctcatccatcttcaacgtaatggcggcgatctccagcagggcgtcggttttggcgttaaatcctgcggtttcaacatcgatcaccaccggataaaaaccgcggaaacggtcgcacagaccattcagttgagcgttctcggacatcagattctcttagctggaaaaaagtagcgcgcattatggcaaattttgccgcggcttgcagcaggcaggggtgaaaacaacgggcgccgtagcgcccgggcgagccatggcattaaatatgccagcgtggggaagcgttagttgcccagacctttgccggcatctttctcttcaatgagctcgattttgtaaccgtccggatcttccacgaaggcgatgacggtggtgccgccttttaccggcccggcttcacgggtgacgttgcccccgttctgacggatcagttcgcaggcttcggcggcgttatcgacgctcagcgcgatatggccgtaggcggtgcccagctcatagctgtccacgccccagttgtaggtcagttcgattaccgcggtttcgctctcttcgccgtagccgacaaaggcgagggagtacttgtactccgggttttcgctggtgcgcagcagcttcatgcccaacacgttggtatagaagtcgatagaacgttgcaggtcgccaacgcgcagcatggtgtggagtaagcgcataatgtcccctatgcagtttatttgatagatcagaacgttgagtatagcggcgatacgtcgccgctatcaatggagggattacagagtcgggtaatcggtgtagccttccgcgccgccgccgtagaaggattccgggcgttgcgggttaagcgccgcttttttctgcaggcgagccaccagatccgggttggcgatgtaatcgcggccaaatgccacggcatcaatcagccctttattgataagatcgttggctttttctactgtgtaagcgccagcgccaatgatcacccccgggaagcggtcgcggactttctgacggaaagcttcactgtaaggtttgccgcccgcccagtccggctcggacatgtgcagataggcgataccgcgtttcgccagctcgctaatcagatacagcgcgtcttcttcttcgttcgggccattatccacattttggaagctgccaatcggcgacacgcggatgccaatgcgctcggcgctccactcttgactcacggcgtcaaccacttccagcaccagacgggcacggttctccacgctgccgccgtactgatcggtacgctggttcgccgatggcgagaggaattggtgcagcagatagccgtgggctgagtgcagctcgaccagatcgaagccggcgtcacgggcattgccgaccgcctgacggaaatcgttgacgatccctgggatctctgcggtttccagggcgcggggcattgaggtgtcgacgcgaatggcgtggccgttttcgtcacgcagtgaggtacgggtgcccgcgctcagcgcggaaggcgctaccggggcggcgccgccaggctgcaggctactatgggaaattcggcctgtgtgccacagctggacggcgatatgaccattttcggcatgaacgccggcggtgattttctgccaggcggcaatctgctccgggctgtgcagcccaggcgcgccggcgtagcctttggcctgcgcggagatctgcgtcgcttcggtgatgatcagcccggaactggcgcgctggcggtagtattcgcccatcagcggagtagggatatcgcccggctcaatgctgcgcagacgcgtcaacggcgccataaatacgcgattagggacggtgaccgcaccgactttcagtgggctgaataattttgcttccgacatagtgactcctgagtagaccggtcgtctagtaactgatgaaataaaaacgcctgttataccgcaggcgccgcaataatctgtttggcgtgggcaagggcgctttccagcggcgttgcgctacgcgtaattttggcctgcaggttggccccgagccacagggaatacagcacctgcgacagggtcatggcctcgccgtcaaatgcgagactgccttcctgacgtcctttctccagcgcgtcgcccagcagggcgataatctggctggctccgcgatccatggcggcgcgcatatcttccgacagatcgcaaacctccgcggatagcttgacagtaagacacccgctaataatcccctgctggcagaactgattcagcgtgtgctgatagtaggccagcaggcgatcgcgatagttaccgtcgccatgatcgaagtggtccaccaggcgctgcagatatccggtgtagtgatgttcaagcagcgcgacgccgaaggcttccttagagcgaaagtagtggtagaaggagcccttgggcacctccgccgtcttcagaagttcgctcaagcccattccggtaaaaccgcgatgcatgcaaagctgctcgccggtggccaggatatgttctcgggtatcgcaatcgctgtgtctgttcatgctgcacactgtagtagaccgattggtctaatgcaagcgtcagcggaaaaatgttagctggcgcagcacgtagtgaacaaaatttgcgtcggcgcggggaaacgtcttcaatgaaaggagacgaggggacaggaggcgtgtggtggcagagcagttagaatttttcccggtgcagagcccgtgccggggaatatgtcagaccgatgagcgcggctactgtcgcggctgtttccgtagccgtgaggaacgttttaactggcaaacgatgagcgatgcgcagaaacaggaggttttgcgtctttgccgccaacggctgctgcgcaaaatacgcgcgaacaggccggagccggcggaagaaccgcagcaaccctcactgttttaagccaaaaattacgtatactcagagcacttttttattgaggaagcggttatggttcagcgtattgctatggctccccaggggccggaattttcacgttttgtgatgggctactggcgtctgatggactggaaaatgtcgcctggcgagctggtcagctttattgagcagcatctcgatttaggcgtaaccaccgtcgatcacgccgatatctatggcgattatcagtgtgaggctgcctttggcgaagcgctgaagcgagcgccgcatctgcgtagccggatggaaatcgtcagcaaatgcggtatcgccacccgggcgcgcgctgagaacaccattggccactacattaccgaccgcgatcacatcgtgctcagcgccgagcaatcgctgcgtaatctggcgacggaccatctcgacttgctgctgatccaccggccggacccactgatggacgccgacgaggtagccgaagcttttctcgcgctgcatcatagcggtaaagtgcgccattttggcgtctcgaactttacccccgcccagttcaccttgctgcagtcacgtctgccgtttaccctggccaccaaccaggtcgaaatttcaccggtgcatcagccgctgctgctcgacggtactctcgatcagctgcagcaactgcgtattcgtccgatggcgtggtcttgtcttggcggtggtcgcctgtttaacgaagagggcttccaggcgctgcgcgatgagctggcgcaggtggcgcacgagcttaacgccgacagcatcgaacaggtagtttatgcctgggtgctgcgtctgccgtcgcagccgctgccgattattggctcgggcaaaatcgagcgcgtgcgctcggcgattgtggctgaaaaactcagcatgacccgtcagcagtggttccgcatccgtaaagccgcgctcgggtacgacgtaccgtaacgggcatttcccctccggaaaggcgttcctggtttacacttaacagggagacagccatccggaggtgttatgcaacgatgtattctcgcgatcttatccctcgcattttgcgctggcgcacaggccgttagtgaagatgtgcaacttaatctcgtgaccacccagggcgtcggtcagaccatcggcagcgtcaaaatcaccgaaaccgaccgcggactcgagttcgcccccactctgcgggcgctaccgccgggtaagcacgggtttcatattcatgccgaaggcagctgccagccggcgatgaaagaaggtaaagccgtggccgccggggcggcgggcggacattacgatccgcagcataccggcaaacacgaagggccgttgggagccgggcatcttggcgacctgcccctgctggtggtcaacgatgcgggcgtagccgaccagccgattattgctccgcgcctgaaaacgctggcggaggtgaaagggaaagcgctgatggtccacgtaggcggggataacatggccgacagtccgcagccgctgggcggcggcggcgaacggtttgcctgcggggtgattaagtagttccttcgccaattgtgccggccaccggggcctgttccagctgcgacaaggcgcagtacagtcgccaaatcgcggcggccagttcccgcgccgccggctgatgatggtggttcagggcgtcgcagatccgctgcagctcctgcagggtggaggccagcggacgctgttgcacgccgcgctcgctcatcacatcgcgtaacaggttgatgcacaggtcgcgcacctgggcgagaggatcggagcgggtttcccattcgcgaagctgccagacgacgtgcgagcaattgagcagcacgacgccccaacgcaacagccagcggcgcgccagggcatccttactctggctgagctgactgacgtggtgatagaccagcgattcaaattcatgctcactgtgctgaggatgacggctaagctgatcgacaaagtgacgccgtaacgctctgatatggcgtcgccctttgcgggcgtccgagcccggactcagtaccgcaaaggccagccaggcaaagcctaccccgacaatcttgctcaaattatcattgaaaaaggccgcataatcgtacaccggcgggttggtgacggcgataaacgagcccataaagacgataagctgtccccacaggccggcgtatttgggccactgcagtttgagtaactgcatggtggtcaggagcgggaacaggaacagcagaaactgccacaggtcggttacctgcaccatcaggccgaacttcaccacgaaactgaatagcgacagcaggaccagagtctgcatcagcaatgtcagcgagcgaaacggcgaggcggatacggagtagagcacgcagcagatggaggccagggtcagggccgccgcgcagctggtccactgggtactgatcccccatgcgccaatcgccaccagcgcgcaaaaggtacggacaccgttgagcaacgcctccgcctgatcggtatggcgggctaacggcggggcggcgggcacattgaactcggcgatcgccgaggcattttcaacgcggcggatccagcggctgctctccaggtaaatgcgacagaaatagcgcaatcgcgcccagaaagcgatgtgccggtaatcggcatcctgccgcggcgccagcggcgccaggatccgcgcaacgtgatagctgtcggcatgaggggtggcgagctcggcgagcagcgactccagtacctggcgagtgttcgccggcgcgtcaggccagttcagcagcatccgtcgcagactggagatgacgctggtcatcctgagctgctgatgcaggaggtagttcagcagaggattctgccgacggaaacggtagtggctccagaaggcctggatacgcagcaggttcatggtcaggatctggccaatcacgctctcatgggcggtgcgaatggcatccgtcgtctccggcacccacagcaggctggcgtgctccagcagccgggcgtgcatggttttcagggccgtcagcaggttgctgccgtcggaggtgcttggcaggatcatcatcattagcccgccgcataggatcccgacgatgacttcgcagacgcgcgactgggcgatgacccacagttcgtagctgtcgctgatgttaatcaccggaaaggcgatgatggcgcaggtatagcccgccagctgaaaggcgtaggcgacgttgttggtgaacagggcgcaggcccaggtgcagagcgccagccagccggagatactgaacagaaacagccagggatcgttgagtgtatgaccggcaagcagcagggcggcgcaggcgccgagcaggctgcctgcgatgcggccaaaacttttactgatcacgccgccgacggtgggaaagctgaccaccgccgcggacgtcatcgcccagtagggctcatcaagatccagcgcataggcgatactcagcgcaagacacatcgcgatgccgttgcgcaatgcgtaccgccactgcggccgggtggctttaacccaggggagtgcgcgccacgacagggtctgcaggttcattactgcccgccaattgagacagtgcaggtggtgccggagaccagggtgacatcggccggcagcgtatcaaaggcaattcgcaccggaacgcgttgggcgagacgaacccaggggatatttggtttgatgttggccaccagcccggttccctgttccacgctctggtcgacaatcgcgcggccgatgctcgcgacatggccctttagcgtctgctgattgctatagagaataatttgtgccggatcgccgatgcgaatgtggcgcagtttggtttcttcgaagtagcccagcacgtaaaacgagtggctgtccaccagggcaaagaccggatggccggtggtagcgtaatcaccgacgcgggtggaaaggttagtcacccagccatccaccggcgctttgacaaccgtctggctgagctgccactgcgcatgtttcagcgccgcttcggttacgccgacccccgctctggcggcagccagggtggtggtggcggtattcagggcggtattgacgttctcaagatcttcagccgagatggcattttgcgacaggcttcggcgacggcgagcctcgctggcggccttgctttgctccgcctgcgctttcgccacctccgcctgggctttcgccagctgcgcctgggcgttcagcaccgcgatgcgatagggggtgtcgtcgatggtaaacaatacttccccggctttgacccgttggttatcggttacgttcaactgcagaatactgccggagacctgaggggtgatcccaacctgctcggcgcgcactttgccgtcgcgggtccagggtgactgagtgtagaaattccataacaaccatgcggcaatcagggcgacggccgcgaccagcagcgttgacagatattttaatcttttcataacagggagatcaccaggcaatgagcaataccagggccagacagaccgagagcgcgaacagggagagatccattagtagcgggtgccagatgtcgcccgcatacatccagtcacgcagctggcgatgtaaaaacaaccagataaagaaacccaacaagacggctttgaacagcggagggaaatagacggatgcgccgaacaccaggtcctgcagcggcaatccggatgtgttaagactcagtttcacaagcaaaaatcctttgccattacaggggtaacctcaggacgtgctactctttaacagtgtaaatcattgttttggtttttgttgaatcaagtaattcatttgttttgataattcaaatgctgcacactattctaaaatcagtataataacttagcaagctaattataaggagatgaaattggaatcgccacttggttctgatctggcacgtttagttcgcgtttggcgcgcgctaatcgaccatcgcctgaaacctctggagttaacgcagacccactgggtcacgctgcataacatccaccagctgccgcctgagcagtcgcagatccagctggcgaaagctatcggtattgaacagccgtcgctggtgcgtacgctcgatcagctggaggagaaagggctcatttctcgccagacctgcgcaagcgatcggcgggccaaacgcatcaagctgacggaaaaagccgaaccgctgatcaacgagatggaagaggtgataggtaagacccgtgatgaaatcctctcaggggtctcgaagcaggaagtggaaaccttgctccacttaatccgtaaacttgaacaaaatatcctcgatctccaggctaaagattaattctttgcggcccgggctaatccgggccttttttcaccctccctgccgatgccagacgatcacctggttacgtccgttattctttgcttcatacatggcttcgtccgcgcgctgaacgcacgcttccgctgtcacgctattgtcgtaggtggtatacacccccatgctgatggtcattcgctccggtaaatggctctccccggcactgaccgccaggcggatacgctcggcgatcgcttgcgcttctttttcaccggtgttgaccagcagcagagcaaattcctcaccgccgatgcgtgcggcggcgtcatctacccgcgaatggctttccagcaccgaggcggcgaactggatcactttgtcgccggcgacatggccgtagctatcgttgatgcgtttgaaatggtcgaggtcgctgatgagcaccgacagcggatgctgggcattcaccttcgccagctgttggttaagagtgtcgtagaaaaagctgcggttgtagaggcgggtcaacgggtcgcggatcgaattctgatacgaatggacatatttgtggttagactcgcgatagaggataaagacgtcaaccagtagcaccagaatcaggaacaaggtgcatagcgtttcgaaaaaacgcgcctggtaccaggtctgatccagctcccctgcggtggagagcagctggaaaagcgtgaacaaataagcgctgcaaaaaaaagcgccgctgaaccaaaaaatattacgcagtttactcaagctaattaataaaatcagcgtgatgaaccaaactgccatcagcagccagccgataatactttgccacaacggggtaaaggtatggctcagatcgtcgataaaattgacgctcagccacggcgaatggctggagtatagccatgataaaacaataatggtcaacgtaaaaagtatacatgctgtaaatgtaagaacgtgtgctttccacgaatgcatgatgcgctggcgaaaatagtacaaaataatagatgacatgaataacacagccatcattatattgcggaagaaataatagataacggcgtcattttgattaacgaccggggccggattgcaggtaagccagtccggatagctgctgagcgtgccaagcatcagcagcgctgagcaggcaaacccgaaagagaccggtgtaaggtagagacgccgcttgctgctccagtatttcatgcccataaaacaggcaatggtaatatgaaaaaccatcaggaaactggtcagcagcggaaataatattgaggaagtactactgaagctggtatgaaaaaacgcagtcatcccggaaatgccaatcccggccagtaaacaaatgcaaatataaaggattagacgtttgacgatatgatgcacatgttcgggcataggcaatattccacataaaaggcaacggcagcgacgatgagtcaccagggctaatttacgttcttgagggtaataggggcgggcagataagatattgcgcaggcgcaatgattcatggaatattaaagtaaagatgtctgatggttactacgaatttattacggcgaaataaacgtggctgaaaaatacgatgcggcgcaaccggccgcatcgtaagggaaattatcgcggagagacggtgacctggctgccgctgccggcaatggccacgcgctgaccaacggagaacggagtgctgccctgtttctgcactaccataatggtattgccatcgtccttacggatttccagttcaacgccctgcgttttattcatcgcgccctgaacgccctgaccggctacgccgcccgcgaccgcacctgccgccgtagccagagagcgtccggtaccgccgccgatggtgtttccaaggaacccgcccagtaccgcaccgccaatggccccgatggcattgctatcgtcgccgctctggatctgtacggcgcgcgtatgcacgatagtaccgtaagtcacgctctgcacctgtttggcttcagatgcggaataaacgtcgccggacaggccgctgctgctcacgcagcctgcgagcgtaaaaccaatcatcgatacagccaaaacacgtaaaatcatttatgaatctcctgttcaccgaaggtgttcaattgaacgtccatacggttaattatatggcatttagtcgtcggcgggcataggttctccctggactatacaaaaaataataaacactggtgcttcaacctcaactaaacgccggttctttacgatgttctctgatttgtcgctctattgttaaaaagtattagtacaacatagcattaaccgacactttatgatggagtgaagggcatacaagggtcatggaatgaaggaaaacgtatgagatcgggtcgctttattggcgttatgtctggtaccagcctggatggtatcgatgtcgttttggccaccattactgaaaacatggtggcgcagcaggctagtctcacctggcccattccacacgcgataaaagaagagattctggcgatttcccaggggcagtcgctgaccctttcgcagctaggtcgtctggacacccgtctgggacggctgtttgccgatgccgtactggcgctgatgagccaggaaagtctcaaacccaccgacgtcatcgccatcggctgccatggacagaccgtatggcatgaaccgcagggagaggctccgcataccctgcaaattggtgacaacaaccagatcgccgcccacaccgggataaccgtagtgggggattttcgtcgccgggatatggcgctaggcgggcagggagcgccgctggtgccggcttttcatcatgcgctgctggcccaccccgttgagcgacgtatggtgctcaatatcggcgggatcgctaatgtgtcgctgctggcgccagggcagccggtgcgcggctatgataccgggccgggaaatatgttgctggacgcctggatctggcgccagaagggcaaaccgtacgacaaggacgcccaatgggctagcgaaggtaaagtgctgctgccgctgctgcaggacatgctgagcgatccgtggtttgccttgccggcgccgaaaagcaccggtcgggaatatttcaattacggctggctggagcagcatatggcccgctatccggggctacgcggggaggatgttcaggctacgcttgcggaattgaccgccgtcaccatcagtgagcaggtattgttaagcggcggctgcgagcgtttgttagtgtgcggcggcggcgcgcgtaaccccttgttaatggcgcgcctggcggcgctgctgccgggaaccgaggtctccaccaccgatgaggcggggatcagcggcgatgatatggaagcgctggcctttgcctggctggcctggcgaacgctggctggtctgccgggcaatctgccctccgtgaccggcgccagcgaagcctcggtgctgggcgccatttttccggctaacccgccgcagaatcggagttaactgaaatcttaaatacgatgcgaccggtaaactggacaagttaagcggagggcggagtgcccgccgtgaccgggaaagtcgaaggcaaacgaatgaaaaaaattcttatcgcagttgtaccttttatgctggcgggctgtagctactacaaccagtttgtcgagcggatgcagacggacacgctggagtatcaatgcgaccagaaaccattgacggtccatcgcaataacgcacgccagcaggtcagttttatctatgataatcagcaactgaacctgtctgaggggctgtcggcttccggggcgcgctacaccgacggcgtctatgtgttctggtcaaaaggcgataccgccaccgtctataagcgcgaccgcatcgtccttgataactgtcagctgcagacggccaaacgttgagatttctgtccggggggcgcacaataacgccaccttatgactacatcctcaatggccatgtctgataacgacgaactccagcaaattgcgcatttgcgccgtgaatacacccgtggcggtttgcgtcgccacgatcttcctgctgaacccctgccgctgtttgaacgctggctgcgtcaggcctgcgatgcgaaacttgccgacccgacggccatggtggttgccaccgtcgatgagcgcggccagccctaccagcgcattgtgttgctgaagcactacgacgaaaaagggttggtgttttataccaacctcggcagccgcaaagcgcatcaaattgaaaacaacccgcaggtcagcctgcttttcccgtggcatatgctggagcgccaggtgatggtaatcggcaaagcggagcgtctgtcgacgctggaagtggtcaaatatttccacagccgtccgcgcgacagccagattggcgcctgggtctcgaagcagtcgagccggatctcagcccgcggcatcctcgaaagcaaattcctcgagctgaagcagaagttccagcagggtgaagtgccgttgccgagcttctggggcggattccgcgtcagcattgagcagatggagttctggcaggggggagaacaccgtctgcacgatcgctttttataccagcgcgagagcggcgcctggaaaatagaccgtctggcgccgtaaacgccgaaattagttatcgaagcgctggcgctgaaagggccggcgctttattctatgtacttttcgcatctggcgaaaggtcgtgtaccggcagaggtgcagtcgtttatacatggagaatttgatggcaagcagtaacttgattaaacaattgcaagagcgggggctggtagcccaggtgacggacgaggaagcgttagcagagcgactggcgcaaggcccgatcgcgctctattgcggcttcgatcctaccgctgacagcttgcatttggggcatcttgttccattgttatgcctgaaacgcttccagcaggcaggtcataaacctgtggcgctggtgggcggcgcaaccggtctgattggcgacccaagcttcaaagccgctgagcgtaaactaaacaccgaggataccgtgcaggagtgggtggataaaatccgcaaacaggtggctccgttccttgattttgactgcggcgacaactcggcgatcgcggcgaataactatgactggtttggcagcatgaacgtgctgaccttcctgcgcgatatcggtaaacacttctctgttaaccagatgatcaacaaagaagcggtgaagcagcgtctgaatcgtgacgatcagggtatctcctttaccgagttctcttacaatctgctgcagggttacgactttgcctgcctgaacaagctgcacggcgtggcgctgcagatcggcggttctgaccagtggggcaacatcacctccggcatcgatctgacccgtcgtctgcatcagaaccaggtgtttggcctgaccgtaccgctgatcaccaaagcggacggcaccaaattcggtaaaaccgaaggcggcgccgtgtggctggatccgaagaaaaccagtccgtacaaattctaccagttctggatcaacaccgcggatgctgatgtctatcgcttcctcaaattcttcacctttatggacattgcggagatcaatgccctggaagaagaagacaaaaacagcggtaaagcgccgcgcgcccagtacgtgctggcagagcaggtgacgcgccttgtccacggcgaagaaggcctggaagcggcgaagcgcattaccgaaagcctgttcaacggtaacctgagcgacctgagcgaagcagacttcgaacagctggcccaggatggcgtgccgatgatcgaaatggaaaaaggcgccgatctgctgcaggcgctggttgattccgagctgcagccgtcccgcggtcaggcgcgtaaaaccgttgcctctaacgcggtgaccatcaacggcgaaaaacaggccgacccggaatatgtattcagtgacagcgatcgcctgtttggccgctacaccttgctgcgtcgcggtaagaaaaattactgcctggtctgctggaaataaaaaaatactgccagggcgtgggaaaccacgccctttttctttttagggttgtggtaagaaaatgaagaacatcctcgccattcagtctcacgttgtgtttggccatgccggcaacagtgccgccgaatttccgatgcgccgtctgggcgccaatgtctggcccctgaataccgtacagttctctaaccatacgcagtacggcaaatggaccggctgcgtcatgccgccttcgcatttgacggagatcgttcaggggattgccgatatcgacaagctccagacctgcgatgcggtactgagcggctatcttggctccgctgagcagggagagcatatcctcggtatcgtgcgtcaggttaaggcggccaatccggcggcgaaatatttttgcgatccggtgatgggtcacccggagaagggctgcatcgtcgcgccgggcgtggcggagttccacgtgcgctatgcgctgccggccagcgatattattgcgccgaatctggttgagctggagatcctgtgcggtcatccggtcgccagcgtcagcgaggcagtggccgccgcgcgggagctgattgcccagggcccggaagtggtattagttaagcatcttgcccgtgcgggtctgagtatggatcgttttgagatgctgctggtgacggccgaagaagcctggcatattagtcggccgctggtggatttcggcctgcgtcagccggtgggcgtcggcgatgtgaccagcggtctgctgttggttaaattgctgcagggggcaagtctgcgcgatgcgctggaacacgtcaccgccgcggtgtacgagattatgctcgccaccaaaaatatgcaggaatacgaactacaggtagtagcggcgcaggatcgcatcgccgtaccggagcactgcttcagcgccacccggctgtaactcccagggcctgcccgacggtccgccgggcaggttcaggccttattttaagccttcagccgccagtgcggccgccaccgccggacgcgctgccacctgcgtcatccagctgccgatatgaccataggcagccatatccagttttatagcataggcccagcgcagcaccgtaaacagataaccatcggcaatggtgaagcgatggccggtcagccactgtttgtctgccagcgctgcatcaacgtattgcagctttttctcaagcagcccccgcgcgacaggcttatagtcctccggggtatccgggcggaacagcggagtaaagcttttatgcagctcggtggccacatagttcagccattcgagagtctgatagcgcgcaatcgagcccaccggcgccagcagatgacgatccggcacctggtctgcgatgtactgcatgatggctacgccctcagtgagcaggatatcatcatccagcagcagcgccggcacctgacctttcgggttgatcagcagatagtcttccccgttttccagccgtttttgggccagatccacgctctgcagggtaaaatccagaccgctttcgcgcagggcaatatgcgaggcaagggaacaggcgccgggtttgtagaacagtttcatgcgtgactcctcgtggctgcagttttctgtatgttagtcctgccaggggtaaaaaaaaagccgctaaactaacgttagcggcttaaaaataattagttttccctgcggcgtcaggcagccgcggtttcgcgtgctttaatgtccgcgctgtcgtcctgagtcatacgattcagtttcggcgcggtcagcagcatcagggcggcgataaccgcggtgacgataccaatctgcaggaatacgtgaccgtacacttccagcgacaccagcggatcggtgacattctccgggactgccatcaggttagcgattttcccggcgatgatcgccgcgcctgccgtggtgaggaaccagctgcccatgatgaagcccatcagacgctgaggaaccagctgagcgaccatcgccaggccgaggccggaaatcatcagttcaccgatagactgcagcgcgtagctcagaatcagccagttgaccgagacgataccggcgtcgctggcgaacttcgcccctaaaggcaggacgaggaatgcgccagagcacagtaccataccgatagcaaatttgtgcggcatcggcaggcggtcacccatcttgttgtagatggcggccagaatcgggctaccaatcatgatccagaacgggttcagcgcctgatactgttccggttcaaaggcgagaccgaggatcgagtgctccacgttacggatggcgaagaagttcagcgaggtcggcatctggctgtacaacacgaagaagacaatcgcttctaccatcagcaggaaagcgacgatcattttacgacgcggagcgcctttcaggcctatggtttctttggcgaaaatcacgacgatacccagtgcgacgacgcccagcaccatacgtgcgataccctggttatgcagcagccaggtggcgatagcgaccagcaccaccacgccagcgatggtcgccagcagtttacccatgtgtaccggggcaaagtccggtttagagccgtactgtttaacccatttctgacagaaggcgaagttaataatggtgatcaccatccccaccacgctgagggcaaacgctacgctccagccaaaacgtgcggccagccacggggttgccagcatagagaagaacgaaccgatgttgatggacatgtagtacatggtaaatgcaccgtccagacgtgggtcgtttttgtcatagcaggtagaaagcagggaggacgggttggctttaaacaggccgttaccgacggcgatggtcgccatacccatatagacgatagcggcgtcatggccggaccaggccaccagcgcatagccaatcgccagcacgatagcgcccagcatgatgacacgcgtggtacccagcactttatcacccagccagccgccaatggcgacgaggccataaaccagcgcgctaaaggaggagaacagagtaatggaatccgcttccgacatacccagctgttttaccaggtaaacggccatgatcccttgcaggccgtagtaaccaaaacgctcccacaactcgatcgagaaaatgagatagaacgcgcgtggttgtttgaaagcgttcagactcacgctttctgctggtttattgtttgcagtagacacatatacctctttttttacatcccatatttactggggggtgttcggggcgcaatctcgttggaccgccgcctttatagttattcttggagggaaaacggcaagtaatgttcactatcctggcgcatcaggcaaggcttttgtaataatctgttacacataatcagggtggtataatgctccagacatatgaatgttatacagcgttaaattttaccgtttcgatatcgttggtatttttatctttcgggttcgccggtttgccgtgaaaaggcgatatattctactgatctggcgtaagcatagtgatatggtccattatcttaaaaaatcatgggtcattatcctgacaatctttactcatccgttgtattgcctgacatttatttccattccagtaacattcaatcaacataaagttgcgagcatgatctggatcacaaatgcatagaaattttgcgctgataaaaaatgaatgaactagttgtttgttatataaccggataatcatccataatcatgatgattatgtggtgttaatggccggtgaaatagatgaatgcgggccataacccagagttaagctatgaccgcaatagagacgagacagtcaggcgtagactttatctttgtattcgcaaagatcttcaatcaggcaggagccgcagcgcggcttgcgggcaatacaggtataacgcccatgcaggatcagccagtgatggcagtcgaccttaaactcggcggggaccaccttcagaagcttctcttcaacctgttcgacgtttttcccgggagcgaattgcgtccgattgcagacgcggaagatgtgcgtgtccacggcgatggtcggccagccaaaggcggtattcagcaccacgttggcggttttacggcccacgccgggcagcgcctccagcgccgctctgtcttccggcacctcgccattgtgctgctccaacaggatgcggcaggttttgatgacgttttccgctttgctgttaaacaggccgatagtcttgatatacgatttcaccccatccacccccagggccagcatcgctgcgggcgtattggccaccggatagagtttggctgtcgctttgttgacgcttacgtcggtggcctgcgcagaaagcaggacggcaatcagcagctcgaatggcgaactgaaatgcagttcggtggtggggtggggatcgttttcccgcagcctggtaaggatcgccaggcgtttggctttgttcatattatgctttccctgtcacgtcggacggggcgacagagacggcccgggccgcttgcgccttccgctgtttgctacgttcatcgataagggatttaatcgccagcatcatgccgaggccaataaaggcgcctggcggcagcatagccagcaggaaaggggtgtccgtatggaaaacctcgatgcgcagcacctttgcccagctgccaagcaggctgtcggcgccgtcaaacagcgtgccattgccaaggatctcgcgtagggagcccagcacgaacatcgcgccggtggcccccataccgatagagaaaccgtccagcgccgacagcgccggcccttttttggcggcaaaggcttctgcacggcctaccacgatgcagttggtgacgataagcgggataaatatccccagcgactgatacagaccgaacgcataagcgttgattagcatctgcaccacgctcactaccgaggcgatgatcatcacgtaaatcgggatgcggatctccgccggggtccagcggcgcaggctggagatggtcaggttggtcagggtcagcaccagggtggtggccaaacccagcccgagggcgttggtggcggtcgaggtgaccgccagcagaggacacatacctaacagctgaaccagggcggagttatttttccacaggccctggacgatgacgtctttaacttcgctcatggttattctccacaggcggtgaattcaggaagttgcgcaggcagcgtttgtgcatataagcctgcgcgcttaacggcattgaccaccgcccggggggtgatggtggcgccggtgaactggtcaaaatcgccgccatcctttttgaccgcccagtggctatcgccctggccgtggatgactttcccggcaaaatgggtaatccagtccgacaggcgaagttcgattttatcccccaggcccggcgtttcatgatgctcagttacgcgggtgccgaggaccgtgccgctaaaatcggcggcaaccagcagctgtattgctccggagtagccgtccggcgcagtggcttccatcaccgcgccgatcggtcgatcgttatttttggcgatccacactttatgctggcctttgcccagcgccggggcgctgaccagatagcagctcttaagcagatcgttattatagcggtcggcaggtaaaacctggtcgaataacgccttttgctgcagggccgcctgctggtcgatggtgcttttggtcagctcattgatcgccgccgtcagcccggtggaaccggcggcaaacagcgccagcgtgacgccgtgtttacgcatcgtttttaacatcattgctctctcaacggtggccatatacgcgcgggcgcgtgtagtaatcgatcagcggcacggtaatattcgccagcagaacggcaaacgccacgccgtccggataaccaccgaagctgcggatgagccagaccagcaggccagcgagggcgccaaagatcagacggccgcggttggttgttgaggccgtcaccggatcggtcaggataaagaaggcgccaagcatggtcgccccggagagcaaatgcatctgcggtgaggccaggctctgcggcgaaaaaacccagccgagggtggcgcacaggccgaggctaacaaggaagctgaccgggatatgccagcggatcgccttctgccacagcaggaaaaggccgcctgccagccaggcgatattcacccactgccagcccagacctgccagcacgccgccgtagaccggcaattgcagcacctgctgaacgctatgtccggcatgcagggaggttttaaaggtatccagcggggtggcctggctgacgccgtcgatacccagccgcagactggccatgtcgcctccggcggcggtatggctggtgaagatcatctgcagcgcgtcgctgaatgccgggatatgggcggctatctcataggaaggcagccaggaggtcatctgcaccgggaacgaaatcagcagcacgacatagccgatcattgccgggttgaaggggttatggcccaggcctccgtacaactgcttggcaatgactacggcaaaggcagtgccgagcaccaccatccaccacggggccagtggcggaatactcaccgccagcagcaggccggtgagcagggcggaattatctttcagcgtggcagcaacaggctgtttacgcagtttgagaatagcggcttcggtcgcccaggccgtcagggcggcgaggacaatctgcagtacggtgccccagccgaaaaaccaggtctggaccacaatgccaggcacagcggcgagcagcaccagcagcataatacgcgaggtctgccgctggttatgggtatagggggagcttgcgattctgaaaaccatttattcctcgttaactgcctgctgtgttgctttacgcgcctgaacgcgggcgatagccgcggcgacggccgctttgcgcgggtcgtcattggctgcggctgacgcgagatcctgttgtgtggcctgctgttcggctttacgcgctttggcgcgggcgatggcggcttccaccgccgccttgcgcgggtcgaccggatcggcggccggggcgtccaccggcgcggcctgctgttcggctttacgcgctttagcgcgggcgatggcggcttccaccgccgccttgcgcgggtcgaccggttcggcggccggggcgtccaccggcgcggcctgctgctgcgctttacgcgcccgggcctcagccttacgcgcttcgcgggcggcaatcgcctcgctgttgtcaggtttggcgccggcctggatcacgatcggctgcgcggcatcgcgctgtttatcccgtacccgggccagggcggcgctaatcgcctcctgatctttggcggcaggctgaacggcggcttttttatgccgctcggcgcgcgcggctttctcacgctccaggcgcgcctgtcgggcctcgaatcgggctttggcttccgcagcgcgctgctcttcctgacgaatcgccgctatctcggccttttcctgacggaagtactgcaccagcggaatattacttggacatacccacgcgcaggcgccgcactcgatgcagtccgccagattatgggcagtggctttatcgtgctgctgacctttgctgaaccagtacagctgctgcggcagcagatcggccgggcaggcgtcagcgcaggcgctgcagcgaatgcagcctttctcttcctgcggttcgcccatctcgctggcggaaggcgccagcaaacagttggtgatcttcaccaccgggacgtcgagccacggcagggtaaagcccatcagcgggccgcccatgatcaccattggctcggcgctggggcagaagccggcatcgttcaatagatggcgcaccggcgtgccaagacgcgcccagacattgcccggtctggttaccgcttcgccggtgagggtgaccacgcgctcggttaacggctcaccgtcaaccaccgcgcgtttcaccgcataagccgtaccgacgttctgcatcagcacgccaatgtccgatgaacgaccgccgtgcggtacctgtttgccggtgagaatttgggtgagctgcttggcgccaccggagggatatttggtggggatcacgcgcagcgaaatgccatgggcgtcgcagagcaccgcccgcagcattgagatggcctgcggcttattgtcttcaatgccgatcagcacttcttcaggctgcagtatatgagcgaggatgcggataccctcgacaatctgcgccgcgcagtcctgcatcaggcggtcatccgccgtgatatagggctcgcactcggcggcgttaatgatcagcgttttaattttatctccgccaccgcgcagtttactgccggtggggaagcctgcgccgccgaggccagcaacgccaaactggtggatacgctcgatcagcgcttcacgcgtgcgggtctgatagtcgctccagccatcgcgctcgatccagcggtcttcgccgtcggcgtcaatgatcacgctcatctccgccagagccgacgggtgcgcggtagtgtgcggagcgatggcggcaatggtgccggaagtcggggcgtgaacgggcagcattcttccccagccgcgggtcagcggctggccgcgcagcacccggtcgcccactttaacgcacagttcgccctcggcgccaatgtgctgcttcaacgggataacaaagcgctgcggcagggaaacctgacgcagcggggtgccgttagactgggttttcatttcaggcgggtgaataccgccgttgaaatcccagaccttgtcttttcggaaagcggaaaatagcttaaacatgttgttccacaggaatatttcgcaccgggatcgtatgcagatcccatttccaggtctccggggtggtggccaccggaacgagtgaaatgcactgggtcgggcagggggcgacgcacaaattgcagccggtgcacaggtcgctcatcacggtatgcatggcgcgggtcgccccaacgatggcatccaccggacaggcctggatacacttggtacagccaatgcagttcggctcgtcaattaccgcgagcatgcgggccggctccgcttcctgtgcgtcgccgtcgacaggctgcgggtcgacgttcagcaaggcggcgatttttaacatcaccgcttcgccacccggcgcgcagcggtttattttctcaccctgtacgccgactgcttccgcataggggcgacacccagggtacccgcactgcccacactggctctgcggcaatagctcatcaattttttccaccaccgggtcgtcctgcaccgcgaaacgacgcgaggcgtatcccagtattaagccgaaaatcagccctaacaggctgatggcgatcacggctatccagactgcgctcattacaacttcaccaaaccactaaagcccatgaaggccagagacattaaaccggcggtaatcagcgcgatggcattaccgcgaaacggcgcggggacatcggccaccaccaggcgttcacggatcgccgcgaacagcaccattaccagcgagaagccgacggcggcggcaaagccgtacagcgccgactgcaggaaattgtggcccagattaatattcagcagcgctaccccgagtacggcacagttggtggtgatcagcggtagaaagatccccagcaggcgatagagcgccgggctggttttacgcaccaccatctcagtaaactgaaccaccacggcgataaccagaataaaggccagggtacgcaaataaaccaaatttagcgggataaggatccaggtatcaatcagccaggcgcaaatagaggccagggtcatcacgaaggtggtagcgagccccatccccattgcggtttccagctttttggaaacccccataaacgggcacagaccaagaaacttcaccagaacgaagttattgaccaggactgtaccaataaagagcagtaaataatcagccatcatgcgacctgaaacgaaaaaaagccgcttattatcgaataaaacgataccagcgacaacaggttaagtgtgggggtattacggattaacaaaagtccgttttacccgctgcgaacggcgaaaatagggcgccagcagcgcagcggccagcagcggaaacagcagctgacgcagggcaagcacatccgagaccggcgagaaggcaaaagcctttatcgccagcagcagggtgatgagcagccagataatatagtgtttcggcaccaccgagcgccgcttgaaaaaggcgatagtcagccagagcgtgtaataccacatggcgagtgcaaacagcagcgaggcgacccacagcgccatatggcccgcgctcatggcgcgcagtagggtataggtctgcggcgacatcagcgcattagcaaaaaacagcagcgataacgaggcgctcagcagcgccaccagcaaccaggccagcggagccagcagccatccgccgatgcgctctgcagattgagacgtcatgtttctcccctattcaacgccagtgaataaaatcaggccgggaagtataagcaactggcgtgaaggatgacagccttactgcacgaatcgccaaacggatttaggaacctggcccacatcgaacaatttaccaccggagaccagctctgcgcgacgatgatcggcggcgcgatacatattcacgatctcctgggtgtcagtcagggagtagttaaggtgatcaaatagtttttcaaggctttccagcgaactgattttgcgaaattttaataagtagtccagcacggtcattttcgtatccattttataatcggaattattgcgttgaatattatcagcattcactaaacctactctcaaccaacggcgccttctgctggggccgcgtggaatgaatcaggttatataaacccatgacaaggggcaaagccagccttgaagagcagggagaagtttaagaatattctaaaatcagaccgggcgccgaatggcgcccgcaagagaagattaacgctgttcgccgtgactggcaataacagatttgtaccaataaaaactcttctttcgtttccgcgccagattttgctggtgatcgacatagacaaaaccatattgcttttgatagccgttgagccagctcagcagatcgataaatgaccaggggtaatagccgcgcacatctgcccccagcgccagcgctttttcgagggcgctaatatggctgctgagataatcaatccgcgggtcgtcgaccacttccccgtcaataatcgggtccttcgcgccgaggccattctcggtgatatatatcggaatatcgccatagcgcgccttaatcatcataatgccgtcagttagcccctgcggccagatttcccagccccattcggtatatgtactctggggattacgcacgaaatagaataatccctccacgccaggctcgccgccggtagcgatctcaggcggctgggcagataccgtttcccggcgatagtaattcagaccgataaagtcgcagcggttgtcacggagcagcgcgtcgtcgcctggagcaaagcgaggtaccccccacagcgcctgggtctgcgccagcaggtcggcaggataggtgcctttcagcaccggatcgtacagccagtgagtatggatggcgtcagccagttcggtggccttaatgtccgcctcgctgtcggtgagcggggtatgcggttgcagtacgttgacgaagccaatctcgccggccacagccatctcgcgaaaggccttcaccgccagcgcatgggcgacaaacacgtggtggcaggcctgaatggcacgcgccggatcgcggaccgccgggggatggaggccgttaatgtagccgtgcccaatgaagacaatggtttcgttgaaggtagcccacagcttcacccgtgaaccaaagcgcgcatagcacaggcgggcgtactcggcgaaggcctcggcggtagtgcgcgcttcccagccgccctcatcctgcagggcctgcggcagatcccagtgatagagggtgatcatcggctcaatattgtgcgccagcagttcgtcgatcagatcgctgtaaaactggactcccgcttcattcaccttaccgcgcccggcgggcagcaggcggggccaggagatggagaatcgatagctttgcaggcccatctcggccattaacgccacgtcttcgcgaaaacggtgatagtggtcgacggcaatatcgccggtggtgccttcaaaggtggtacccggcagatgagagtagatatcccagattgacggtcctttaccgtcggcgtcgtgtcctccctcaacctgatacgctgcggtagcggcaccccataagaaattgtgcggaaaagcggccatgaaaaagctccctgtctgatgataaagggagtgtaataaaaccgcgaacatatgtgcaaccggtttctgaaaccggttgcacagttgcgaggcgggtcactgttttaacgcggagctacttcgtgtgcaccacatccgctggcggtggggactgatagttatctatatggtgtgcgataaccaaaagcagtgccgaaataccaaaaacaatccagccaataagttctacaatacgggtaaaaacagttgtcataacacttcaatatcctttgaacacagcgtgaaatgttactcgatggtcagcagatcacaaggggtatctgtctgatttctcacacttgcatgtaagtcgcaaagtaaggaatgataagttttgctcacggtttgtaaaattattctcattaacctggtgttgatatcagttgcataagcgaggcggtaagatgagcgatgcgatccgggtggggctggtggggttcggttacgccagcaaaacgtttcatgcgccgttgatcggcggcacgccgggtatggcgctgaaggcggtcgccagcagcgacgccgataaggtccatgccgattggcctggcgtgaaggtaatgagtgcgccgggggatctgctggacgacccggatatcgatctggtggtcatcgccaccccgaacgacacccactttccgctggcgaaagcggcgctggaggcgggaaagcatgttgtggtggataagccctttaccgtgacactgtcacaagctcgcgagctggaaagcctggcgaagcactgcggtcggatactttcggtgtttcataaccggcgctgggacagcgatttcttaacggtcagcgcgttaatcaacgaaggtcagctgggggaggtgtgttacttcgagtcgcatttcgatcgcttccgaccacaggtgcgccagcgctggcgtgagcaggcgggtcctggcagcggcatatggtatgacctcgcgccgcatctgctcgaccaggtcgtggtgctgtttggcctgccggtaagcatcacggtggacctcgcgcagcttcggcccggcgcgcaatccaccgactattttcacgccgtgctggcctatccgcagcggcgggtagtactgcatggtacgttactcgccgccgcggagagcgcgcgctttatcgtccacggctcgcgggccagctatattaagtacggtcttgacccgcaggaggagcggctaaaaaacggtgaacggctgccgcaggaggactggggatatgatatgcgcgacggtaccctgacccgcgccgaaggggatgaacgtagtcaggagaaatggctgacgctaccgggtaattatcccgcctactatgccgctatccgcgacgcccttaacggcgtaggggaaaacccggtcccggccagcgaggcgattcagataatgaccctgattgagttgggtatcgagtcggccagacatcgcgccacgctcagcctggtctgaggaggagcccggcagcacggctgccgggccggttatcagcctttggcaacccgctgaatgagggcggctttttcctgttcgccgaggaacgccagggtcaggccgttgatctgcgcctgacggatctgctcccggctcagccctgccgccggcgccgccacggtatactcgtgaatgatgtccacaccctggaccgccggatcgtcagtgttgaggctcgccagcacgccgtgctcaaggaactgcttcagcggatgctgggccagggaggccacggtgctggtttgcacgttcgaggtcaggcaggattcaatcccgatgcggtgctcggccaggtagtccatcagggctggatcctctaccgctttaaccccatggccgatgcgctccgcgcccagctcacgaatggcctgccagatactttccgggccggccgcttcgcccgcgtggacggtgatatgccacccggcgtcgcgagcctggttaaaatggttgcggaacagcgtacccgggaagccgagctcatcgccggcgaggtcgagggcagtgatgccctcgcggtgggcgagcagcgccgccagctcttcctgacaggcggcttcgccgaaggtgcggctcagaataccgatcagccgggcgtcgacctggaaatcgcggcatccctcttgaaccccggcaattaccgcctctaccacgccgtcgaccggcagccggtgggtcatcgccatatagcggggagagaagcgcagctcaacgtagtgcaggccatttcgcgccgcgtcttcgacgttctcatacgccacgcggcgacaggcttccagcgaggccaggacctttaccccccagtcgagcttggcgaggaaactaaccagatcgggctcaaggctggtgacctggacatgaggacgcagcgtgtcgagggtggttgcgggaagagcgatattaaattcgcggccaagatcgaggatggtttgggcccggatgttaccgtcaagatgacgatgaatgtcggttaatggcaatgaggaatcaatcatggtcgcactctttttttagttaaagtgcacgtcattatacaacatgaacataactgtttaaaagcattgaaaaaatgtatgcgatacaaatagctggcagcaatcaggtcagcattacggtctttttgactggcccctttaaaacgcagaacgaatatcatgattgacgcgatcctgaccagatcagaaatgcacacgcgctgaccgcggcgcccgcaaggcagaccgcctgccatccccagtgggaataaagctgtgtggcaacgatagcccctgtcgcgctgcccagcgaataaaaacacatgtaagccccaaccaggcggcttgccgctgcaggcctggcggcaatgatcaggctctggctggagacatgaacggcctgtaccgcaaagtccagcgcaatgacgccagctatcagccaaagcagagaggtttcggcatagccgataggaagccatgagatggtcagcagcgccagcgccaggccggtagtgcgctgagcccatccctggtcagcccacttgcccgctctggcggcggccagcatgccagcgaagccggctaagccaaacatccccgtctgggtgtgcgagagggaaagggcggtgagcggcatgaccatggtcgtccatagcatgctgaaagcggcgaagataaatagcgccaggatcccgcgctttctcagttgcggctcggtgaggtacagctgaaacacggacttcaataaggaaaggtaagtcggcttttgcggctgcggctgctgcgggggcgaaggcatgattttccagacgacccctgcaatcaccaacatcagacaggcagccgtgagatacacggctcgccagccggcgatatcggctatcgcgcctgagataaaccgagataacaggatacctgaaacaatgccgctggtcagggtacccaccgcctggcctcgtttctgcggcgtcgccagtactgccacccaggccaccagcacctgcaccaccacggccatcaggccgacgatcagcatggcgccaagcagcgttgctatattgggggataaccctgccgcgactaacgccgctactgaaagcaacagttgactcatcaccacgtatttacggttcaaccagtccccgagcggaaccaggaacagcaagccaatggcatagcccgcctgcgtagcggtgatgacgctgccaatcatgcctggcgacaccttcaggctgaccgccatcgagtcgagtaaaggctgtgctgaataaacattggctactgccagcgcgcaggttagtgaaaacaacgccgttatccctgtggtcagcatcgtgtcagggactgacgcagtttggatcctttggccggtacatctacttgccttacatttcataagagaccctctgtctggttgctttttaaaactagtgtacctatagaattagccttgctggtttttttttgcaactggtaaaggtgaggattaagctagatcagtagataaattgataaggagcgcgcagatggcaaagcaggaatcacttagaaccagtgagtgtccggtggcgagaacgttggaatcaattggtgaacgctggtgcctgatgattatccgcgaagcatttgacgatgtgcggagattcagcgagtttcaaaaaaatttggggctggccaaaaatatccttgcctcgcggctgaagcatctggttgatatcggtattttcgagattttaccggcatcggatggcagcgcatacaaggaatatgtcctgactgaaaaggggcgctccgtgtttcccattgttgtggcgctgcggcaatggggagagcgttatatgtttgagcaaggggaaacctattcggtcctgctggataacgcgcacggccagccccttcagtatctggatgtgcgttccgctcagggggataaactgcaaccaggcgactgtcatcgccggcgcattgtgtcagatacccgcgccgaataatggcgtgaagaatttgcaggataccagcgagaatacgagcgtaccgctaaagggtcatggaacaatcctgacgtgtttttttgcgaactgcttttgatgccaaagctccggacgcgtgaaagtgacccaccgccaaccgcaggaggcggtgcataaccatttacaattatattttatttgaatgtattcatgttacatattaaattctgcttactttatcgacgatgaggcaaggatgcggatgtggagagcgtaatccataacaatattgagggttttctgctgttgttattaagcatgtggccgattctgctggtggtattcattggcgtcgcaatttcattctataccatgctgttacgcaagacggcgctggcctgcctgcttttcgccctcgccatcggcgccgcaggctggagtctcgcttagccgctggcctcagggtttatccagcaggctcatactggaggtggcggcgccatcattcagattggcgggcgaatgccagtcgcgacccgccagcgcactgtcgctctgtccgctgccgacgccttgctgcgtcgacagcgatgaaccttccagtgcttcatccgcccctgaccgatcgggcagggaactggtatagccgccattattcgagtacgtatccatgccgttgacttcgttaggcaccgtgtcggtagtcgtaccgtcatcgttaatgcaaaaagagccgccaatgccgtttggctgacagtctgcagcaaaagccggactggccagcgcggtcagtagcaataacggtaagccgatttccttcattcttatctcccagggccgtgtggtctgccagacattctgtactatagcggcggcagtagcgcggtaagtaacaaaactgtgtaattttgtaatgaccggtggacggtttgtcgttcggccaggaaagagcgtgcgttaagcgtggcatagcggctcggcagaaagcggtaatcaattgttaattctacgtaaaggttaatgaaaatttaagggaacgccgctatgttggcagcatcatactttccataaaggatatgccatgcgcgataaatattccggcctgcagattgggattcactggctggtttttttgctggtagtagtagcctatgcggcgatggagctgcgcgggttttttccccgcagtgagcggccattgattaatatggtgcatgtttcctgcgggatcaccattttcgtgctgatggtggcgcgtctgctggtgcggctgaaatcgccggcgccgccgatcgtaccgaaaccatcgccgatgatgaccggtttcgcccatcttggtcacctggcgatctatttgctgttcattgccttgccgttgatcggcatggtgatgatgtactggcgcggtaacccctggtatgcctttggtctgaccatgccgtatgccccgcagagcgattttgagcgggtggataccctgaaggcgatccatgaatggttggccaatgccgggtactttgtgattggcctgcatgctctcgccgcgctgctccatcattactggtggaaggataatactctgctgcgaatgatgcctcgtaagcgctaaatcatcctctttcacttcctgaccccgtcccgcgacggggtttttttttgccttcaccgttaatagaatatagtatacccccctatatgatacggaggcgtaatcgtgccacattcacctgaagataaaaaacgggcgctcagccgcgtaagacgcatccgcggccaggtcgaagcccttgagcgcgcgctggagtccggcgagccctgtatgactattctgcagcagatcgcctcgattcgcggggcggcgaacggcctgatgggcgaaatggtggagatccacctgcaggacgagctggtcagcggcgacaccacccctgagcagcgggccgcgagaatggcagaggtcggtcatctgctacgatcctatttaaaataacatcacgacgaggaagagacagttatgaaatcacgcgcagcagtggccttcggccccggtcagccgttaaaaatcgttgagatcgacgtcgcgccgccgaaaaaaggcgaagttctggtgaaaatcacccacaccggggtgtgtcataccgatgccttcaccctctccggtgacgatccggaaggtgtcttcccggcggtgctgggccatgagggcggcgggattgtcgtggaagtaggcgagggcgtcaccagccttaagccgggcgatcacgtcattccgctgtataccgccgaatgtggcgagtgcaaattctgtaagtcgggtaaaaccaacctctgtcaggcggtgcgtgccacccagggtaaaggactgatgccggacggcaccactcgtttctcgtacaatggcgaaccgatctatcactatatgggcaccagcactttcagcgaatatacggtttgcgccgagatttcgctggcgaaagtcaatccgcaggcgcctttggataaagtgtgcctgctgggctgcggcgtaaccaccggtatcggcgcggtgcataacacggcgaaggtcaaggccggggatagcgtcgcggtctttggtctgggcggcattggtctggcggtgatccagggcgcggtgcaggcgcaggccgggcgcattctggcggttgataccaacccggataaattcactctcgctaaagagatgggcgcgaccgattttatcaatccgaacgactacgataagccgattcaggatgtgattgttgagctgaccgacggcggggtggatttcagcttcgagtgcatcggcaatgtaaatgtgatgcgcgcggcgctggagtgctgccataaaggctggggtgagagcgtgatcatcggtgtagccggcgccgggcaggagatcaagacccgtccgttccagctggtgaccggccgcgtgtggcgcggttccgccttcggcggcgtaaaagggcgcagtcagctgccgggcatggtggaagacgccatggcgggtaaaattcgcctcgatccgtttattacccatcgcctgccgctggagcagattaacgaggcctttgatctgatgcatgaaggtaaatcgattcgcaccgtgatccactttggcgaccagtaatcgccgacgctgaaggcgaatcgtcacccataaaaaagggcccggatgggcccttttgtgtatgtcgatcagtgatggtctgggagcgcgtaggcgatgatgtaatcgccgcgatccggtgactggcgggcgccgccggcattgataatgatgtactgcttaccggttttcggtgagacgtaggtcatcgggccggactggctgccgaccggcagacgcgatttccagatctctttgccgttcgcggtatcaaaggcgcgcaggtagaaatcctgggtgccggcgaagaacagcagtccggactgcgttgccagcgatgcgccaagggtcggcatgccgattggaattggcatgtgcatacgtatgcccagcggcccggtgtcttctacggtgccaactggcacctgccacaccagtttcccggttttcagatctaccgcggacatggtgccgaacggcggcttctggcacggaatgcccagcggcgacaggaaacgttcgcgcatcgcgccaaacggcgtgccctccatcggcacgatgcccatctcgatcccgctggcgtctttcgccaccttcgcgcgcggcaccatatagttggccaggcccagacgcatatcgttgacaaacatcaggctgttgtttggatccagcgaaacactgccccagttcatgccgccgagcgagcccgggaactgcagggaacgatcttcacctggcggggtaaagacgccctgatggcgcatctctttgaactgaatacggcacagcagcaggtcgatcggtgtcgctccccacatatcggactcggtcaacgtctggttgccgatcatcggcatccctaccgagtaaggttgcgtcggcgagtagcgttcacctttgacgttgcccgccggcaccggacgctcttccactttggccaccggctcgccggtctcgcggttgagcataaagatcatgccctgcttgctggtctgcaccagcaccggggtggtgccgcccttgccgtcaggcagatcgtacagcagcggctgagacggcaggtcaaagtcccacagatcgtggtgtgtggtctggaagtgccagcgcacctggccggtggtggcatccacggccacgatagaggagctgtatttatcgtccagcgcggtacgttcgccgccaaagaaatctggcgtggcgttgccggtgggcagatagatcagattcagcttcgcgtcataggacatcgccgaccagacgtttggcgtaccgcgcgtgtaggtctggccttccggcggaacaccggtcagcgctggattgcccggatcccacgcccacgccagtttgccggtgtggacatcaaacgcgcggaccacgcccggcggttcgccggtggagtagttatccgcgacgcggccgcccaccaccaccacattgcccgccaccagcggggtggaggtctgctgatagtaacccgctttcacttcacccatgccgacgctgaggtcgacaataccgcgatcgccgaagctttcgcacagtttgccggtatcggcatcaatggcgatcaggcgggcgtcgatggtcggcaggaacagacgacgggaacaggcggccggctgcgtgcctgacgcttgcgcggtttgcgcctggctatctgcgtaataccctaagccgcggcagcgctgccagttgggtgaagaggatttggagtcatagcgccatttctcttttccgctgtccacatccagcgccagcactttactgtaaggggtacagacatagagagtatcgccaatctgcagcggggtgttctgatcttccgcgccggagccgttgctctgcgggatatcgccagtatgcgctacccaggcaacctgcagctggttgacgttttgtttgttgatttggtcgagggcggcgaaacggtcgccgtgggtggtgttaccccagtgcgcccagtttttctgctgttcgcctggcgcgacgggcttgactggtaccgcttcagtcgcgctgaccagcggtgcggatttgaacatccagccaaagctcaccgccagcgccacggcgagaacggcggcgacgccataggccgggccttttttcgccggtgggctggcgaggaaaggccagaccagggcggccaggaaggccagtacgccgagcgcaaacaggcgcgagaagagcggccagtagttccagccagcgtcactaatcgcccagatcaccgaggcgataaacgccacggcgtataacagaataccgccgcggcggttgcggaaaatcaacaccgccgcgatgaccatgaccacgcccatcagcgcgaagtacagtgtaccgccgacgagggccagttttgccccaagaatacccacagccagaccgatgatgagcatcagtccggcgagaagccactgcaggatccgggggaatccgcgcggcgcgttgccagttgccatgtaatctccttaaccacaccagccacctcactgtgaaccaaatgaaacatgttgcttttgaatcatttttgaatgaagtggttttaaccttcataaaactgtatttgttgcttgattagatttcgagtgaaccatttggtgaaatcgagacatgatagatctgttaaagaagtttgcgcaaatgttaataaataatttcgcactaaatgattattttgccgaatatgtctaacgtcatggggagcggcgtcggcgcgtttgcaggttccccggccgctgcgggccggggagaaaggggggtcaggcaggcatggacttacggatagcgctgagcagcgtctgcgtacccggggtcagtgtcgcatcgacgcgggttaaaatgccgatgggctctccggcgccctgggtggcgatcggcagggcggttagcacgccacggcgaagatcgtcttttaccgccccggaagggacaaaccagacatagtcaaaatccaccgtcagctggcgcgacagggaggcggagagggtctcgatgcagccggcgggcatcttacagccctggctctggagcagcgcttcggcgttttgccgcggcacggtgcctttaggtgagaccaccaccggccactccatcacccgactaagggtcaccgtctcctgaagcaggggatgtcccgggcgaaccaccggcttcagggattcaaggaacaacagttcgtaatgcagcccgctcatcagctccgggtcggacatacgtccaatgccgatgtcgatctccccggattttaagccggcgagcagcatggtgttgttcatagtggcgacctgcagcgtgatatctttttgctgcttgtgaaactggccgatcaccgtcggcaggatccccagagcggcggtgggcagcgcgccgatgcgcacgatatcgttattcaggccctctttgcggttcagcgcctggccggccgaattaagggcgtcaagcaccttaacggcatgcgtcagaaactgttcgccgaccagggttagctgcgccccaagacgaccccgctcgaacagccgggtaccggtcagctgttctagctcgttaagcgttttcgagagtgctggctggctcagatttaatgtttcagccgcgcgccccagcgttccctgttgagcgacggccacgaaggtgtgtagatggcgcaagcgaatgcgctgactgaagagaccatttttttccatagtaagatgatgttaaaaacacagcggtgaaagagacaagcggacttgtttaaatttgataaccagatagcaaaatattattaacatttgggttggttacatgacaagatctttccctgtggttgaaaacgccttcgccccgcagaaacggggcgaaggtggtggtcaccgcgacggctaaatatcgaaaaagacggtttcgttctcgccctgcagatgaatgtcaaaacgatagaccacttccgtaccgcgaacctcgcgctcggcgattaaggttttgcgtctcacctcccactcgatgagattcagcaccgggtcgctggcgttggcctcgtgttcatcggcaaagtacatccgcgtattaaggccaatattgatcccccgcgccaccacccacaggttgacgtgcggcgccatcagccggccatcccgaccgaccaccgggcccggcttgatggtttcaaagcgccaaatgccggaggtgaaatcagagcaggtacgcccccagccgcggaaggccgggtcgacggctttctgctgttgacgatcgtcaggatggttatagcgacccgcggcgttggcctgccagatctccagcagcacatcgcggaccggcgtcccggagccgtcgagaacccggccttcaatggtgatgcgctccccggcggtatcggcggtagtgaggaccgggccaaaatttttctcaaaaatatgaaagcctgcggcgtccggcgccaggccgatatgaacatagggtcccgccgtctgcgaggcggtttcaggcagatactctttcatcgggcggccccctgagtgcgattttcaaacagcgtggcgcggtggccgcgcagaacaaggtcgaagcggtaggccagacaatccagcggtacggcggcgtgcatgtccagctcggcgatcagcgtgcgcacggcgtcgtcattattaatagtcctgacgatcgggcactgcttaatcaacgggtcgccttcaaaatacatctgggtgatcaggcgctgggcccaggcgtcgcccgagagagaaaaatggatatgcgccggacgccagtcgctggcctggttgcgccaggggtaggggccgggtttgatggtgcgaaaacagtaatagccgttttcatcggtaagcacccggccgcaaccgccaaaattcgggtcaatcggcgccagatactgatcttttttatgccggtagcgaccgccagcattggcttgccagacttccaccagcgtatttttcatcggtcggccgaatccatcgcgcacgtaaccgtggacgatgatccgctcgccgataggcaggccttctttggcatagttcaggattaggtcattatccagagggcccaggtcgtcgcggctaaataccgggccggtgatctctgacagcgagttctgcagagagatgagggcgttttttggcgagcgcaggacgctggttttatagcccggcgcgtaagcgggcgggtggctactgtaatcgcgatggacaacctcacgtggggaccatttgtcgttcatagggtactccgtgtagacggtagaggggcatattgttgtaatgtcgccagaagcagtgtgtgtaaatgtattgttaatttaaagtgaaattacagggtgtttttcataactatgggttatgttttgcgcaatgacctggaccggcggcaggttatcgccatcacagtttgtaaattcttccccccgccgcgaggcagctttcctacactccaggaagtattcactggaggtaacacatcatggcgaacaccatcacggctgatgagattcgggagcacttttcgcaggccatgtcggccatgtaccagcaggaagttccgcagtacggaacgctgctggagctggtggctgacgtcaacctggcggtactggaaaataatccgcagctgcatgaacagctcgctaacgctgacgagctggcgcgcttaaacgtggagcgccacggcgcgattcgcgtgggcacagcggaagaactggcgacgctccgtcgcatgtttgccatcatggggatgtatcccgttagctattacgatctctcgcaggccggcgtgccggtccactccacggcgtttcgtcccatcgacgatgccgcgctggcgcgcaatccatttcggattttcacctcgctgctgcgcctggagctgattgaaaatcgcgccctgcgcgagcgggccgaggcgatcctcgcgcggcgcaaaatcttcaccccccgctgcctggcgctgattgcgcagtatgaagcagagggcgaattcacctctgccgacgcgcgcgagtttgtccaggaggcgctggagacgttccgctggcaccggcaagccaccgtcgatgaggagacttaccatgctctgcatcgcgagcaccgcctgattgccgatgtggtctgtttcccggggtgtcatatcaaccatctcacgccgcggacgctggatattgaccgcgtccagtccctgatgccggagtgcggtattgaacccaaagcgttgattgaagggccaccgcgccgggaggtcccgatcctcctgcggcagaccagctttaaggcgcttgaggagccggtgatgttcgccggagaacaccgaggcacccatagcgcccgctttggcgaaattgagcagcggggcgtggcgctgacgccgaaagggcgcgcgctgtacgatcggctgctgcaggcggcaggaaccgggaaagataatctcagccaccagcagcatctacaggaggtgtttagcgaatttcccgacagcgaatttctgctccgtcagcaggggctggcctggtttcgctaccgcctgacgcccacgggtgaggcacatcgccaggcgtttcgcccgggcgacgatccgcagccgctgattgagcgcgggtgggtggtcgcccagccgattatttatgaagattttttaccggtcagcgcggcgggcatttttcagtccaatctgggcaacgaaacccaggcgcgcagccacgggaacgccagtcgcgaggcgtttgaggcagctctgggctgcccggtgcaggatgagtttgaactataccgacaggcggaggagcgcagcaaacgacgttgcggtctgctgtaaaatcagtaccctgctggcatcagccttacagggagcaggttatgcaacatccgtcgaaaccgttggcgaaaacccgtcagggaacgcttgccgggagcgcagaacaggggattcatatctggcgcggcattccgtacgccgcgccgcccgtgggcccgctgcgctggcgcgcgccgcagccagccgcccgctggcagggggtacgtccagctgagaccttttccgccgccagctggcaggacattgactactgccgcgagctcggcggcggcgatcctggcgccttcagcgaagactgcttatatctcaacgtctgggccccggccagcgcagcgcagccgctgccggtgatggtctggctgcacggcggcgggtttaccatcggcgccggcagcctgccgccttacgatggcaaagcgcttgccagccgcgacgtggtggtggtgacagttaactaccggctgggccatctcggttttttcgcccatccggcgctggaacaagaggcgggcgaacgtctctataatttcgcgttgctcgatcagattgccgctctgcagtgggttcaggagaatatccacgccttcggcggggatgccgccaacgtcacgctgtttggcgaatccgccggggcgcgcagcgtgctgtcgctaatggcctccccgaaagcgaaagggctgtttcataaagcgattattcagagcgggtatacgctacccgatctgccgcgggaaaaagcgctggaaaaagggcgcctgctggcggaacacttcgccttaccgcaagccagcgctgaggaattgcgggcgatcccggcggaggccttctggtcgctcaccgcgccgctgaataccgggccagcgcctattgccggagacgcggtgctgccgcagccgatgctggagaccttctttgccggccgccagcatccgataccggtgatgatcggctccaatagcgatgaagccagcgtgatggccgtgttcggcgtcgatattgccgggcagatccagaagctgcgccgagagcgccgtctggggctggggctgatcaaactcctctatcccggcgtgaagggcgatgaagcgctggggcgggaagtatgccgcgacatggccttcaccacccttggttatgtagtgatgcaggcgcaacagcgcgtgggtcagccgtgctggcgctactggtttgattatgtcgcggaagcggagcatgacgcctacccgcatggggcctggcatggcaacgaggtgccctacgtgtttgataacctgcggttgaccgacccggtgcggcagtacgccagcgaagcggatctggccttcgccgctcaggtcgctgactactgggcgcagtttgcccgcctcgccagcggcgagcagacgctttccggcgcggtgcgctggccggcgtgcctgcgcgggcgggatcgcctgttgcgcattggcttgcataagcgcgccgggtttaaagtggagaaccgctttatgcgcgccagactggcgctgtttcgccgggtgatgaagcatcacgtgacgctggaataaatcccataatgcgcaactgtcgccaccgaccggtggcgacgttatctcacacgaccaccaccggcttgatcaccttgccggacgccgaatcggcgaaggcctggttgatatcggccaacggatagcgggcgataagcttatcgatagggaattttccctgtttatagagttgcaccaacagcggaataaacagcgccggcacggcgtcgccttcaatcaccccgaccagcgattttccctccgccatcaggtcgttctgcacgttaagggtgatatctccggtaaagcccacaatcgccaccgttcccagcggtttcaccgcgtgtacggcctgcagaacgatagcggagacgccggtcgtttccaccgcgtagtgggcgcctttaccggtgatttgtttaatcacggcgacggcatcctgttccttgccattgatctgatgggtggcgcccagttcgcgcgccagggcgaggcggctggcatggatatccaccgcgataatctgcgaacagccggttaatttcgctgccatgatggcgctgagccccaccgcgccgcagccaaacaccaccagcgattcgccgaccaccggtttcaggcggttgagcaccgtcccgctaccggtctggataccgcagcccagcgggccgagcagggtgagatcaacctccgggtcgaccacgaccgcgttgctggcgcgggtgaccacatactggctgaaagacgactggccaaagaacagggacagatcctggtctcccagccggtagggggtggtgccatcctcgcgtcggccgccaaaattaagcgtattaaaatcttcgcaagccgaagggtggttgcttaaacaattttcgcagtggtggcaggcggcgtagctgagcactacgtggtctcctactctgatgccgctaaccgcctcgccgacgctggcaacgatcccggcgccttcatggccgaggatcgccggcataggcaccaccccggggttgtcgcgcatcacggcgtcggtatggcagacgccggtggcgacaattttcactaatatctcgtccttccccggcggggcgacctcgacgtctttgatgacaaaaggctgctggtagcccagcgtaacggctgctttcacttgcatggcatgactcctgaatgaattccctggagagcgtggcgggacagcccgaacggctctcccctgttggccgctaacgtgaagaaagatagcggttatcggggaaaagttagcaccaggcgcgatgggaatttgcgcgaatcgtgcctaaaaaacgcgcgcggcgaggagcgatacatggggtgaatattcagcactggagaatagatttcccttgaatagtcaggggtaaaaagcggcaggcagcgtgtatgcccaggctacacgtcagaggaaatgaaaaaaacagtctgttcctctggacagggcttttttaccttttttctgctggcaacaattggattattaatcgtttttgtctagagtgggcggaaattatcacgcagcgtgatgacgcgttgcgaatcaattcacccgtgcagaaggacgctttctcaggcatgaaccgcagacgttttcttaaatcttccatggctgttgccgccgtatgcggaacgtcaggagtcgcttccttattcagtcaggccgcttttgccgaagacgcgggcattgccgacgggcaaacgcgtcgttttgattatgctgttctgcaggcgatggctcacgatctggcgcgccagccgtggggcggcgccccgcgcgatctgccgccgacgctcgccaatctcaccccgcaggcctataacagcatccagtacgatgccaaccactcgctgtggaacaatattgaagagcgtaagctggacatccagtttttccacgtcgggatggggttccgtcgccgcgtgcggatgttctctttagacgccagcacccagcaggcgcgcgagatccacttccgtccggagctgtttaagtacaatgacgccggtgtggatacccgtcagctggaaggacagtctgacctcggcttcgccgggttccgggtgtttaaagcgccggagctggcgcgccgcgatatcgtggcgttcctcggcgccagctacttccgcgcggtagacagcacctatcagtatggcctgtcggcccgcggtctggcggtggatacctttaccgataccccggaagagtttcccgactttacgtcgttctggttcgaaacggtcaaaggggacgccacggtgtttaccgtttacgcgctgctggacagcccgagcatcactggcgcctacaagttcaccatccactgccaggatacccaggttatcatggacgtggaaaaccacctgtacgcccgcaaggatatcaaacagctgggtatcgcgccgatgaccagtatgttcagctgcggcaataatgagcggcggatgtgcgacaccatccatccgcaaatccacgactccgatcggctgtcaatgtggttgggcaacggggaatgggtctgccggccgctgaataacccgcagaagctgcagttcaatgccttccaggacaagaacccgcgcggctttggtctgttgcagctggaccgtgatttctcccactaccaggatgtgatgggctggtataacaagcgtcccagcctgtgggttgagccgcgtaaccagtggggcaaaggggcggtcagcctgatggagatcccaactaccggcgaaacgctggataatatcgtctgcttctggcagccggaaaaggcggtgaaggcgggcgacgaactggacttccgctaccgtctttactggagcgcgcagccgccggtgagcactccgctggcgcgcgttctggccacccgcaccgggatggggggcttccccgagggatgggcgccgggtgaacactacccggataagtgggcgcgtcgttttgccatcgactttgtcggcggcgatttgaaggcggccgcgccgcgcggtattgaaccggtgatcaccctctccagcggggaagcgaagcagattgagatcctctacgtcgagccgttcgatggctaccggatccttttcgactggtatccgaccaccgactcaaccgacccggtggagatgcgtctgttcctgcgctgtcagggagaagccatcagcgaaacctggctctatcagtatttcccgccggcagcagataaacgcaactacgttgacgaccggatcatgaaataaccctgagtcacccgacgcccgcaggcagtccctgcgggccagaagagagcgctatgaccgcagatatcccagcagtacctgagtcgatcccggtaaccgacgcgctgacgctaatcgccattgatgagcgctacgttagcgacctgcaccagctggtggtcaaaaaccagcgctggctacagcagtcgctcagttggcccgccgaggtgcgcagcgaagacgagacccgccgccatgtgcagggcaacgtgatgctgcatcagcgggattacgccaaaatgtttttgctgtttctcgataagcagctagtcggcgtcctgtcgttcaatcagatcgagccgcagaataaaacggcctatattggctactggatcgatgaagagcaccaggggcaagggctgctttcccgttcattacaggcctttatccgccattatgccgccagcgggctggtgcgccggtttgtgatcaaatgccgggtggcgaacacccgcagcaaccaggtagcgttgcgcaacgggtttgttctggaaggctgtctccgacaagccgagtatctgaacggtagctatgacgatcagaatatctacgcccgcattattgaccgcgatgaggcattaaagcgcgcctaacagcggcgtgcgggtgatgtgctgctggccgtcaagcgttttcgggccgcgcagatgaatggcctctccctcctgtgcggcaatctgcacctcgtcattgatggagacctggtgctcaacgatcacatcgccgatgatgactgtccgcccctggatcagcacatcgtcgtcgagcagaatcggaccacctcgcagctgcgcctcgccgccgaccatcgcccgatgcttcagcaggcagttgccttcaatcaccgcattctctgccacctgcgaactgtagcgcacggtgggaatggcatcctctccacgaccggcgatcagacgcgcgtgcccgtatacccgggcgttatcgcatacccagacgtcgttttcttcgttcccttcaagtcttgcctggtcaaacacttccgcccgatgttcgacaaacgcatgctcaacgaaggcatcgccgtagatttgcgcctggtggagaatgcgcgaggcgctgacggtggctcgctgatagatctgcaggactttgtcgcgatcggcggttaacccgcgcgcggcaatcacctggcagtgggggagaagacgcgcctcgtcggcaaggcgacaataaccgcgcacctggctctgcgtaaccgtgacgttgtcactgatctgcgcgtgatggctgatctgcgaggcgtgaatgcaggcctgtccgccgatggtggcctcatggctgaccacgcagaacccggttaagcgggcgtcgtcacggatgcgcgccccggcgaagaccacgctgttgacatcgtagatccagcactccccctgctggctgagagcgcattcctcatccacccagccgccttcgctgcccgctttaacgtcagcgaaatcaataagcgccacgatctggcgcagggtgacgctttgtttgccatgctcttcctcataacaatactgccgggtctgttcgctgagacggtatttacgcatggccgatccttattacttatggttaacataaacatagcaaagatcgccatagcgcgcgggataaggttcctttagaatgcaacttcaaattaaattgatatcatcaataaaatgaataaaacgcaaacgccgcggcaggtgctaaacctgccggcgggttattttggcatggtgctcggcaccatcggaatgggcttcgcctggcgttacgccagcaccctctggccggtcagccgcagcattggtgatgggctggtgacgctggcgatggcgatgtgggtcctgctcagcatggcgtttatcagccgggcgatccgctttccggcgagcgtgctgcgggagatgcgtcatccggtgagcagcagcttcgtcagcctgtttccggccaccacgctgttggtggcgattggtttggctccctggtgctggccgctggcgatcgggctgtttgtgccgggcgtggcgctgcagctcgcctatgccgcctggcaaagcggtgggctatggcgggggaaccatcctcgcgaggccaccacgccggggttgtatctgccgacagtagccaataattttatcagcgcgatggcctgcggcgcgctgggattttccgatgccggactggtgttcctcggcgccggggtcttctcctggctgagcctcgagccggcgatcctccagcgtctgcgcagcgcaggcgagctgccgacgccgctgcgcacctcgctggggatccagctggcgcctgcgctggtggcctgcagcgcctggctcagcgtcaacggcggggaggccgataccttcgctaagctgctgtttggttacggcctgctgcagctactgtttatgctccgtctgatgccctggtatcttcgtcagccgttcaatgcttctttctggagcttctcgttcggcatttccgcgctggccaccaccggtctgcatctcggccaggccaggggagacggcttttttcatcatctggcgatgccgctatttatttttagcaatctggttgtcggcctgctgctgctgcgtacagcgttgctgttggtcagcggaaaactgttgctccaggtcgaccgggaaacactcctgaataagaaggaaggatcatgacaatgcgtgacgcggattattttagtcaaaaatacagcctgacccgcacccattccgaggtgctgcatgccgcgacgattgtgccgccggggcgggcgctggatctgggctgcggcaacgggcgtaacagcctttatctggcggcgaacggcttcgcggtgacggcgtgggataaaaatccgatgagcgtcaacaatctggaaagtattcgcgctgccgagcgactggataatctgcaaacggcggtgaaagacctcaacagcctgagctttgacggcgagtatgacctgatcctctccaccgtagtgatgatgttcctcgagcctgacaccatcccgggcctgatcgccaatatgcagcgctgcaccgccgccggcggctataacctgattgtggcggcgatggataccgaagactatccctgcaccgtcggcttcccgtttgcctttaaacctgatgagcttcgtgattattaccagggctgggagctgctgaaatacaatgaggacgtcggcgagctgcatcgcaccgacgccaacggcaatcgcatcaaattgcgcttcgccaccctgttggcgcgcaagcctgcctgattcgccgcggcgtgggaagctgagcatggcccgcgccgcattccccgccagagcctgggcaagacagagacccgttgcggcgaaaatgagcctggaaaaccgcgcgataccccttttaagtgattatttattaacgtaatgttcaggcaatcaatatttataaatcttccttgacgaagccctttttttgtcacaaaactagtgggtcctatttgctataacgtctgccgaaaaaaactgcatttacagggatctctctatgcgtactcgcgttttactgaaagtcgccgctctggcgggaatattggcgttgaccggctgtgcggcgaaagtggcgcaaccggatcagtattcgggcttcttaaaagattattccagtttgaaagaaacgacctctgcctccggcaagccggagctgcgctggatcgatccgaacttcaatccggccaactatgacaatattgtttatcacccggtgacctactatccggtaccgaagccgaccacccaggtaggggagaaggcgctgcaggatattcttaactacaccaacaaagagctgaaacaggctatttccgagcgtaaaccgctggccactaccgccggcaagcgcagcctcatcttccgcggggcgatcaccggggtggactccagcaaagaggggctgcagttctatgaagtgatcccggttgctatgattgtcgccggcacccaggccgccaccggccatcgtaccatggacaccgatctgtactttgaggcggaggtcattgacgccagcaccaataagccggtcatcaaggtcgtacgtaaaggggaaggcaaaaccctggcgaatgagaatacaccgctgaccgtcgataccctgaagcaggttatcgatgatatggcggtcgacgccgttaaattcgatccctctcagcgttaatcgtgccagcgccgtctgacgacggcgctgtttttcttcagcctcctcaggccagccttcggcgcagcaatagctgttccggtttggcaaacatcaccatgttacccagcaggattagcgccagcccgatcacggcgctgctgtgccagacatacccttcatagacggtggaaatggataaggcgaccagcggaaacagcagcgtactgtaggcggctttgctggcgccgatgcgccccacgagagtgaaataggcgccaaaggcgatgaccgagccgaacagcgccaggtaaagcagggcgcccagatagctgacggtccattctggcataaaattatcgccgcgcagcagagcgatcgcccccatcaccagcgtgccgtagagcatcgcccagctgttggtggtcagcgtttccagcccgcggcgctggtggcgaatactgaacatattgccgagcgaaaaaccgtaggtacccagggcgctcagcccgatcccccacagcagcgaggcgttcagtccgttggccagcaggtcgtcccagaacaggatgacgataccggcgagacccagcgcggcggcggcccagaagcggcccggcggctgctggcggaaaaagagaaagctgttgatggcgtgaaacagtaccgccatcgaaaagatcaccgattccagaccggtattgatccaggcggcggcggtataaaaacaccagaaattaaagcagaagacgcagcagccctgcagcaggcagcagagatgatctttcgcgcccagcggccgcaggcgtcgtgtgacgagcagaatcgccagcatcgtgacgctggctacggcgaaacgccagaaaatcgataccggcgcggccaccggtccctgttgtaaaaaaatcgcgatccacgttgtaccccagatcacgacaacgagtgcatagagtaatgcgttcaccctggttctcctctacctgttaatgggaggagtatgccggctgccgcctgctgcggctttcaccggtttgttgtcggcttgcaaattcttgcgcttatttgccatccgctggcggtgaggactggaaaccgcgccggagtctccctagactagggcttttacagacaatgtgtgaagacgatgggttacgggacatttgaaacattacggcgacagaacgcggtgctgaagggaaccgtggagctgaattccggtattcaactggccgcctggtataacaattgcgataccgtgacggtgcgcagcgaccatcataccttaagtctgtacgtggctgatggctacgaaagctatcaaaagacgccgcacggctggaaaaatggcggcggcccggaccgtttttgtctgatgccgaaaggcgatgaaagcgtatgggatatccgcggcgatctgtcgtttgtgcatctttactgtaccgatgcgcacctgcgtcgcgtcggcgaggaggtgtgggaccgcagcccggcgaacttcaccctgcaggaaaagaccttcgccagcgatgataaaatcaccgcggtatatcgtcagtttttgctggctaacgactggcggcagccggcgaaccagctgaccctcagcgccgccagcagcttgctgcttacccatctgatccagcactattccaccgtgcagtggcgtttgccgacggtcaccggcgggctggcgccaggcgtaaagcgtcacgtactggcctggatcgatgctcatctcgatcagcccttgaccctggccgacctggcgcagcaggcgggtctgagtgagtttcattttgctcgtatgtttcgtcagtcgctaaatatggctccgcatcagtacgtcatgcagcagcgaatggcgaaggcgcaaaacctgatctgccatagcgcgctgccgttaaccgagatagcgctggcctgtggttttagctcccccagccatttcagccatcgggtcaaagccgccaccggcctgacgccctcccagctacgggcggcgcaacgcggatagcacgccgtaactcaccccgccgagcaccacgccccagaaggcggagccaattcccgccagcgtcaccccgctggcggtgaccaggaaggttaacaccgccgcatcgcgttcactggcctgatgcactgcctgaaacagactcccgccgatggtgccgagcagcgccagacccgccagcatctggatccacgccggcggcagggccgacatcagggcggtgattgacccgccgaacagaccggccagcagataaaaaccgcccgcggctatggccgccagccagcgctggttcggatccgggtgcgcctccgggctctggcatatggcggcggtgatcgccgcgatgcagatggaataaaccccaaacggcgccagcagtagtgccaaccccccgcaaacgacgatcagtgcggagaccggtacggtatagcctgatgcctgcagggtggcgaaccccggagcgttctgcgaggccatggtgacgaggaagaacggcagaccgacgctgagcaaaagcgccggagtaaactgcggggcgacccattccggcgtcacaaatgccagcggcacgggggcgctagccacatccccggacgccgccgcaatcagcgctccaatcaccagcgcggccaccacggcgaagcggggccacagcgctttacacagcagccaggcggcgagcatcccgccgcacagcggcagatgatcctgtaagccggcgaaggcctgcaaaccaaaccgtagcaggatcccagccagcatcgcggcggccagcgaatggggaatgatctgcatcagccgggcaaacaggccggtggcgccgcagataacgatcagcgcgttggcgaaaataaagatccccacggcctcggcgagggtcaccccctgcaggccgctaactaacagcgcagcgcccggcgttgaccaggcggtgagcacaggaactttccgccaggcgctcagcgctagagtgctgatgcccatggcgaggccaagagccgtcatccagccggcgatctgcccgggggtagcgccggccgcggcggcggcctgccagatgatggcggaggagctggcgtaccccaccaacacggcgacgaagccagcaaacagagtgggaagcggaagactaaacgagcgcatcgatgattctcatgtgcgttataacatccattcactgtatcattgtgcgttataacgcacaagtggtggttcgcgcagctaccctgggagaaaaactcgccgccagcggcgtacgatgccgttaaacgtcctgaaaaaatcagacaaatggcggtatactttgcgcagtaaaaacaggaggaaggatgaatattgcgcaacatctggcggcaacgcttaaaaccctgcgccagcagcgaggctggagcctgtcgcgactggcggaagagaccggggtgtcgaaagccatgctcgggcagattgagcggaatgaatcaagtccaacggtggcgacgctgtggaagattgccaccgggctgaacgtaccgttttcggcgttcatcgtcccggacgccagcgccgcgccctccgcgtttgatccgcagcagcaggcgatggtggtgacgccagtattcccgtgggatcccgagctgcgctttgaccatttttcgataacccttgcccccggcgcgctgagcgaatcaacgccgcatgagaaaggggtgattgagcatgtggtagtgataagtggtacgctggatttgtgcttacaaggggagtggcactcgctgcaggcgggtgagggtaggcgtttcgccggcgacgcgacgcatgcgtatcgtaaccgcggcgcccaggcggcccatttccattctcttatccattatccaaaagaaaaaaccgcgagcgaacccgcggccagacaagatgactgatgataaccactcacaacgtgacgaggaaaatccggaatacgtgatgacagtactcttcgccgtgatttgagggaaatatcttttccgtcaatactttgttgaaaagtgaaaattcgtcgtcgcgcgaaggcggaaaaggttttcgtctgcgcccggttctgactacaatagccgccatttcgacccccttatactggataacaacacgcgtatgcgcctgcacaatcatcgtcttgaacttcttagtcctgcccgcgacgccggtatcgctcgcgaagcgatccttcacggcgccgatgccgtttacatcggtggacctggctttggcgcccgccacaacgccagcaacagtctgagcgatatcgccgggctggtgcctttcgctcatcgctttggcgcaaaggtatttgtgacgctgaacaccattctgcatgacgatgaactggagccggcgcagcggctgattaccgatctctacgacgcaggcgtcgatgcgcttatcgtgcaggatatggggatcatggagctggatctgccgccgattgagctgcacgccagcacccagtgcgatattcgcagtgtggaaaaagcgaagtttctctccgacgccggcttcagtcagatcgtgctggcgcgcgaactgaacctcagtcaaatcaaagccatttacgaccacactgacgccactatcgaattctttatccatggcgcgctgtgcgtggcctattccgggcagtgttacatttcgcacgcccagaccggacgcagcgccaaccgcggcgactgctcgcaggcttgccgcttgccgtataccctgaaggacgatcaggggcgggtggtggcctatgagaaacatctcctgtcgatgaaggataacgatcagaccgccaacctggcggcgctgatcgacgctggcgtacgctccttcaaaattgaaggccgttacaaagacatgagttatgtgaaaaacatcactgcgcactaccgtcaaatgctggatgccattatcgaagatcgcggcgacctggcgcgcgcctcggctggacgcaccgagcatttctttatcccgtccacggataaaaccttccaccggggcagcactgactactttgttaatgcccgcaaaggcgatatcggcgcctttgattcgccgaaatttatcggcctgccggtgggtgaagttctgaaggtaggcaaagaccacctcgacgttgaagtcagtgaaccgttaaccaacggcgatggtctcaacgtgatgattaagcgcgaagtggtgggcttccgtgctaataccgtggaaaaaaccggcgaaaaccgttatcgggtatggccgaacgagatgccagcggatctgcataaagtgcgcccccatcagccgctcaaccgcaacctcgatcataactggcaacaggcgctgctaaagacctccagcgaacgccgcatcgcggtagacgtgacgttgagcggctggcaggagcagctggttctcaccatgacctgtgaagatggcgttagcgtgacccacacccttgacggggagttcgccgaagctaaccaggcggagaaagcgctggccaacctgcgtgacggtgtcacaaaactggggcaaaccatctactatgcgcgcgatgttcaggttagtctgccgccgctgtttgtgcccaacagcctgctcaaccagctgcgtcgggaaactgcggagatgctggatgaagcgcgcctcaacgcctggcagcgcggcacccgcaagccggtctccgtaccgccgccggtctacccggagacccatctctccttcctcgccaacgtctataaccacaaggcgcgggcgttctaccagcgctatggcgtacagctgatcgacgccgcctatgaagcgcacgaagagaagggcgatgtgccggtgatgatcactaagcattgtctgcggttcgccttcaacctctgcccgaagcaggcgaaaggctccatcaagagctggaaggccacgccgatgcagctgatccatggcgatgaggtcctgaccctgaagtttgactgccgtccgtgcgaaatgcacgtggtcggcaagatcaaaaaccatatccttaaaatgccgcacccgggcagcattgtggcctccgtcagcccggacgatctgatgaagacgctgccgaagcgcaaaggggcctgattcgagtcgatgctattggcaggatgcccgcggtttacggtcgtcctgccagcggtgatgttcgcgcaggtctgcggcggcctcctcgtgctggctgcgaagctcatcgctatccgcttcgtgcagcagctgctgttcgagactttgcaccggaaagtactcgtgtccctgacgatgggccaacagatgcccggaaaataatgcgcacagcaacagcagggcgcttatgcttctctttaacataccttttctcgacggaacaatggcgtggacatactatgtcaggcgcaatgcaggctttttttcgggcatctcaaagaacggcaagagtttgtcaacgatggctgacgaaggatgaaaaaaggcctgacgcggaaggccaggccagagtgttacgctttcggcggcagcggtttcccgctgtgctcgctcccttttggcggctgcttgccgttgtgctgcggctgtttaccgtcgtgctgcggctgtttgccgtctcgttgtgactgtttgccgtctcgttgtggctgtttgctgttgtattgcgcttgcttgccatcgtgttggccgtttttcaccggcggtttaccctgatgctgcgcgcctttttccggcggcggcggcgggttgtcggcagcgaaagcccatgacgacattcccagcgtcattacggcggagagtatagctaacttcttcatagcaatatcctttcttcagatgtatcgccgtatttcatcaggcaaaagtgaagataagatggagaagtcccttttcggacctctctgcatccaccctcagacttttagccctgcggcggtcatcagcaggcgaaacagcaggcttatggcggccagcgtcagtacgctacctccccagagcgcgatcagccacagcagacgtttaggccaggcagtatgcatcagtgatatccctccccaggctgaactttgccgcggaacacgtaatagctccagcaggtgtagccaagaatgaccggaataatcagcagggcgcccaccagcataaagccctggctttgcgggggagcggcagcctgccacaacgtgatggccggcgggataatatgcggccagatgctgatccccagtccgctgaagccgagaaagaccaggcccagcgtcagcgtgaagggcgaaacatggcggtcgcgctgatgcagcgtgcgccacagccagccgctaacgaggatcaccagcagcggtaccggcagcaggaaatagagattcggcaggctgaaccagcgggcagcaatcgccgggtgcgccagcggagtccacaggctgatgacggcaaacaccgccagcagggcacccagcaactgccgcgatgcgctgcgcattctctgctgcagcgcaccttcacttttcatcaccagccaggtggcgccgagcagcgcataggccacgcacagtccgagtccgcagaacaggctgaacggggtcagccagtcaaacatgccgccactgaaggcgcgaccgctgacggtgaaaccgttgatcaccgccccgaccaccacgccctggctgaaggttgccagcagggagccgccaaaaaaggcgcgatcccagaatggccggtgcgacggcgtggcctggaagcgaaactcaaaggcgacgccgcgaaaaatcaggccgatcagcatcagggtcagggggatcgacagggcgtcgatgatcaccgcgtaggcgaggggaaaggcgccaaacaggccggcgccgccgagcaccagccaggtttcattgccatcccataccggcgcgacgctgttgaccattacgtcgcgatccccgccgccccgcaccgtgctgaacagcaggccgatgcccagatcaaagccatccatgacgatgtacatcagcgtggcaaagacgataatcacgaaccagatcaccgataattcgatacccattagcgggactccttctgcagataaccttcagtggcggcggacagcgggcgggctggcgtaccggttgtcgccgggagcatctcctgcggccccttgcggatcaggcgcagcatatagctgtagccgacgccgaagacggcgctgtacactacgataaaggtcaataaactgaccgacatatgcagatcgccatgagcggaaacggcatcggcggtgcgctgaacgccatacaccacccagggttggcggcccacctcggtggtcacccagccggcgagaatagcgatcaggccggatggccccatccacagggcaaaacgcagaaacggccgcgagtggtatagccggtcgccgcgacgcagccacagggccagcacgcccagcagcagcatcaacatgcccagcccggccatcaggcgaaatgaccagaacaccacagtagaattcgggcgctcctcaggagcgaactctttcaacgccggcacctgtttatcaagactgtgggtgaggatcagactgcccagggccggtatctcaagcccgtagcgggtgcgctgctggtccatatcgggccagccaaacagcagcaacggcgttggctcacccggcggattttcccagtgcccctcaatggcggcgattttcgccggctggtgcttcagggtattcaggccatgcatatcgccgatcagcgcctggacgggggcgaccagcagcgtcatccatagcgccattgagaacatcttacggatcgccggcgactgattgccgcgtagcagatgccaggccgccgaggcgccgacaaacagcgcgctactgagaaacgccgctactgtcatatgcaataatcggtaggggaacgacggattaaagatcaccgccagccagtcgacgggcacgacctggccatcaacgatctcaaacccctgcggggtctgcatccagctgttagaggcgaggatccagaaggtggagatgatagtacccagcgccaccatgcaggtggcgaaaaagtgtagccccggccccacgcggttccagccgaaaagcatcaccccgaggaagcccgcttccagaaaaaatgccgtcaggacttcataggtcagcagagggccggttatgctgcctgcaaactgtgagaaaccgctccagttggtgccgaactggtaggccatcaccagcccggaaacgacccccataccgaagttgacggcgaaaatcttcgaccagaaatggtacagcgagcgccagacgggattttttgtttttagccataagccttcgagcaccgccagatagctggccagtccgatggtaatggcggggaagataatatgaaatgagaccgtaaaagcgaattgaactcgcgccagatggaatgcatcaagaccgaacatgcaggactccacaacaaaattgattcagcgcaattttaggtggggtgacgactgaggggcagaggcagtcacgccattttttatcataacagttggccgctgttatgatttttcagctgttgccagggcgagaaaatatccttgcgcaaccttgattaatccctgcggaaggtgattaggcgtctattccgctgtctgtcatattattgctaacggctggctacgcggccctgccgccggtatggcgtagtcacctggtcggcataatatatccttaccacccgccgtagctcatattttggcttacgaaatccgccacggatttttactctgatttattgtcactcattagcatgagaataagtaaaaacgctgagccggttaatcgtaaattaaataataataaattgtcggctccgcggctaatttgtactgtatgagctcgggaataaataaaagggaatgccaatgtctgaaaaaggattacagagtctgtgcattacgcttggcgtaatgattatcttctggtttgttttaatctcgctattctgggtggtgatattttaaacccatcccgtgctatcacggcgacgcggccgccgctgcagatataacagttacaggaaactatgatttttttataactgatatatgataatgggacgttatcgtacggggacggccgcaatgaaaaagtatcaacagttggcgcagcaactgaccgagcagatcgcccttggcgtctggttgcctggcgatcggctgccgtcgctgcgcgagcaggtgatcagcagcggcatgagctttatgaccgtcagccatgcctatcagctgctggaaagccaggggcgcatcgtcgcccgtccgcagtcgggttattatgttgccccccagccggtgaagctccgccagccggcgccgcctgcccaggtcactcgcgatgaagccgtcgatatcaatacctatatctttgaggtgctccaggccagccgccaggcgtcgatgctgccctttgcctcggcctttccggacccgcgtctcttcccgctgcagcagctcaaccgctcgctggcgcaggtgagtaaaaccgccaccgccatgagcgtcattgagaatctgccgccgggtaatgcagaacttcggcatgccattgcccgtcgctatgccctgcaggggatgaacgtctcgccggacgagatcgtcatcaccgccggggcgctggaggcgcttaacctcagcctgcaggcggtgaccgagccgggagactgggtggtggtggaaaacccctgcttctacggcgccctgcaggcgctggagaggctgcgtttgaaagcattgtcggtggccactgacgtcagggaaggcattgatctgacggcgctggaggcggccctgcaaaactatccggtgaaggcctgctggctgatgaccaacggccagaatccgctcggcttcaccctcagcgctgaaaaaaaagcggcgctggtggcgctgctggcgcgctataacgtgatgttgatcgaagatgatgtctacagcgagctctattttggccgcgaaaagccgttaccggcgaagttctgggatcgccaggagatgacgctgcactgcagctcgttctcaaaatgtctggtacccggctttcgtatcggctgggtggcggccggcaaacaggcgcggcggatccagcagctccagctgatgagtacgctttccaccagttcgccgatgcagttagccctggtggattacctgtccaccaagcgctatgacgcccacctgcgccgtctacgtcgtcagctggcggagcgtaaacagcaggcctggcaggcgctgctgcgccatctgccgccggaggtcatcgtccaccacagcgacagcggctactttctgtggatcgaactaccggaaggggccgacgctagcgcacttagcgcccgggcgctggcgtcgcacatcagcattgccccagggaaaatgttctccacctccgacagctggacctcgtttttccgttttaataccgcctggggctggggggaacgcgaagagcagggggtgaagcgcctgggggagcttattcgcgaacagcttgcctgaccctgtcgtttatttttctcatcataaacattctgcgaaaataagcgaaagaggatttttatcgaggccggtcattattttaccggcgctcaccataggaaatatgcatacccctcctcattccctaactcgttgtctataatccataaagtcctgcttgtgttggcgatttttacgtaatgcgtcccgggtcacaacctgaataaattcccctgggggcgttaatccgctgactacccttatttcaggagatatttttacggcacggctgccgctaattcctttgtgacaggagtaacacctgatgagcaaaaaaattgcccgttgcagcctttatgtgctgggtatggcttgtttgaccgttcaggcggcagagccgctcacctcgctggataaaccggaagggcggctcgatattattgcctggccgggatatatcgaacgcggtcagaccgacaaacagtacgactgggtgagtcagttcgaaaaggacaccggttgccaggttaatgtcaaaaccgctgccacctctgacgagatggtcagtctgatggccaaaggcggctacgatctggtcaccgcctcgggtgatgcttcgctgcgcctgatcatgggcaaacgcgtgcagccgatcaacacggcgctgattgccggctggggctcccttgatccgcgtattgcgaagggggcgtggtttaacgtcggcggtaaagtctatggcacgccgtatcagtgggggccgaacctgctgatgtacaacacccgcgtattcccgacgccgccggacagctggcgcgtggtgttcgtcaagcaggatctaccggatggtaaaaccaaccaggggcgggtgcaggcctatgatggcccgatctatatcgccgacgccgcgctgtttgtcaaagccacccagccgcagctggggatcgaagacccctatcaactgaccgaaacccagtacaacgcggtgctgaaagtcctgcgcgaccagcaaccgctgatccatcgctactggcatgacgccaccgtacagatgaacgacttcaaaaacgaaggggtagccgcctccagttcgtggccctatcaagccaacggcctgaaggcggaaggccagccggtcgccaccgtgttcccgaaggagggggtaaccggctgggcggataccaccatgctgcacagcgaggcgaagcacccggtctgcgcctataaatggatgaactggtcgctcacgccgaaggtgcagggcgatgtggcggcctggttcggttcgctgccggtggtgcctgagggctgtaaagccagcgcgctgctcggtgataaaggctgtgagaccaacgggtatgagcagtttaaccgcattcacttctggaaaacgccggttgcggaaggcgggaaatacgtgccctatagccgctggactcaggactatattgcgataatgggcggccgctaaggatcggaggcaaacaatgacgtacgcggtcgagtttcagaatgtatcgcgcctgtatggcgatgtgcgggcggtggatggggttagcattggcatacgcgatggagaatttttctcgatgctgggtccgtccggctcgggtaaaaccacctgcctgcggctgattgccggttttgagcagctctccggcggaaccatccatatctttggtcaaccggccagcgaactgccgccctggcagcgggatgtgaataccgtgttccaggactacgcgctatttccccacatgtcgatccttgacaacgtcgcctacggcctgatggtcaaaggcatggcgaagaaagcgcgccatgcccgcgcccaggaggcgctggagaaggtggcccttggctttgctcatcatcgcaagccctcccagctctccggcggccagcggcagcgggtcgcgattgcccgggcgctggtgaaccagccgcgggtgctgctgctcgatgagccgctgggcgccctggatttgaaactacgcgagcagatgcaggtggagctgaaaaagctgcagcagtcgctggggatcaccttcatcttcgtgacccacgaccagagcgaagcgctgtcgatgtcggatcgcgtggcggtgtttaacaacgggcgcattgagcaggtggatgccccgcaggatctctatctgcaccccaggaccgcgtttgtggccggttttgtcggcaccgccaacgtttttgcagccgaggcggcccgacgattgtgcgggatggcgggcagctggtcgctgcgtccggagcatgttcgcctgcagggcggcggcgaggtgcaggtgcagggcgtggtgcaggcggtgcagtatcagggggcggcgacgcggatcgagctccgcctcgcggatggcgacaaactgctggtcagccaggccaacatcgatggcgcggcggcggccagcgttccgcgaaccgggcaaatagtacaggcgtcatggtcgcgctcggcgatgaccccgctggaaagcggaggctgagatgaccatggcaataactcctgcgcagaccgggcgcatatcggggatcttctggcgccgaccggcgctgggcctgtttttactgctgctcgggccgctgatgtggtttggcatcgtctatctgggatcgctgctgaccctgctgtggcagagcatttatacctttgacgacttcaccatgtcggtgaccagcgacttcacgctggctaacctgcgggcgctgttcaaccctgccaactacgacattattgtgcggaccctggtgatggcgctgtgcgtcacgctggccagcgcgctgctggcgctgccgatggcctggtatatggcgcgctataccagcggcaaaatgaaggccttcttttatatcgcggtcatgctgccaatgtgggccagctatatcgtcaaagcctatgcgtgggtgctgctgctggcgaaagatggcgtggcgcagtggttcctcggtcatcttggactggagggggcgctgaacgcgctgttgagcgtcccggcggttggcggcaataccttgtccacctccggccttggacgctttctggtgttcgtctacatctggctgccgtttatgatcctgccggtgcaggcggcgctggagcgtattccgggatcgttgctacaggcctcggccgatctgggcgcggccccgcggcagacctttcgctacgtggtgctgccgctggccattcccggcatcgccgctgggtcgatcttcaccttttcgctgacgctaggcgactttatcgtgccgcagctggtgggcccgccgggatactttatcggcaatatggtttactcgcagcagggggcgatcggcaatatgccgatggcggcggcgtttaccctggtgcctatcgtcttgattgccctctatctggcgttcgtgaaacgtctgggagccttcgatgcactctgaacgcgcgccctggtatctgcgactggcgacctggggcggggtgatattcctccactttccgctgctgattatcgccatctatgcttttaatacggaagatgcagcctttagctttccgccgcaggggctgacgctgcgctggttcagcgaggcggccgggcgcagcgacattctgcaggcagtgacactgtcacttaagatcgccgccctgtcgaccgccattgccttagtgcttggcacgctggctgcaggagccctgtggcgcagcgccttttttggcaaaaatgcggtgtcgctactgctgctgctgcctatcgccctgccggggatcattaccggcctggcactcctgacggcgttcaaagcggtcggccttgagcctggcctgctgacgatcgtggtggggcacgcgaccttctgcgtggtggtggtgtttaacaacgtcatcgcccgcttccgccggacttcgtggagtatggtggaagcctcgatggatttaggcgctaccggttggcagacctttcgttacgtagtgctgcccaatctggggtcggcgctgctggcggggggaatgctggcattcgctctgtcgtttgatgaaattatcgttaccacttttaccgcggggcatgaacgcaccttgccgctgtggttgctgaatcagctggggcggccgcgagatgtgcccgtcaccaacgttgtcgcgctgttggtgatgctggtaacgacgataccaatcttaggggcctggtggctcacccgcgacggcgataacgacgccggaaacgggaaataaaaccatgaaacaggataatgctatgcaacacaacctattgataaacggtaagttagtggcaggtgaaggcgagaaggttccggtatataaccctgcaaccggcgaagtgatcctggagattgccgaagcgacagcggcccaggtcgatgccgccgttgaggcggcggaccgggcattcgatgcctggagtcagacgacgccgaagacgcgtgcggaatgtctcctgaagctggcggacgccatctcggcgcaggctgaaaccctggcgcagctggagtcgctgaactgcggcaagccgctgcactgcgtgattaatgatgaaatgccggccatcgccgacgtcttccgcttcttcgccggcgccgctcgctgcctgccggggatggcggccggagagtatctcgaagggcatacctcaatgatccgccgcgatccggtgggcgtggtggcctccatcgcgccgtggaactatccgctgatgatggcggcctggaagctggccccggcgctggcggcgggcaactgcgtagtgataaaaccctcggagatcaccccgctgacggcgctgaagctggcggagctggcaaaagatatcttcccggagggggttatcaacgtgctgtttggccgcggtaaaacggtgggcgaccccttgaccgcccacgttaaagtgcgaatggtctccctgaccggatcgattgccaccggagcccatatcattggccataccgcctcgtcgattaaacgcacccacatggagctgggcggtaaggcgccagtgatcgtttttgacgatgcggacatcgatgcggtggtggatggggtgcggaccttcggtttttacaacgccggccaggactgcacggccgcctgccggatctacgcccagcagggtatctatgaccagctggtggagaaacttggggcggcggtggccagcctgaaaatgggggcgccggaggacgctgccaccgaactgggtccgctgagctcgctggcccatcttgagcgcgttagcgcggcggtggaagccgcaagggcgctgccgcacattaaagtggtcaccggcggcagtcgggctgacggcgcgggctattacttccagccgacgctgctcgccggcgcccggcaggaagacgctattgtccagcgcgaagtgtttggtccggtagtcagcgtgacgcctttcagcgatgaagcgcaggccctgagctgggcgaatgactctcagtatggcctggcctcctcggtatggacgaaagatgtcggtcgcgcccatcgtcttagcgccaggctgcagtacggctgcacctgggtcaatacccactttatgctggtcagcgaaatgccgcacggtggccagaagctgtcaggctacggcaaggacatgtcgatgtatggccttgaggattataccgtggtccgccatgtgatggttaagcatagctaaaggattgaccatttagcgccaggcgactattgcgcgatgggtgtgttaggccgctaatagtcacaatggcaaaaattgtcaaaactcaacccaggggatatgagattattctgatgccccttcaagagctaagccatcatgagtgccggagataagcgccggatggggtccgccagtcaccctgggcgcacagcgcccggcgggtggggcggcaacatcgcggttcgcgaccgaattgcggcccctgtctgtcggcaggggcttttttgtgctcgcagaagagcgaagagatgagccggccagtcgcgccggggtaacgagaataccgctttaactactttcagcgcttggtttttttgctgggcaggctggcgctgcgccggtcacgaatgtaggaaataagattatacaccgccgcgaccagcaggattagcgcgatgaccagcgtgatgattccggacatatccacctcgaaattcacagcgcgaactgcgctaaagcattaccaatggttatgaatgtaagtattatctgacgcgaaggcaaatgatatttgttgtcatttagcgctatttctggctcttatccgtgatgacggagatgaagaggttatgttacaacggcttgccatcgccatttatcttcttacgatgacggcccgcgcgatatattgcgcctgtggcgaaggcggcgatccttttccccttgccgacggcgaaatattttccttattagcgaaattaactcccctgaacagaaagtatttcacggctagagataagcttttaatatttacggttatcgcatgatatttgttctgaatattttatagccctgaggcagaggcaaataccggatgccgcccggcagcgcgccccgggtttgactttccgccgccgctcatgcgatcatttagggcatattaggttttgacgttgatgtcgctgtgaaaatttttgcttttattctgctggctatcggcgctgtggcgctgagctatggtaatgccccggcgaaacgaatccaaagctgtgagaagatgggcgtagggcaggccgtctgcgccgccgccgaatgggatagtgaaaaagtcaatgtactgccgcgctataaccccagtcttaataaggtaatagctgccgcgcagttagcccccgccgcccgacagcaagataacaactctgttgttcgcgcgtaaaaaagcagccttcggggctgcttttttaggtttcgttgctgaattaaatgattaaaaccagccaaatcttacggacagcaggctgataagcgcgaacgcggcgcagacattaatcataacgacggttttactggagacatccatagcgccaccctaatgagtaagtcctaaaggtatagtacggcgccagcggttgcgctatcagattaagacgaatcaggctttattctgaatattcagcccgtttctgattttgttatacaggtatctctgaatcacgacgtcatggcagataatcatcccaccatggaacgcccctcagggaaggaaaaagtaagaatgacgttatatcaaaaaatgttggtgttttacgccattatgggcgtgatatgcgccgtgattagctggtttttaaccaaagagagccggatgatccgcctgctggcggccctgctgatcggcgccacctggccgttcagcttcccgatggcgctgctcgtctcgctgttttaaccctcaggcgctagacggcagaaaagggtagcacaaaggatgaggttactgtataaaaaaccagtaaccttatcatggaggcatacaggtgaacggtttttattcgtccgtcgctggcgccacgctgcgctggcacgatttcccgggagatggccttccggtggtgtttatccacggccttggctgcgcgtcatcctacgattatccccgcattgccagcgatcctgcgctccgcgaacggcgcaaaatactcatcgatctgccgggcttcggctatagcgataaaccgcgcgcgtttagttacaacatacatgagcaggctttagttttggagcagttcctcagccacctgcgcctgcagcgcttcgcgctgttcgggcatagcatgggagggagcatcgccatcgaagcggcggggctactgggcgagcgggtgcccacgctgttggtctcggaacccaacctgttcgccggcggcggcgagtacagcaggcgcattgcggcgcagtcagagacagcctttgtcgctgacggctatgccaggctgctggcggaggagcgctcgccgtgggcgggttgtttacaaaacagcgccccctgggccgtctggcgggccgccagcagcctgatacgcggcagcgacacgccctggtttacccagctatgccagctgcgctgccagaaaatgctgatcgtcggagagcggtcgcttccttatgcggatagcgacctcgttcaggcacaagggatcccggtcggcatcgtgccccatgccggacactcgatggcgtgggaaaacccgcaggggctggcgcagcttatcgccagccatagttaagaggcgctgggcctcagaagggaagctcgcggggttgggtctggatcgttatccagcgcagctcggtgaattccgcgatcccggcccggccgccaaagcggccatagccggaggctttgcaaccgccaaacggcatttgcgcctcatcatgcaccgttgggccattgatatggcaaatcccggtatgcagacgttgcgctacgttccacgctctggcgctgtcgcggctgtagaccgcagcggaaagaccgtactcgctgtcgttggccaccgccagcgcctcctcttcgctatgaacgcgaataatcgctttcaccggaccgaaggactcttcacgccacaggcgcatctcgcgggtcacgccgtccagcagggtcgggctcatatgggtatcgttggctctaccaccggtcagcaggcgagcgcctttcgctaacgcatcgtcaatgagcgcgttgcagcgggcgatggtgttcatatcgacaaccgggcccgtgagggcggcaggcagggcggcggcgcgcctggccagcagcgggataaacgcctccgctacggcattgtcgacaataatgcgctcggtggacatgcagatctgcccggcgttggcgaaggcgccaaaaacagcgcccgccgccgcttgctcaatatcagcatcgtccagcaccagcaggggcgcttttccaccgagctcgagcaccgctggtttcagatactgtccgcaggtgcgggcgataatgcgccccaccggtgtggagccggtaaagttaacgcgccgcaccgccgggtgggcgatcagcgattccaccagcgccggcgcatcttcaggcgcacaggtaagatagttcaccacgcccggcgggaagcccgccgcgtcaagggcgtcgataatcagtccctgagtggcgggggaaagttcggcgcccttaaggatcaccgtgttgccacaggccagcggcgtcgccagggcccgggtggccagaatcagcggcgcgttccacggcgccatgcccagcaccactcccgccccctggcggacgcccatcgccaggttacccggcacgttggacggaattatttgcccttcaatctgggtggtcagcgccgccgcttcacgcagaatatctgccgccagatgaacgttaaatccggcccagtgcgcggtcgcgccggtctccgccgccatggcggcgataaatttcgcctcccgcaacagcatctgttccgccgcctcgagcagtaagcgacgtcgttccgccggcgcagtatcgcgccacagcggaaaggcgcaggccgcggcttcgacgcagcgtttgccgtcggcgaggctggcggcagcggccaccgaggctgcctcatcgtgggccgggtggcgtcgggtaaaggtgcggcggccttcggcatcgtgccactggccgtcaatgtacagattgcaggtgattgtcatggtggaaacctcttgttctgcggttcccccagtgtaccgggcggcactgacgggaagcgtgagccgggcggttatcgcacatttttttgcaggaattttgtgtggctcacaacatcccgaagccctctggcgtaaaaagcagcgcaacgtcgattaaaccagcaaattccacgcgttttgcataaggtgatagccattgattatttgccgccgtcaggcggctgtgctgttattactgttcttataatcaataatcaggacttataaccatgtctacagggaaaaccacgctggcgctgctgctgagcgcactgctgccggccggcgccgcctgggccgcaggcaatgacactctggtctactgctcagaagcctctccggagtccttcaatccgcagatcgccagctccggtccgtcgttcgtcgccagctcgcaggtactgtataaccgtctggtgagctttgacccggtgaaaaatacgccgatcccgtcgctggccaccgagtggcacgtctctgaggatggcaaaacctggacctttactctgcgtcagggggtgaagttcaacagcaacaaattcttcaaaccgacccgcgattttaacgccgacgacgtcctgttctccgtgctgcgccagatggatcctcagcatccttatcataaggtgtcgcaggggaactatgaatacttccacgacgtgggcctcgataagctgattaaatcggtgaaaaaggtggatgattaccatgtccagttcgagctcaacgagccgaacgcggcgtttcttgccgactggggcatggacttcgcctctattctgtcggcagagtatggtgaggcgatgctgaagaaaggaacgccggaaaacgttgataactggcctgtcggtaccgggccgtatgcgctgcagcagtataaagtggattcgcaaatccgctatattgccaatccccactactgggaaggcgaggtaccgaccaagcacttaatcttctccattacgccgaacgtcgagactcgtctggcgaaactgcagaccaacgagtgccagattattcccgcgccgtcgccggtacagttcccggtgattaagggcaataaagatctggcgctgcatgcggttgaggcgctaaacgtcggctatctggcgtttaacaccgagaaaaaaccgtttgataatgtgctggtgcgccaggcattaaactacgctaccgacaagcaggcgatcgtcaaggcggtattcctcgattccggcagcgtggcgaaatcaccgatcccgtcgacgatgctcgggtataagaaagatctcccggactatgactacgatccgcagaaagccaaagcgctgctcaagcaggctggtctggagcaaggcgcggaagtgaccctgtggtcaatgccggtccagcgcccctacaacccaaactcaaaacgcattgccgaaatgatccaaaacgactgggcgaaagtgggggtgaaagccaaaattgtcagctatgaatggggcgaataccttgccggtatgcgtaaaggggagcacgacagcgccctgtatggctggatgtcggacaacggcgatccggacaactttgctggcacattgctcagctgtgataatatccagactggctccaacgccgcccgctggtgtgataaatcctatgacgcgctggtaaagaaagcgctgttggtgagcgatccgcaggcgcgggccaaactctacgaacaggcgcaggagattttttatcagcaggcgccatggatcaccctggcgaccgggaaaaccttctatgcgacgcgcagcaacgtcagcggctacaccgtcagcatgatggggagcgatttttccaaagcgaagctgaattaagcgaaaggagaacaggatggcacatctggatgaggttatcgtcaaagtcgatgacaccctggccgagggcgttatcgcgcatatgaatgagctgctaatcgccctgagtgatgatgcgcaactcagtcgtgaggaacgctatatccaacagcagcgtctgcgcaccgccatcgcccatcatgggcgacagcatcaggaagagcaggacgcgcgccgcgagcagttgaccaaaggcggcgcgatcctctgaagatgcgctcagaactggcgtctggccaccagccaggcgcccaccaccagcatcaccgccccgcataacggtccgatcagcgcccgcaccggcacgccgtgggcgcgaactaaatccatgatcaacccgcccaccagctggctggccaccagtaccgcaatggtcgtcgccgcgccaacgttttgataaccgctgatgctggcgaagacgaaaaaggaccccagcaggccggggatcagcgtccaccatttcacgctcagggccagctcctgaaagccggcgacgccctggcgcagcagtaacatcgtcacgaagataacgatcccgaccagcgaattgagcagcatagcgataaggatcgtcgacgccgactgggtgatgcgcaccatcagagtgttctgcactaccaggccaacgccggcggcgatcaggcaggcgagagtgagcgacgcgttcatgctttgccgtccgggtcctgacgcgcatccagctgcagctgcataaaggtcagatccagccagcggccaaatttggtgcccacctgcggcatctgcccggtggtgataaagcccagcgtttcatgcagatgcagcgaagcgtgattctgcgactcgatgccggcgaccatcacatgtttattcagccgtcgcgcttcggcgatcaaggcgaccagcagcttgcggcccagccctttcccctgatgttcgggatgaacgtacaccgaatgctcaacggtatggcgaaagccgtcaaacgcccgccagtcgccaaacgaggaataaccggtaatgacgccgtcttcctcgctcaccagtaccggaaatccagccagctggcgggcttcaaaccaggcgatgcggttatcggtatccacagttttatcattccagatggcggcggtatggacgacggcatggttatagatctcggcgatcgccgcgcagtcgtctttaatggcagggcgaatggacatagcaaacctcaatttttcgtacactatagtagtacaatattattacaataatgaacgtcacgctgtcatccgttttcagcataattttaacggctaacccgggaataacgcgtctcggtggatggttgtgtaatgggggggcgcacactatagtgttacgttatgaatactatagaagacaacctcaatcagcgcatcagcgcgcgcatccgcatcgagcgcgagtcccgcggctggtcgctgaacgacctcgccgaacgggccggcgcctcgcgggcgatgatccataaaatcgagcgcggcgaaagcagcccgaccgcctcgatgctgggccgcctttccggcgccttcggcatcagtatgtcgaccctgatcgcccgcgcggaaatgcaggagggcaagctgctgcgctttgccagccagccggtatggcgcgacccgcaaagccactatctccgccgccacgtttcgccgcgcagcgatttgccgatcgatctggtgcagattgagctgccgcccggtagcgatgtgccgatgcccgccgcgtcctatgcgcttgcccgccagctaatctggctgcaacagggcgagctggtgtttgtcgaaggcaatacccgccatgagatgcaggcgggggattgtctggagcttggcccgcccaacgattgtcgctttattaatgaatccgcagagacctgcgtctatctggtggttcgccttaatcaatcgccatccggctcttaatggtaaagcacgttgcgcataaagcagctagcctcagtacagtctgctaacaagaggagtttgctatgacagatcaaccgcaacgccatcgccgctgggtactggcttcccgcccccatggtgaaccgacggcagagaatttccgcctggaagagagcgaagtgccgacgccaggcccgggtcaagtgctgctgcgtaccgtttatttatcactcgacccgtatatgcgcgggcgcatgagcgacgcgccgtcctattcgccgccggtggccattggcgcggtgatggtgggagggaccgtgagtcgcgtggtcagctcaaatcatgccgattatcaacccggcgactgggtgctgggctacagcggctggcaggattatgaactctccgacggcagcggactggtgaagctgggtgacaatccgcaacacccgtcctggtcgctgggagttctggggatgcccggcttcaccgcctacatgggtttgctggacatcggccagccaaaggcgggcgaaacgctggtggtcgccgcggcgaccgggccggttggcgccacggttggacagatcggcaaaattaagggctgccgcaccgtcggcatcgctggcggcgcggaaaaatgccgctatgcggttgagaagttaggctttgatctctgccttgaccatcgtgcggatgattttgccgaacagctggcccaggcctgcccgcagggtattgacgtttattatgaaaacgtcggcggcaaggtttttgacgcggtgctgccgctgttgaataccgcagcgcgggtacccgtctgcgggctggtgagcggctataacgccaccgggctgccggacgggccagatcgtctgccgctgctgatggcgaccatcctcaaaaagcgcatccggatgcagggctttattatcggccaggattacgggcatcggatcgccgagttccagcagcagatggggcgctgggtgcaggaggggaaaattaaatatcgcgaacagctgatcgacggtctggaccaggcgccgcaggcgctgatcggcctgttaaaaggtgagaacttcggtaaggtagtgatccgcgtcgcggcggacgactaacctggcgggcttcgacttaacaggcccctttttccgccagggtaaaggggcctggcatagaggtcaggcgtagaaggctaaccgctgggcgagcagatcgacaaaggcttcgcggtccacatccagcatcagggtggtattgggccgattaccggtcagatggtagtaatcgaccaccgtcattccctgggtatatttgccttccgtttctacgccaacccagcgttcgatcgtggtaaagatctccggcttgaggagccaggcgatggtgcagggatcgtgcagcggcgcgccgtcgaagccccacttttcatctttgtggtaggccataaagaagtcgagcagttcggcgacgatggtcgacaccgggttgccaatctggcggaatcgctcgatatcggcgggaaggatttgcgccttatgggtgacgtcaaggcccgccatcaccaccggggtcccggactgaaagaccatttccgcggcctgcggatcaacgtagatattaaactccgccgccggctgccagttgcccagccccatggcgccccccatgatcacgatgcgggcgatcttcgcgtgcagctccggatggctggcgagcagcaacgccacgttagtctgcggcccggtggccaccagggtcaccggctcctggctttcccgcagcacgctggccatcagctcgacggcggtgcagttctgcggcgcaaaggccggctcaggcaggctcgggccatccagtccgctctcgccgtgcacgttatcggcgatgatcagatcgcgcatcaacggcttccacgcgccgccggcaaccggaatgtccggccggttcagcagcgtcaacatacgcagcacgttgcgcagggtcttctccggggtctggttgcccgcggaagcggtgacggctttcacctccagctccggcgaggcgagggcgaggaccagggcgatcgcgtcatcatgtcccggatcgcaatcaatcataatcggcagtgccatagcagctccttgttggcgatgttctgtgaccagactaacgctgcgagtcggggcagacgagatggtgtgcagaatagtgtgatggagaccacgattgctgcgaggcaacgcgtatcgttacgcgaccgtccgtaaacatggtgccacgttttgcggtggcgcaagatggcgcccggcgcgacgcgatataatagaaaaattgctaatccttacggatattaatggtttgcttttcggtgggcgggttcttatccttaagaaaactcaagaggttattacgatgaaagatgtagtagataaatgcagcaccaaaggctgcgccattgatgtcgggacgatcattgataacgaggactgcgtctaccgggccgagaaggtgttcccaaaccgcgaagaagcggaatccaccgtagccgccgtgcgcgaacgtgctgccgccgcagcgccggccagtgaaccgccgcatgtcgattacaccatcgtcgccgctggcgacgcagtgaaactcgacctctccatcgccttctcctgccaggcagaaaagatcattttcgagttatccctgcgaaatctgctttaattcgctcctgtagcggaagcgcgatgctctggcgggcagacgccttccgctgatgctgcacgctgcccgcccggcgacctgagccgggtgagcgcggttagtcttgaaagacgacgtttccgccaaccatggtcatcaccacgcggctggcgccaatctcctcatgggctacggcgaagatatcgcggtccagcacctgaaaatcagcgactttgccgacctctatcgatccgcgtaccgcttctttcccttcctgataggccgcattgatggtgtacatccgcacgccgtccgccacgctaattgccagttccgggcgaataacgttgccgctggaagatgatttgcgggtgaccgctgcctgaaccattttgcgccagttcaccagcgccataatgccatctgacccgccggcgacgatgaccccaaggtcgatgatatcccgtagccctttgcagatttcccccttgatgccacagtagcgggcgcgctgttcatagtcatatgccgggccgccgggtgagggttgttcggaaagcagaatgccgtattttgccgccatcacgaaatcttgccgatcgcccattgagccgtgcagcacataatgccgtcggctctcccccggatagcgctgaatcgcctgcacgaagctgttaatcgtgacttttaccgccttatcgccgaccgcatggactgccacctgaaaaccgcgctggtgagccagcagaatcatctgctttagcgcctcaacttgtgcttcctcggtcgcctcggggccaccaaacaccgagcgtccgcgatatcccggccggtcggcgtaatcctgattcatccacgctgtgtgcgatgtgggaacgccatcgcagaacagttttatggtccgacagtccagccagtcccggtcggtgaactgggagaaatcaaagctatccagatcgcgcttcagggtggcgcaggactgaacgccccgctcggcggagtaaaaggcgatggatacccgggcggtgagttttccttcatcctgcagttcacggtaggcggcgatggcgcgatcccccgcagcgcccacctcgcgcgtgttttcccccggacccatggcgccttccgtgtagctggcatacccttcgctgttcatcaggcgctgggctgccagaaggttctctttgagggccgctacggtcagacggggcatcgtgccggatgcgagatgcagggcgggcaggtcgatgaaattgccgtccagttcgccactggccgttcgccccagatgtccgccgaggggatcaggggtgctggcgtcaagaccggagagggccagcgcccggctgttgacgatgcaggagtgaccgtcccacagggcgagcagggtgggatgatcggccgtgacgtcgtcaatatcccagcgcgtcagagagcgctgctcggccgcacactccttgattgcgtttggatccagaccgcagacacgaatccatgccccggcgggagtgcgggctgcctggtcgcgcagtctttcccgcagtactgccagggaacgcacgtcctggcagttcaggcaatgccagctgtcagcgagccagccgatatggatatgtgagtcatgtgcggcgggtaaaatgagtttgcccttaaggtcaatgacctgcgtctggggaccaatatgctgctgaatatcctggtcttcaccaacgttaataatccatccctgcttcacggcgatggcgcgcttaaaactaaaatgtgcgtccaccgtggcgaccttgccgttaatcaatacgcagtccgcataaacgacattatccatttatccctccctggctgataaaagtgccgatcaatataaatagtaaccatggtgattatgttgtggctatatgactacgaagggggtggagtgtcaagcgcgggtcgttggcgggtgtccgcctggcggtggaatagacggtaaggaaaagcgcttcgcccgccgatcgcgagaggcatcggcggggaaggggcgtgttattcgaagcgccaggcgaggttcaggccgatgccgtagttacgtcccggggcaggctcgtagtaacgtccgttagactcgttaacgatgacagacccgacgtactcccggtcgaacaggttgtcgatgcgaccgaacagatccatatccatcctgccgtagctccatttatagccagtcgtcaggccaaccaccgtccaggagggcgctttggcggtgttttcgtcattggccatgatatcgctcatatagcgaatatcgctcccggcgtaccaaccttgctccggctgatagccaaaggaggcgtagcccatattgcgcgcgatccccggaatgcgattgccattgcagctggcgtcgtcgcagacgttagtgcgataggtcgcgtccagccaggtccaggccgccttcagacgccagctctcgccaaactgctgatccagccccagctccatcccctgacggcgggtcttgccggcgtttttataactggtgcgcccgccgctgctgctgtcgaccacaatctcattatcggtattggtctggaacagggcggcggtgaacagcccattgccgatccgcgtcttgctgccgatctccaccgtgtcgttggtggagggtttcaggccgaagttgaggccgctctggttatcggagcggtaggagagttcgttaatggttggcgtctcgaagccgcggccggcggaaagatagacgttccacgcgtcggtcagggcatatttcagcgagcccgccggcagccatttgtgatagctggcatcaccgctgtcatcgccattgcctggggtgatgtagtagtcgttcgagtcgaaccataccgagctgtagcgaaccccggcatcgagcgagagtttgtcagtgagctgccactgggtctgcaggtaggggtcgacgttccacatcaggttgcgttcgttacggcgcagcgcgccctgttcgccatactgcggcgcgccgttgaccatcacaaagttttcataccctttgcgccgctcgctcatgttttcgtagtcgagaccggcggtgagcgtgacgggcaccagcagctctccgcgatgggtcagccgggtatcgatcccctggtagtgacgggtaaggtcgatcaccccgccggcatggctcggcttcagctgcggcgcgcgcgggatcgactggaactgagtggtttcacgttctccagcgtacatcataacgctgagatcgtcctgggcactgagctggcgctcatagcgcaggccggcctgggtctgtcgggtattcttgcgggtattatactggtcgccgcgcggcgactggcgcgggttatcgcgccattcatcggcggtcaggccaccggcgtcattggctttgatatccacgctattcagcagcagagtcagcttactgacgtcgttgatgcgcacccccagccgggcgttcgccagatttttgcgcgcgccgctgtgatcgcgatagccatgggtggtgaagcgattggttgagaccgtgtaatccacatcgcctgcgtggctgccgtcgccaacggcgccagtggctttcatcccgtagtgccaggtgccgaagctgccatagtagctgctggcttccacggtgggcggctgggtgccggtctggctggtgacgttgatcaccccgccggacgagttaccgtacagggcagagaaggggccgcgcagcacctcaatggtgtcaacgctgccgatatcaatatttgaggtctgcccctggccgtcgggcatggtggccggaatgccatccacatagatgcgcagtccgcgcacgccataggttgagcgcgagccaaagccgcgaatcgacagctgcagatcctgggcatagttttgccggttctgcacctgcaggcccggcacggcgcccagcgattcagagagattgacgcgcggcgcggcctggcgcatctcatccccattcaccacgctgacggcggcgggggtatccagttcagaaaccgtggttggcgcggcggtcaccaccatggtttgttcatcagcggcctgggctgcggcaatgagcggcaagagcagggccgggagggcggcgtgacgcacggacaggattttcatcgataatactcaaagacgaaccaaatggaacatatgtatatatgttacctcgtttgtaaaatatttgaaaattattaactgctgctggttaacggatagtgctcgccaagcatgaatttaccgcacaacaacaattaacgctccactttgatataaataatgattactattcgcattcaaaaataagggtaaagccaggactttaccgccggaagcgatgtcgggtcagcacatactggtttatcaaagggagtcgtcatgtcattacgtcattttgccgcgccgcgtctgcgccattcactgctcgtcacttctctgctgctggcaggcagctttagcgcccacgccgcggaagagatgctgcgcaaggccgtcggaaaaggggcctacgaaatggcctacagccagcaggagaatgcgctgtgggtcgccacatcacagagtcgttcgctggacaaaggcggggtggtttaccgtcttgaccccacaaccctcgacgtgacgcagattattcacaacgatctgaagccgttcggcgccactatcaaccatgccaccggcacgctgtggtttggcaataccgtcgacagcactgtcaccgctattgacgccaaaaccggcgccgtgaaggggcgcctggtgctggacgagcgtcagcgcagcgaaaccgtgcgtccgctgcagccgcgcgagctggcggtcaatgagcagaccaacacggtctacattaccggtctgggcaaagagagcgtgatttgggtggtagatggcgcaaccctgaagctgaaaacgaccattaccggcaccggggcaatggcgacgggtctggcgatcgatccgcaggctaagcgtctgtataccaccaacgccgatggcgaactgctgaccatcgacagcgagagcaacacgattgcgtcgcgcaaaaaattgcaggatgacggcaaagcgcatttctatcttaacctgagtctcgataccgccggccatcgtgcctttattaccgacagcaagcagccggaagtgctggtggtcgatacccgcgacggcaaggtgctggagaaaatcgccgcgccggagtcgctggcggtactgtttaacccggcgcgcaacgaagcctatgtgacgcatcgtaaggccggggaagtcagcgttatcgacggcaagagctacaaggtggtgaagacctttaaaacgccgactcaccccaacagcctggcgctctccgaggacggaaaaacgctgtacgttagcgtgaaacaggcttccagccgtgagaaagaagccaccgcgccggacgatgtgatccgcatcgccctgtaagacctcagcgcgacgaaaccggaaaacggtggtcgcgctccgcatgccgccgggccaggcccggcgactcaccctctgttacaaacgcctattggcctgacaaaccagatggttatacacttaaccctttcccgccacgtgcgggcagtggtaatcagtggagataaaatgaaaaagccattcatggtgatttgcgccggcgcgatgctggcgctgctggcaggttgttcgtcaaactacgttatgaccacgaagagcggtcaaactatcgttacccacggcaagccgcagctggataaagaaacggggatgaccagctatatcgatgagtcaggtaataagcgggaaattaacagcagcgatgtgtcgcagctggttgaagataattaagttctgacctcccggtttgcccgcgatggacaaaccgggagtcctgccagttacttcctcagcgtcggcgccgtgctgtgaatctcatgcacgcgtttacgcacaccaaaccagccagccaccagcaataccgccagcagcggaattgatcctatggtgtaggtaccgttcggataatcgaaggccatcagcaccagcacgctgaacaggaacagcagcgtcagccaggaggtgaacggcgcccccggcattctgaagctgacctttgccgctttcccttccttgatcgctttgcgcagacgcatctgacacaccacgataaagccccaggaggcaatgatccccagcgaggcgacgttgagtacgatctcaaatacctgagatggcaccagatagttgaggaaaaccccgactacatatacccccagcgtcgccaggatcccggcgtaagggacgtggtgacggctcatcttcgacataaacttcggcgcggagcctcccatcgacatcgagcgcagaatacgcccggtactgtagagacccgagttaaggctggagagggccgcggttaacaccacgatgttcatcacgctgccgatatatggcacgcccagctttgagaagaaggtaacgaacgggctctgtccggcctggtaggcgttccacggcagaagcagcaccagcaacaccaccgaaccgacatagaacagaccgatacgccagatcacgctgttgatggccttcggcaccattgtctccggatccttacactctccggccgcggtccccaccagctcgatggaggcgaaggcgaagaccaccccctgcaccagcaccagcgccggcaggaggccgtgcgggaagaagccgccgttatcggtgatcagatggaagccggtggcattgccgtccagcggcttaccggagccgaggaaaatggtgccgaccacgagaaaggcgacgatcgccagcaccttaaccagcgcgaaccagaactccatttcggcgaaccacttcacgccgatcatattcatggtgccgacgatagccagcgcgccgagggcgaagacccactgcggcacatcgccaaacgcgccccagtagtgcatatacagcgccacggcggtgatatcgacaatcccggtcatcgcccagttaacgaagtacatccagccggccacgtaagcggctttttcaccgaggaactcccttgcataagagacgaagctgccgctcgaggggcggtggaggaccagttcgccgagggcgcgaagaataaagaaggagaagatgccgcagaccagatagaccagggcgagcgctggccctgccatttgtaaacgtgccccggcaccgaggaacaaaccggtaccgatggcgccgccgatggcgatcatctgtacctgacggttgcccatcgctttgtgataacccgcttcatgtgagttaagccagtggcgttttgcagcatgatgctccgctgcattttcgtgtttcgtattcattgatgtatcagtttcctgtcaatgcccatgtttgcagccggaatggaggacggctggcacattatgctggctttctcatcattctgacgtaggagataagctcagacatggcgctgaatcctacacgtaacctaatagttacgcacctaaaacatttaccgagagcatttgacagatttatcaatgagatcagcgtcgcagagtttccagtaacagcgtgaaagcgctggtatgctggcgccggctggggtaatagagatggtagccggggaaggcgggggtccactccgccagcacccgcaccagccggccgctggctaaggcctccgccacgcagtcatccggaacgtaggccagcccaaggcccgcctccgccgcgtcgatgcgctgcggcaggctgttgaggatcagctgtccctccacccgcacctgaatctcccggtcatcgcgggcaaattcccaggcgtaaagtccccctcgtgtcggcaggcgcagattgatgcagcgatgttgggcaagatcccagggcgtttgcggcgtaccggcccgctgcagataggccggcgaacccaccaccgccatccgcatatccggggcgatgcgcacggcaatcatgtcttttgccacctgttcgccgagacgcaccccggcgtcgaagcggtcacccacgatatccgtgagcccattatcaacagtgatttcgatgttaatatcaggatattgcagcataaatggctttagcgccggccagagtaccgcgctggcggcatgctccccggcggtaatgcgcaggttgcccgccgggcgttctcgggtgtcgcgcaatgcagccagggcctgctcgatctcttccagatgcggaccgaggcgctgaatcagtcgctcgcccgcttcggtcggcaccacgctgcgggtggtgcgggtcaacagccggacatcgagccgcgtttcgagatggcgcatggcatggctgagcgccgactgcgacacgccaagctgggccgccgcgcgggtaaagctgcgttcacgcgccaccaccataaaggagagcagatcgtttacgttctcttttagcataatctttccggattgatgaatactgctcacaggtacgcagagtgtatgcccggcctgaggattgtgccagcctgatggccggacgcagtggagcagaatggttatggcggatgatttattcctctgtgcagggcaggtattgtaataggcccaaaaaacgccagcgccaggtgaaccgacattcgctggcgcggcatgaccggggggacggcagcccgaaagatgatcaagagtatcgccaggcagagtctggtaaccgggagaaacagagatgaatatcaacgtggtcggcaccagcggctcaggcaaatccactttggcccggcgcctggcgcaccggctggaattaccctggatcgagctcgatcgcctgtactggcggccgaactggcagggcgcgccggatgaggcatttttcgccgccattgccgccgcgacggccacgccgggctgggtgctggatggcaattacaatcgcagccgcagcgttaaatggcgtgcggtggatttggtgatctgggtagattatggtttctggcgcacgctgcgccaggcggtgtggcgggcgacgagccgggcgtggcggcatcaggagctgtggccgggcacgggcaaccgcgagagctttcgccgttcgttctgcagccgggaatccattatcctctggacgctgaaaacctggcggcagaatcgccgacgctatctggccgatatgcaggatccgcaatatcgtcatattcgcttcgtccgggtgcgcagtccgcggcaggctgaggcgctgctccgcgagctggaagcgcagcggccaggcgggcatatctaattttcagcagtacacatgtgaattaattgtttctcaatagttagctgagattttaataatgcaggcacgtactttcatatgagcctgcgaaatgtcttatcgaatcagtatcctggataaaagtccgcttgccgccggggaaaccgccgcgcaggcgctggcgcgtacattaacgctggcgcaacacgccgaagcctggggctaccaccgcttctgggtcgccgaacaccacaataccgatcagctggcgagcccctcgccggagctggttatcgcctggctgctgggccacacccggcgcattcgtcttgggtccggcggcgtcatgctccagcactatagcccctataaggtcgcggaaaactttaacctgctggccgccctcgcgccgggtcgcatcgatctcggcgtcggcaaagcgcctggcggactgccgctttccacccgcgccctgcagcagggcctgcatcaggaggagaaagggacctttgccgaccagctggcgcagctggataactggctgtcgctgactgagcccggtggagaggagagcctgcgcgccacgccgatcccgccgcgtcgggccgacggtttcctgctcggcgccagcctggagagtgctgaactggccgcccgtcttgactggaacttcgtgtttgcggcccatctcaatggcgacagcgcgctgcgccgcacggtgatcaaccgctggcgcgagctcagcccgcgtgaggcgattgtcgccgtgcaggtggtggtggccgacgatccggccaccgccgccgcgctggcgcagcaggtcgaggtgtggggcgtcgagctggagaacggccagcgggtgaccgtcggcagtgaggcgcaggccgtcgcctttgcccgccaggctggcagccggccgacacgcatccaccgccgcgaatcttcactgatctccggtactcccgaacaggttaaagcccggcttgacgcgctgcaggcggaagaacagttggatgaactcatcattgatacccccattagcgacgggccagcgcgcctgcactccctgcgcctgctggcgcaggctcactacggcaaggaggtgctgaatgtcctttgaacaacaactgattagctggcggcgcgagctgcaccagaacccggagctctccctgcaggaggtagccaccaccgcgcggatccgcgactggctgcagagcggcgggctgactctgctgcccttcgatctgaaaaccgggctggtcgccgaagtcggcagcggcgacaaggtgattgccctgcgggcggacatcgacgcgttgcccatcgaggaggcgaccgggctgccttaccgctcgcaaaatgaaggggtgatgcatgcctgcggccatgatattcacaccagcgtgatgctgggggcggcgctgctgctgaaggagcgggaagcggaactcccggggcgggtgcggatcctgtttcagccggcggaggaaaattttggcggcgcgaaaaccctgatccgcgccggggcgctggaggacgtgtcggcgatctttggcatgcacaatgagcccggcctgccggtgggcgaatttgccacccgcggcggcgcgttctacgccaacgtcgaccgcttcgtcttcaaagtgaccgggaagggggcgcatgccgcccgtccacatgaaggaaaggatgcgatcctgctggccagccagctggtgacggtgctgcagagcgtggccagccgggaagtgaacaccctcgactcggtggtgctcagcgtgacgcggatccagggaggcaatacctggaacgtgctgccggagagcgtcgagctggaagggacgctgcgcactcacagcagtgaagtgcagcagcgggtcaaggcccgggtcagcgagattgccgccggtttcgccagcgcctttggcgcgcagattgacgtcttctggtacgccggcccgacggcgctggtcaacgacgcccgctgggccgatttcgccagcgaggtggcagcccaggccgggtatcgcacccaccatgccgatctgcatctcggtggcgaagattttgcggtctatcttcagcatattcccggggcgttcgtcagcatcggcagcgccagcgaatatggtttgcaccatccggcatttaatccggatgaacggctgattgcgcccgcggcgcactatttcgcccgtctcgcggaagaagcgttacaacacatttaacgaatgacaggggaaggggtagctatgtctgaaaatcgacaattgcgtctgggaaccatattgcatggcgcatcgggaaatatgtccgcctggcgtcatccggcggcccaggcggacgccagtattaattttgatttcgtcacgcagacggcgctaaaagcagaagcggggaagctggattttatttttgtcgccgacggtttatatattaacgaaaaatcgattccccattttttaaatcgcttcgaacccttaacggtactttccgcgctggccgcgatcacccggcgactggggctggtggggaccttatcgacttcctacagcgagccgtttactaccgcccgccagttcgccagccttgaccatttaagccagggacgggcggggtggaacgtggtcacttccccgctggaggggtcggcgaaaaacttctcccgggcccaacatccggatcatgcgctgcgctatcgcattgccgatgaatatctgcaggtggtgaaaggcttatgggattcatgggaagaagacgcctttgtgcgcaataaggagactggccagttttttgataaaaataaactgcatacgctcgatcaccacggcgatttctttaaagtcgccgggccgctgaatattgcccgcacgccgcagggccgaccgattattttccaggccggcgcatcggacgacggcaagaaattagccgcacgccacgccgatgccatttttacccatcaggactcgctggccgaggcgcaggcattttatcgggatgtcaaaagccaactcgccgcatatcagcgcagtccggaccaactgcatattttccagggcgtcagcgtcatcgtcggggatgacgccgaggatgcggagcggcagtaccagaccaccgcggcgctggtctccatcgaggatgcgctgaattatctcgggcgctatttcgaacaccacgatttctcgcagtacccgctcgacgaacctttcccggatattggcgacctgggacaaaacagtttccgcagtacaaccgacgagattaaacgtcacgcccgcgagcggggattaaccctgcgccaggtggctctggaggcagccagcccgcgtccgcgctttaccggcaccgccagcgatgtcgctgatggcctgcaactgtggttcgagcagcatgcggcggacggcttcattattcagggtggcacgccggaaaccttcccgcgctttgtggatgaggtggttccgctgttacaggcgcgcggactgttccgtcgcgactatccgggcaccaccctgcgggaaagtctgggtctggcgctacccgctaatcaattccaaaaataataaaagagaatcacgctatgcagaaaacaacactcttgctggccgtcgcgttggcatttagcgcctcatcgtggggtcaggacgtcaagatcaatggcaccggagtgagcctggaggccaacaaaacgccgattcacacagcgaaaaatccgcaggccattgccctgttgccgcaagatctgcatctggcggtgccggggaaattcaccgtcgcggtggcggccctgaactctccgccgctgacggtctttgccgatgacaacaaaaccctgctcggcagcgaggcggatatcgcccggctggtggcggagagcctcgggctggaagtaaacgtggttcccacttcatgggaagactggccgctgggggtcacctccggcaaatatgatgccgcgatcagcaatattaccgtcaccaaagagcggaaagagaagttcgatttcgccacctaccgcaaagactcgctgggcttctacgtcaaaagcaccagtccgctgagcaagattgacaaagcggaagatatcgccgggctaaagattattgtcggctccggcaccaaccaggaggcgatcctgctggcgtggaacgcggagaacgtcaagaaggggctggagccgtttatcccggtctacaccaaggatgatgccgcccagacgctggccctgcagaccggacgagccgacgccttcttcggccccaacgtgattggcgcgtggaaggcggcgctgaccggcaaaaccaaactggtgggtagcgtcgatggcggctggccgaaagcggcgcatatcgcggtaacgctgaaaaaagacagcgggctggtgaatgccgtccaggcggcgctgaacggggctatcgccagcggggactacgccaaagtgcttaaccgctggggcgaaggggtggaaagcattccgcaatcggaaatcaatccgcccggactgggcgactgacaggaggcgcgatgagcgaagcattccgcgatatttctccggaggctccggagctgcagccgattattagcgggctgtttgccgaatatgccgcccgctacggcgactatttttcccgcgatgcggaagtggagttaagtgagtggtatgtgccaccgcaggggctgtttattgtccttgagcgtgagggcgaaattatcgccaccggcgcgtataagccgaaggatcgccacaccgcggagatcaaacgtatctggacgcaccgccgtctgcgccagcaggggctggcggcgaaggtggtccaggagctggagcgacgggcggtgctggccgggtacagccatatctacctgaccaccggtttccgtcagccggaggcggtaaagctctatctcagccaggggtatgaggcgcagtttgacctcacgagagacccggaagagtacagtcagccgacgtacgatggccggctgcggttcactaaagcgctggcggtgagcgcctacagccacagcgcctgaggaggcattatgcattcatctgaaacgatcaaagtggtgccggcgcgctatccgctgcgggtggtcggggctctggtcgccctgctggtgctggcggtggtgatccagtcggtggcctttaacccgcgctgggagtggggcgtcttcgcccgctggttcttcgacccggtgatcctcgaggggctggggcaaaccctgctcctgaccctgctcggcacggtgctaagcgtgatcttcggcggcctgctggcgctggcccgtttgtcctcatcgtggctgctcagcagtctcgcctggggctatatctggctgtttcgctcgctgccgctgattgtggtgctgatcattctctataacttttcctatctctacgacaccctgtcgctggggatcccgtttaccggcgtgacctgggccagctatcagaccattaacgtgctggggcaattctccacggcggtggtgggcctgaccctggtgcagagcgcctataccgcggagattattcgcggcggctttctcggcgtcgaccacgggcagtatgaagccgccgccgcgctggggctacccgcctggcggcgcacgctgcgcattattctgccgcaggcgctgcgcaccatcctgccatccggcttcaacgagatcatcagtctggccaagggaacggcgatggtgtatgtcctggcgatgccggaactgttctacaccatccagatgatctacaaccgtacccaggaggtgatcccgctgttgatggtcggcgccgcctggtatctggcgatcaccagcgtcctctccgccattcagtatctggtggaacggggcctggcgcgcagcgagcgccgctcggcggtaaacagcgcccgcagcagccgtctggatcaacccgcacgtcaaccacagccgcaggaggccgctcatgcccagctctcataatggccatatctctatcaccggagtcagcaaatactatggccgccacaaggcgctggacgatgtgtcgctggagatccccccgggcacggtgacggtgatcctcggcccttccggttcgggcaagtccacgctgctgcgcaccataaatcacctcgaacgggtcgatgagggatttattcagattgacggcgactatatcggctatcgccgcaaaggcgacaagctgtatgagatgaaagaaaaggaaattcttcgccagcggatcaacgtcggctacgtgttccagaactttaacctgtttccgcacctgacggtgctggagaacctgattgaggcgccgatcgcccaccagcaggtcacgcgcaaagaggccattgcccgcgcctatgagctactggacgtcgtcggactgcgcaataaagccgacgcctggtcgcggcatctctccggcggccagcagcagcgtatcgccattgcccgggcgctggcgctgaacccgcgggtgatcctgtttgatgaacccacctcggcgctggatcccgagctggtgggcgaggtgctggatgtcatcaagaagctggcgcgatcgggcaccaccctggtgg

SEQ ID NO: 65 - DNA, 139178 bp, Unknown
  source: /note="Description of Unknown: MKP2_coc_1 Mutant Bacteria sequence"
cactttacccggccgagtatcgttatcaaacctaacgccaatgcccggccgtgtggcgataccaccggttacctggcgaacccgaaggaggtgtgagatgggaaacggatggcatgaatggccgctgatggtctttacggtcttcggccagtgcgtcgtaggcggctttattgttctggcgctggcgctgatgacaggcaagctttcccgtgagcaggagcagcgcgtggtgggcagcatgttcggcctgtgggtattgatggggatcgggtttattgcctcgacgatgcaccttggctcgccgctgcgggcctttaattcgctgaatcgcgtgggagcctcgtcgctgagtaatgaaatagccagcggggcgatcttcttcgccgtcggcggaattggctggctgctggccgtgtgcaaaaagctgcctgccggcctgcggagcctgtggctggtggtgaccatggtgctgggcgtgattttcgtgtggatgatggtgcgggtgtacaacaccatcgacacggtgccgacctggtacaccgtttggacgccgctgagcttcttcctgacgctgtttatcggcggtccactgctgggctacctgctgctgcgcgtcgcgggcgtcgatggttgggcgctgcgcctgctgccggtggttagtttgctggcgctgctggtcagtattatggtggtcgtgatgcagggaagtgaacttgccactatccgcagctcagttcagcaggcctccgccctggtgccggattacgggttgcttatggcctggcgcgtggtgctgctggccctggccctggccctggcctgctggtgcgtgccgcagattcgcggccgcaaaccggcggtctcgctgctcggcctggcctttgttctgatactggcgggagagatgatcggccgcggcgtattctatggcctgcatatgaccgttgggatggctgtcgccagttaaccacctccatcatgccggtgcctaaccaccggcatgatgaaaacgtgctgtcgatagatgaaatttttcaactgaaattaacttcggcatttattaataaactagcaaaaacaatagcgtattatctgttgtctcacctttttccatcctctggataaaaaacttctatcgtagccgacaaaaccgcgtcacgcctgatttcaggtggattgacaatgtttttagcagtggcatgatgcgctcgcgatctgaacattcctcacggtttttacccatgaccatctacacccggccagtgcaaatgctgctctgtggcctgcttttattgaccctggcgatagcggtgctgaatacgctcgtcccgctctggctcgcccatgaaaacatgccaacctggcaggtcggcatggtggggtcatcctattttaccggcaacctggccggtacgttgctggccggctgggtgatcaagcgcctggggtttaaccgtagctattatctcgcatcgttaattttcgccgtcggctgcgtagggctggggatcaccgttggcttctggacatggctgagctggcgttttatcgccggcgtaggttgcgcgatgatctgggtggtggtggaaagcgcgctggtttgcagcggcacttcccgcagtcgcggtcgtctgctggcggcgtacatgatggtctattacgtcggtaccgtactgggccagctgatggtcagtaaattacccaccgatttaatgagcgtcctgccgtgggtgaccggcctggcgctggcggcgatcctgccgttgctgtttacccgcattatggggcaggcagaagagccgcatgaaacggtacgtatctggccgatgctgaagctacgccaggcgcgccacggggtcaatggctgtattatttcggggattgtcctcggctcgctgtatggcctgatgccgctgtggctgaaccatcagggcgtcagcgactccggcatcggcttctggatggcggtgatggtgagtgcggggatccttggccagtggccggtagggcgcctggcagaccgctacggtcgcctgctggtgctgcgggtacaggtctttgtggtcattctgggatgtctggcgatgcttagtcaggcggcaatggccccggcgctgtttgtgcttggggcatctggtttcacgctgtatccggtggcgatggcctgggcctgtgaaaaagtggagcaccatcagctggtggcgatgaatcaggcgctgctgatgagctataccatcggcagcctgctgggcccgaccctgacggcgatgctgatgcagaacttctcagacaacctgctgtttatcatgatcgccagcgtgtcgtttatctatctgctgaccctgctgcgcaaagccgggcatcatccgacgccggtggcgcacgcctgaccctgcaacgcgcagcgcatgctgcgcgtcatctgctgcaatcgcataggcttactgccgcagagaggacaagtcgtttttcatgagaatgaaacggcggggcggacacagcttcccacgccgttgcaggccggcataagcgcatcaccggcccgggcgggattagtacattactttgtgaccatactgctcaaggatgccttttacccgctccatggtctctttcttcggcggatggacgccgtccagcttgtactcttcgcccatcgctacccatttgtgtttacccagctcatggtagggcagcagctcgattttttcgacattgcccatatcgcgggtaaattcgcccaggcggtgcgcggaatcatcatcgtctgaccagccgggaaccaccacgtagcggatccagacattgatattcttcttcgccagatactgggcgaattccagcgtacgatggttagagacgccgaccaggttctggtgaatctcatcgttcatctgcttgagatccagcatcaccaggtctgttacctccagcagctcgtcgataaccggatcgtagcgacgtacgaagccgttggtatccaggcaggtgtggatgccttctttcttacacgcgcggaaccagtcgcgaacaaactccgcctgcaggatcgcctcaccgcccgaggcggtgacgccgccgccggaagcattcataaagtgacgataggtcaccacctctttcattaattcttcaacggtgatttctttgccgccgtgggtatcccaggtgtcacggttatggcagtacaggcagcgcatcaggcagccctggaaaaaggtaataaagcggatgcccgggccatcaacggtgccacaggattcaaaggagtgaatgcgaccaataactgacattgcggtgttttctccagatgtggcccatccggggccgtgttggtgcgcagctcagcggctgcgtcgagtctgttttgacaggtacccaaagtatagataactggcaaagcaggctggggcggggaatgcttgttaaaaaggccccactgatgtggggcctttattgtacgccttttcagtcagacagggaattacatggtctgagtgaaggtacgggtaataacatcctgctgctgttctttggtcagggagttaaaacgtacggcgtagccagatacgcggatggtcagctgcggatatttttccgggttttccatcgcgtcgagcagcatttcgcggttcatgacgttcacgttcaggtgctgaccaccttcgatggacgcttcgtgatggaagtaaccatccatcagacccgccaggttggtcttacgaacttcgtcgtctttacccagcgcgttcggcacgatagagaaggtataagagataccatctttcgcgtaagcaaacggcagtttagcgacggaggtcagagaggctactgcgcctttctggtcacggccgtgcatcgggttagcacctggaccgaacggcgcgccagcgcgacgaccgtctggggtgttaccggttttcttaccgtacaccacgttagaggtgatggtcagaacagactgagtcgggatagcgttgcggtaggtgtgcagtttctgaattttcttcatgaaacgttcaaccaggtcaacggccatgtcatcgacgcgagggtcgttgttaccaaactgcgggtattcgccttcgatttcgaagtcgatagccagaccgtcttcgtcacgaatcggtttaactttcgcatatttgatagcagacagggagtcagcagcaacggacagaccagcgataccacacgccatggtgcggataacgtcacggtcgtgcagcgccatcagagaggcttcgtagctgtacttgtcgtgcatgtagtggatgatgttcagcgcggtgacgtactgtttagccagccagtccatgaagtgatccatgcgatccattacttcgtcgaagttcaggacgtcgcctttgatcggttcagatttcggaccaacctgcattttcagtttttcatccacgccgccgttgatagcgtacagcatggttttcgcgaggttagcgcgagcgccgaagaactgcatttgcttaccaacaaccatcgggcttacgcagcatgcgatagcgtagtcgtcgttgttgaagtccggacgcatcaggtcatcgttctcatactgcagagaagaggtatcgatggacactttagcggcgaatttcttgaagctcagcggcagtttttcagaccacaggatagtaatgttcggctccggagacggccccatggtgtacagggtgttcaggaagcggaagctgtttttggtcaccagagtacggccgtcaacgcccataccgccgatggattccgttgcccaaatcgggtcgccggagaacagttcatcatattccggggtacgcaggaagcgaaccatacgcagtttcatgaccaggtggtcaaccatttcctgcgcgtcttgctcggtgattttacccgcctgcaggtcacgctcgatgtagatatccaggaagctggaggtacgaccgaaggacattgccgcgccgttctgagatttcacggcagccaggtaaccgaagtaggtccactgaatcgcttcctgagcggtggtcgccggaccagagatgtcatagccatatttagcggccatctctttgatctggcccagtgcgcggtgttgttcagcgatttcttcacgcagacggatggtcgcttccaggtcttcgccgctttccagtttcgcttgcagagagttgaactgggcgaatttgtctttcatcaggaagtcgataccgtacagcgcaacgcgacggtagtcaccgatgatacgaccacgaccgtaagcgtccggcagacccgtcagcacgccggatttacggcagcgcaggatgtccggggtatagacgtcgaaaacgccctggttgtgagttttacggtactctgtgaagatttttttcagcatcgggtccagctcgcgattatacgctttgcaggaaccttcaaccattttgataccaccgaacgggatgatcgcacgtttcagcggcgcttcggtctgcagaccaacgattttttccagacctttctcgatatagcccgcgtcgtgagaggtgatggtggaagccagggcagtgtcaaaatcaacaggcgcgtgagtgcggttttcctgttttacaccttccattacggtgtcccacagcttggtggtcgcttcagtcgcgccagccaggaaggattcgtcgccttcatatggggtgtagtttttctgaataaagtcacggacgttgacttcattctgccagtcacctttcgcaaaaccttcccaggctgtggctaacttttcattaagctcggacatgtaacacctaccttcttaagtggattttttatttactgcctgaaacaacccttagtgatggtcgttgccacgcaggtaaatgacccagtatgtcaacccgaccagcagacccccgccgataatgttcccgatagttaccggaatcaggttatcagtgatgaagttcataacggtcaagtgagagaaactttccggagtcgaaccgatggcggtccagaattccgggcttgcaaagttgcggattacgatacccatcgggatcataaacatgttggcgatgctgtgctcaaagccgctggcaacgaacatcgctaccggcaggaccatgatcatcgctttatccatcaggctacgaccggaatagctcatccatacggcgagacaaaccatcaggttagcgaggatacccaggctcacggcctccacaaaagtatggtgcattttgtggtcggcggtctgcagaacgtttagcccccagccgccgttggcagtcatatattcgcctgataaccacatcagcagcacaaacagcagcgcgcccaccaggttaccaaaatagacgttgagccagttttttgccagttgcccccaggtaattcgaccgctggctttggccaccacgatcagtaccgtagaggtaaagaggtcagcgccgcagataacgcacagaatcagacccagagaaaaacagatcccaccgataagtttggcaatcccataaggcatcgcggcagtgccggtggtcgcggtgatatagaatacgaaagcgatggagatgaaaacgccagcggtgatcgccagataaaacgtcttcatcggatgcttcgttgctttatagacacctgcttcttcggcgactttcgccatcgcggcagggagcaaaagatcaaaagggttgtcagctttcacactaactctctctttatataagttggcggtgagatactaacaaagcattatagaagggaaattgatatagatcatatctcaccggaactatatgcctttttagtgtgtggtttttattgaaattatccgtaagctaatgaaatatatagagaaaataatttttaaattttatagataatgttgaattttttcttttttacccccatttttgagttaattaaaatggagtatttttattaaatttaacaattgataaatgatgaaatggcgttatttaacattaattaactttacaactacaaattataggaggcgctttctcagggttaaataacggagccgctgagggctccgttgtaagcattaacgatggcgcaagctgggcttattttgcccaaaacgccgctttcgcccgctgcagtttttcataggctttcagcagcgactgatgggccgggaaggcctgcagatcgctatcgaccgcctggagaccatagaacggcgcttccccgctcagcgccgcgctggcggcttcgaccgcgtcggcgccgtacatacggatgaaggcgttcaggtactgcagcggctgacgctcttcttcctggctcagcagcagcagggtttgcagacagcgatagtagttcgcgcgctccgcgctgaagaccgaagcattaaattccatggtccactcggtccagatcagcgcctgttccagatcgccgccggccagggccagcatcgctttcagctcgccgacgcgcagggtataccagccgttgtcttttccggtggcgagccccagcagttcgcgaacgcgggtgaaatcatccagaccctcatcgtccatctgctcgatcagcgccaggtaatcttctttatcccactcgctgcccggcagggacagaatggtgtcccgcagatgagcgcccatgctgttgttcgccagccacaggtcttccgccgggtatatgtccgacatccccgggacgatgatacggcaggcgtaaacgcccaggtgctcgtagtcggcgatgtacacttctttatcttcggccttgaagatggccatcagggtggcgaactcttcttcggtagtaccagagaagctccagtcaacgaatggatagtcggcgtcctgcttgaacatatcccaggagatcaggccgctggagtcgataaagtgggtttcgaggttcgcgtgctcggcgacctcttcgtcatcgaaggttggcggcgtgaagacatcgaggtctttcaggctgcggccctgcagcagttcggtgacggttcgctccagcgccacgccaaagtccgggtgggcgccgaaggaggcgaagcaggtgccgttagccgggttaaacagcacgacgcagataaccggatatttgccgccgagcgagccatcataggcaaagatcgggaaaccttcagcttccagtttggcgatcgattccacgacgcccggatagcgcgccatgacttccgccgggatctccggcaggctgatgctttcagcgatgatgcggtttttaatgtgacgttcaaagacctctgacagaccctgtacccgcgcttcgttgcgggtgttaccggcggacatgccgttggagacgtacaggttgccgacaatattcatcggaatatagacggtttcgccgtcggactggcgggtaaaaggcagaccgcacacgccgcgctcatcgttacccgactgcagatccaccagcatactggccgttaactgatcgtcaggatcgtagaacgcgcgcaggcgggcatccagcagaccttccgggacttcatcatcctcagtcagcgggaaccacttttcgttcgggtagtgaacaaacgggccgttagcgatagtgtcgcctaaccagaagtcggcgaagaaatagttagtggacagacgttcgaaatattcgcccagcgcggaggccagggctgcctttttggtggcgcctttaccattggtaaagcacagcgcgcacgctttatcgcgaatgtgaacggaccacacgtgcggcaccgggttcagccacgaggcctcttcgatatcaaatccgaggtcgagcaatttctgctggaagcgagcgatggaatcttccagggcggcatctttgccgggaataaacgtttgggtcatggcgatcacttttgtcgtacggaaagcgcgcaatgatacggcttttatctgacaggtgctatctccatcatctggctatgcttagaggcatctttaatacacagggagatggaaaatgaaagcctttgactggcagcggatggcgctcgataaagtaccggtggaattcctggcggaggtggcgttgcgcagcctctataccttcgttctggtctttattttcctcaagattaccggacggcgcggcgtgcggcagatgtcgctgttcgaggtgctgattattttgaccctcggctcggcggcgggtgacgtggcgttttatgacgatgtgccgctgctgccggtgctggtggtcttcgttacgctggcgctactgtatcgcggcattatgtggctgatggggcatagcgaaaagctggaggatctactggaggggaaacctatcgtagtggtggaagagggacagttggcctgggagaagctgcatgcggaaaacatgaccgaattcgaattttttatggagctgcgggtcaacagcgtcgagcagcttggccaggtccggctggcaatcctcgaaaccaacgggcagatcagcgtgttttattatcccgatgaagaggtgagggccggattatcgatccttccagcgcattgtaccacacgctataccaccattccgcaagaggggatctatgcctgcgtgcgctgcagcatcgtaatggcgatgcaggcgggagaaaaacgaatatgtccgcgctgcgcaaatgcagaatggtcgaaggccagccgggcgaaacggcttacctgacagcaaatatgtcggttttattacgtcaagccgatagattctgttgtgtgacggcggccgcgttttaccgtcggcgagttttagccattgcggaccttgtcactgaatgataaaaccgatagccacaggaataacttatgcccgcggcggttcgcgggcaaaacaacatagcaacgtggtgaggggaaatggctcaggtctataacttcagttcgggcccggcaatgctgccggcggaagtactcaaactggcgcagcaggaactgtgcgactggcacggtctggggacgtcggtcatggagatcagtcaccgtggtaaggagtttatccaggtggcagaagaggcagaacaggacttccgcgctctgctgaacatcccttccaactataaagttttattctgccacggcggcggccgcggccagttcgccgggatcccgctgaacatcctcggcgataaaaaggtcgctgactatgtggacgccggctactgggcggccagcgcggtcaaagaggcgaagaaatactgcacgccgaacgttatcgacgcgaaaatcaccgtcgacggcaagcgcgctgtgaagccgatgagcgagtggcagctgaccccgggggcggcctatctgcactactgcccgaacgaaaccattgacggtatcgcgattgatgagacgccgaacttcggcgacgacgtcatcgtgaccgccgatttctcctccaccattctttcccgcgaaattgacgtcaaccgcttcggcgtaatctacgccggcgcgcagaagaatatcggtccggctgggctgacgctggtcatcgtgcgtgaagatctgctgggcaaagccagcgtggcctgcccgtcaattcttgactacaccgtgttaagcgagaatgactcgatgtttaacacaccgccgacgttcgcatggtatctggctggactggtgtttaagtggctgaagcagcagggcggggttgccgcgatggataaaatcaaccagcagaaagccgaactgctctacggcgtgatcgataacagcggcttctatcgtaacgatgtggcgcaggccaaccgttcgcgtatgaacgtaccgttccagctggcggacagcgccctggacaaactgttcctcgaagagtcgtttgctgccgggctgcacgcgctgaagggccaccgggtggtgggcggcatgcgtgcttccatctacaacgccatgccgctggacggcgtgaagacgttaaccgactttatgctggacttcgaacgccgccacggttaatcgcctgtttctttcttcctccccgcggcctgtctgcggggtttttattctgtttgtttgagagtgaagtttgatggaatccctgacgttacaacccatcgcacgcgtagagggcaccgtgaacctgccaggttcgaaaagcgtctccaaccgcgcgctgctgctggctgccctggcccgcggcacgacggtgctgaccaacctgctggacagcgacgatgtgcgccatatgctgaatgccctgagtgcgctgggggttcaatataccctgtctgccgaccgcacccgctgcgaagtgaccggcaacggcggcccgttgcgctctgccgcggcgctggagctgttccttggcaacgccggtaccgcgatgcgtccgctggcggcggccctgtgccttggcagcaacgatatcgtgctgaccggcgaaccgcggatgaaagagcgtccgatcggccatctggtggatgccctgcgtcagggcggcgctcagatcgactatctggagcaggaaaattatccaccgctgcgcctgcgcggcggttttcagggcggcaacgtcgaggttgacggcagcgtctccagccagttcctgaccgcgctgctgatgaccgcgccgctggcgccgcaggataccgtcatcgtcattaagggcgatctggtgtcgaaaccctatatcgacattacgctgcacctgatgaaaaccttcggcgttgaggtgggcaatcagtcttatcagcgatttgtggtgcgcggcaagcagcagtatcagtcgccgggagattacctggtggaacgcgatgcttcctcggcctcgtatttcctcgccgctggcgccattaagggcggcacggtaaaagtcaccggtatcggccgcaacagcgtacagggcgacattcgtttcgccgacgtactggagaaaatgggcgccaccgttacctggggcgacgatttcatcgcctgcacccacggcgagctcaaggcggtcgatatggatatgaaccatatcccggacgccgcgatgaccatcgccaccgccgcgctgttcgcgcaagggaccactaccctgcgcaatatctacaactggcgggtcaaggagacggaccgtctgttcgccatggcgaccgagctgcgtaaagtgggcgccgaggtggaagagggggaagattatatccgcatcaccccgccggcaaagttgaagtacgcagaaatcggcacctataacgaccaccggatggcgatgtgcttctcgctggtagcactgtctgatacgccggtgaccatccttgatcccaaatgtacggccaaaacgttccctgactactttgagcagctggcgcggatcagtaccctcgcctgagtaaaactttgtcatcccgcgggctgatgtcctgtcagcccgctataattgcgcaaaacttctgcttttcatttcctgtagtccgtaatttacaagcaatgctcactttccggcgtattgatgcgtataatgcgcgtcgtttatattccatgcgccttgctgaaggagaaaaagatgacggcgaatattccggtaatcaccattgatgggcctggcggtgcgggtaaaggtacgttgtgcaaggcaatggcggaagcgctgggctggcatctgttagattcaggcgcgatctaccgcgttctggcgctggcggcgctgcatcatcatgtcgacgtggagtccgaagaggcgctggtgcccctggctgcccatcttgacgtgcgttttatttctactgacggcaacctggaagtggtgctggaaggggaagatgtcagtagcgaaattcgcactcaggaggtcgcgaacgcggcctcgaaagtggcggcttttccgcgcgttcgcgaagcgctgctgcgccgccagcgcgccttccgcgaactgccggggcttatcgccgacggtcgcgatatgggaacggtagttttcccggacgcgccggtgaaaattttcctcgatgcctcggccgatgagcgggcgcatcgccgcatgcggcagttgcaggaaaagggctttgatgttaactttgaacgtcttttgtccgagataaaagagcgtgacgatcgcgaccgaaatcgcgccgtggcgccgcttgtcccggctgccgatgcattagttctcgattcaaccgaactaaacattgagcaagtgattgaaaaagcgctacaatatgcgcgcgaaaaattggccgttgcgtaggccttaaccggtaacgcgccgaagcctccgaattatagcagtaccccgcggcaatggatggtcagcgggtatgtgaaacaaccccatccggcatggagccaggtggacgttaatattaacctgaagattaaacatgactgaatcttttgctcaactgtttgaagaatccttaaaagaaatcgaaacccgcccgggttccatcgttcgtggtgttgttgttgctatcgacaaagacgtagtactggttgacgccggtctgaaatctgagtccgccatcccggctgagcagttcaaaaacgcccagggcgagctggaaatccaggttggtgacgaagttgacgttgctctggatgcagtagaagacggcttcggtgaaactctgctgtcccgtgagaaagctaaacgtcacgaagcttggatcacgctggaaaaagcttacgaagacgctgaaactgttaccggtgttatcaacggcaaagttaaaggtggcttcactgttgagctgaacggtattcgtgcgttcctgccgggttccctggtagacgttcgtccggtgcgcgacacgctgcacctggaaggcaaagagcttgagttcaaagtcatcaagctggaccagaagcgtaacaacgttgttgtttctcgtcgtgccgttatcgaatccgaaaacagcgcagagcgcgatcagctgctggaaaacctgcaggaaggcatggaagtcaaaggtatcgttaagaacctcactgactacggtgcattcgttgatctgggcggcgttgacggcctgctgcacatcaccgatatggcctggaaacgcgttaagcatccgagcgaaatcgtaaacgttggcgacgaaatcactgttaaagtgctgaagttcgaccgcgagcgtacccgtgtatccctgggcctgaaacagctgggcgaagatccgtgggtagctatcgctaaacgttatccggaaggtaccaaactgaccggtcgcgtgaccaacctgaccgactacggctgcttcgttgaaatcgaagagggcgttgaaggcctggttcacgtttccgaaatggattggaccaacaaaaacatccacccgtccaaagttgttaacgttggcgacgttgtggaagtaatggttctggatatcgacgaagagcgtcgtcgtatctccctgggtctgaagcagtgcaaatctaacccatggcagcagttcgcggaaacccacaacaagggcgaccgtgttgaaggtaaaatcaagtctatcactgacttcggtatcttcatcggcctggacggcggcatcgacggcctggttcacctgtctgacatctcctggaacgttgcaggcgaagaagcagttcgtgaatacaaaaaaggcgacgaaatcgcagcagttgttctgcaggttgacgcagagcgtgagcgtatctccctgggcgttaaacagcttgcggaagatccgttcaacaactacgttgctctgaataagaaaggcgctatcgttgttggtaaagtgactgcagttgacgctaaaggcgcaaccgtagaactggctgacggcgtagaaggttacctgcgtgcttctgaagcatcccgtgaccgcgttgaagacgcaactctggttctgagcgttggcgacgaagttgaagcgaaattcaccggcgtggatcgtaagaaccgcgtagtgagcctgtctgtacgtgcgaaagacgaagcggaagaaaaagacgctatcgctaccgtgaacaagcaggaagacgcgaacttctccaacaacgctatggctgaagcgttcaaagcagcgaaaggcgagtaatctttgtcattcaggtaataacaacctgaatagcgacgagtttacttgacagattgcaggattcgtcctgtaatcaagcacaaagggcggctacggccgcccttgtttaagctgttagctaatttttgccttgaaggaaaccggaggaataatgaccaagtcagaattgattgaaagacttgccagccagcaatctcacattccggcgaaagcggtggaagatgctgttaaagaaatgctggaacatatggcctcaacgcttgctcaaggtgagcgcattgaaatccgcggtttcggcagcttttctctgcactatcgagcacctcgcaccggacgtaacccgaaaactggtgataaagtcgaactggaaggtaagtacgttccgcactttaagcccgggaaagaattacgtgaccgcgccaatatttatgaagggtgagttgcacgacgtgcagcctgcctgacgataaagaaagcaccttcgggtgctttttttgtgcccgccatttacggccatcctcacaaaaaaagcgtgcccggctgcaagcgaggcgattgtctggaatgcgccgcgcaagcctgaattcgccgccaggacgccagcaccgctttgcgtaacactgtccactcacagggaggtgtttatgcgtctaccatggcttgccggatgcgccatcattgcaatgctgccgcttctctggctacccgtcttgccgggcccgtacagtctggcgggcgcgagcgcactggcgctggcgctgattcgtctgcatggaagggccgtcgccggagtggcgatgacgcttctgctggtggtctggggagtattgagcgcgcatcaggcgctgtggccgacccggcaccttaccggcgccatccggcaagcggaagtgatccttagcgagacggatggccagaccttgcaccgtggacaaatggtgcgcctgcggggccgctatctgtttcccccggtaggcgtaacgctgtacggggaacttgcacctgcgccagcctgtgcgggtcaacactggctgatgacgctgcgcctgcgcccggtgcacgggcagctcaatgacgggggcttcgacagccagcgctatgcgctggcgcagcaccgaccgctgagcggagggatcgtcgccgcttccgcgctggatgcccgctgcagtctgcgcgcccgctatctgacgtcgctgacccggcgactgcagacttatccctggcgcgcggtgatgttgggattaggaatgggggagcggctgtctctgccgacggagataaaggtcctgatgcagaacacgggcacttcccatctgatggctatctcgggtctgcatatcgctctcgcggcttctcttatcatgctgttgctgcgcggcgtgcagtatattctcccgggacgctggattggctggcggttgccccttgtcgccgggctggcgggcgccgtcggctatgcctggctgaccggtatgcagccgccggccctgcgcacttgcttagggcttgcggtctgttgtgctttacgtttgtcgggtcaacgctggacggcgtggcaggtgtggctctgctgtctgggagcgatactggttgccgacccgctggcggtgctgtcgcaaagcctgtggctatctgccttcgccgtggcggggcttatcttctggttccagtggctcccgttgcctgccggccgctggcgctggccgtggaagaccataattgctcttgttcatttgcaggctggcgtgacgctgctgctgctgccgctgcagttgttgctattccatggagtcagcctgacgtcgatggcggctaatttgctggcggtaccgttagtcaccctgttggcggtgccgcttattctgaccgcgatgctggtgcatctctcggggccggatatagtggagtcgctactctggctggcggccgatcgcgtgctggcgctactgttttggggattacgacgtttaccggacggctggttgacgctggatgctcgctggctgtggatcagtatcctgccgtggctgttggtgatgggctggcgttttcagagctggcggcattcaccggcgctgtgtctcagcgtgctgtttttactgacgcggccattcagccgacaaccgcctgcggacgaatggcgggtgacgatgctggatgtcggacaggggctggcgatggtgatcgagcgtcacggtaaggcattgctttacgataccgggccggcttggccgcagggtgatagcggtcaacaggtgattatcccgtggctgcgctggcaccatctgcagttgcaagggattatgctgagccatgaacatctggatcatcgcggcggccttgattcagtgctgcaggcatggccgcaggcgtgggtgcgcagcccgttaggctgggcgcatcatctgccgtgtcatcgcggtgagcgctggcaatggcagggactcaacttccaggccctgtggccgctaccgggcagcacggcaaagggtaacaatcattcctgtgtggtgcggatcgatgatggtcgctccagcatcctgctcaccggcgatatagaacgtcaggcggagcaggcgatgatcagccgttactggcggcatctgacgtctacacttattcaggttccccaccacggcagcaatacctcctccagcgcgctgctggtccgccgggtggatggcgcggccgcgctggcctccgcttcgcgctacaatgcgtggcggatgccctcgtacaaggtggttcagcgctaccgccagcggggttatcgctggttcgccacgccgcagcaggggcagataacggtggttttttccgcagaagggtggcaaatccatagcttacgggatcaagttttaccgcgttggtatcatcagtggtttggcgcgcccgccgataacgggtagaatatgcggctatttcaacacaagctggtttattgaatgcagaacgataaagatctctccacgtggcagaccttccgccgactttggccgattatcgcgccgtttaaagccgggctaatcgtagcggcggtggcgttggtgcttaacgcgggcagtgacaccttcatgttatcgcttcttaaaccgttattggatgatggttttggtaaaacggatcgctcagtgctgctatggatgccgctggtggttatcggcctgatggtgctgcgtgggatcaccagctacatctcgagctattgtatttcctgggtttccggcaaagtggtgatgaccatgcgtcgtcgcctgttcggccacatgatgggtatgccggtggccttctttgacaagcagtctaccggaacgctgctgtcacgcatcacctatgattctgagcaggtcgcctcctcctcttccagcgcgctgatcaccgtggtccgcgaaggggcatcgattatcggtctgttcgtgatgatgttctattacagctggcagctgtcgctgatcctgatcgtactggcgccgattgtgtcggtggcgatccgcgtggtctccaagcgttttcgcaatatcagtaagaatatgcagaacacgatggggcaggtcaccaccagcgccgagcagatgctgaaagggcacaaagaggtgctgatgtttggcggccaggaagtggaaaccaaacgttttgataaagtcagcaataaaatgcgtctgcaggggatgaagatggtttccgcctcgtctatctccgacccgatcattcagcttatcgcctccctggcgctggcctttgtcctgtatgccgccagcttcccgagcgtgatggacaccctgaccgccgggaccattaccgtggtcttctcctcgatgattgcgctgatgcgtccgctgaagtcgctgaccaacgtcaatgcccagttccagcgcgggatggcggcgtgccagacgctgtttgcgatcctcgattccgagcaggaaaaagacgaaggtacgcgggtcattgagcgggcgaaaggcaatctcaagttcgagaacgtcacctttacctacccgggtcgcgaagtggccgcgctgcgcaatatcaatctcgatatcccggaagggaaaacagtggcgctggtggggcgctcagggtcgggtaaatcgaccattgccagcctgatcacccgcttctacgatgtcgacgaggggcagatcctgctggatggccacgacctgcgcgagtacaagctgagctcgctgcgcgaccaggtggcgctggtttcacaaaacgtgcatctgttcaacgataccgtcgccaacaatatcgcctatgcccgtaccgaagagtacagccgcgagcagattgaagaggccgcgcgcatggcctacgccatggatttcattaacaagatggataatggtctggataccatcatcggcgagaatggcgtgatgctgtccggcggccagcgccagcgtattgctattgcccgcgcgctgctgcgtaacagcccgatcctgatccttgatgaagccacctcggcgctggataccgagtccgagcgtgccattcaggcggcgctggatgagctgcagaaaaaccgtacctcgctggttatcgctcaccgtctgtcgaccattgagcaggctgatgaaatcgtggtggttgaagacgggcggatcgtggagcgcggaacgcaccatgatctgctggagcataagggcgtgtacgcccagctgcataagatgcaattcggcgaatgatcgcgcgcatctggtccggggaatcgccgctgtggcgcctgctgctgccgctctcctggctgtatggcctggtgagcggggtgattcgcctcagctatcagctggggtggcaaaaagcctggcgcgcgccggtgccggtggtggtggttggtaacctgaccgccggcggcaatggcaaaacgccggtggtgatctggctggtggagcagctgcagcagcgcggtattcgcgttggcgtcgtgtctcgcggctacggcggtaaagctgaacgctatccgctggtgttggacgacagaaccagtacggcgctggcgggtgatgaaccggtgttgatccatcagcgtaccggtgccccggtcgctgtcgctccgctacgcagcgacgcggtaaaagcgttgctcagcgcgcacgatctgcagatgattgtgaccgacgatggtttacagcactataagctcgcgcgggacagagaaattgtcgttattgacggcgtgcgccgctttggcaacggctggtggctgcctgccgggccgatgcgcgagcgggcgtcgcgtttgcaaagcgttgatgcggttatcgttaacggcggcgtggcgcgtccgggtgagatcccgatgcggctgcgcccagggatggcggttaacctgcttaccggcgaacgtcgcgatgtctccaccttcacgaacgtagtggcgatggccggcatcggccatccgccgcgcttcttcgccaccctcgaaagctgtggcgtccagccggtcaaaaccgtggcgctggcggaccatcaggcgctgagccaggctgatgtcgccgccctggtgaccgccgatcagacgctgctgatgaccgagaaagatgccgtgaaatgtcgcgatttcgccgctgcaaactggtggtatttaccggtcgacgccataatggccgatgaacgcgcacagcggttgcttgcggacttagcgacgttggcgcaacgttaactgacgcgccggctttgctcgccgctgtgctggaattcctgacggagaacctgcatgtcggtattgcaactatcgcttaacgaggcgcgccacctccatctcgcggcgcaggggttgttaaagaagccccgacgtcgcgctcgcccgaaagacattctttccaccatccagcagatgtcgctgctacaaatcgataccatcaacgtggtggcccgcagcccctacctggtgctgttcagccgtcttggcagctatccgcagcactggctggatgagtcgctgcgcaacggcgagctaatggaatactgggcgcatgaagcctgctttctgccgcgcagcgatttcgccctggtgcgccatcgcatgttgaatcccgacaatatgggctggaaataccatcgcgcatggatggaggagcatgccgggagtattgccgagctggtggcgcatatcgggcaaaacggcccggttcgctcggcggattttacccacccgcgcaaaggcgccagcggctggtgggagtggaaaccgcataagcgccacctggaagggctgtttaccgccggcgaagtgatggtggtggagcggcgcaattttcaccgcgtgtatgatctaacccggcgggtgatgccggactgggacgacgagcgcgacgcgctctcccgcgaagacgcagaggccattatgttgcgcaatagcgcccgtagtctcggcatcttccgcgcccagtggctggccgattactatcgcttgcgccagccggcgctaccgggtctgctggcggcctggcaggaagaggggctggtggtgccggttaacgtggaagcactcggcgagatgtggctgcatcacgaggcgctggcgcagctggagaccgcgcccggcggtaagctgaccgccagccatagcgccgtgctctcgcccttcgacccggtggtctgggatcggaaacgcgctgagcagctgttcaacttcagctatcgcctggagtgttataccccggcgccgaagcgtcagtatggctacttcgtactgcctctgctgcaccagggaaaactggtcgggcggatggacagtaaaatacatcgcaaaagccgggagctggagatcttcgctctgtggctggaggagggggtgaagatcacccgtggtctggagcaggggctgcgccgggcgattaacgacttcgcacgctggcaatcggcagagcggatcctgtgccgacgcctgccggaagggctgtttgtcggccaggagcaggggtgggaaatcgacgccgattgatcccggcgcctgccttcctgtgatatgctgctgagaaatctatccggtccatcaggaggaaacatggatcaccgtttacttgaaatcatcgcctgcccggtctgtaacggcaagctgtattacagtcaggataagcaagaacttatttgcaaacttgatagcctggcgtttccgctgcgcgacggtatcccggtgctgctggagacagaggcgcgtccgctggcgctagaagagagtcactcatgagtttcgtggtcattattcctgcgcgtttcgcctccacgcgcctgccgggaaaaccactgcaggacattaatggtaagccgatgattgtccatgtgctggagcgcgctcgcgaatccggcgcggatcgcattattgtcgccaccgatcacgaagatgtcgcccgggcggttgaagccgccggcggcgaggtctgtatgacccgcgccgaccatcagtccggcaccgaacggctggcggaagtggtggaaaagtgtgcgttcagcgatgacaccattatcgtcaatattcagggcgatgagccgatgatccccccggcgattgtccgccaggtggcggagaatctggctgccagcagcagcggaatggcgacgctggcggtaccgatccatgatgcggaagaggcgtttaatccgaatgcggtcaaagtggtgatggatgccgagggttacgcgctctatttctcccgcgcgactattccctgggatcgcgatcgctttgcccaaacccgcgagaccatcggtgactccctgctgcggcacatcggcatctatggctatcgcgccggctttatccgccgctatgtcagctgggcgccgagcccgctggagcagattgaaatgctcgagcagctgcgagtgctgtggtatggcgagaaaatccatgtcgccgtggcggccgaagtgcccggcaccggcgtggataccccggaggatctggagcgcgtccgcgctgagctgcgttagtcctctgtcccctccttgctggaggggatatccccgtcggtttttcgctttttttacccctttttgatcttatccgatgacaagccaggtgcgggcgctcattatgaaaccagtagtgttcataggggtaatcgacaatggaacagttgcgaaccgaactcagtcatcttcttggcgaaaagctaagccgggtggagtgtgtcagtgaacaagccgctacggcgctgtggttcctgtacgatgcgcagggaaacccgatgccgctgctggcgcgaagtttcaccacgcccggcgtggcgcggcagctggcatggaagatctcgaccctggcgcgtaatggtacggtgcgtatgccggtggtttatggcgtcatgacgcacgaagaacatcccggaccagatgtgctgctgcttgagcgcctgcgcggcgtaccggtggaggcgccgacgcgcaccccggcgcgctgggagcaactgcaggagcaaatcgtcgaggggctgctggcgtggcatcggcaggacagtggcggctgcgtgggaatggtcgacaatacccaggaaaacctatggccgaactggtaccgccagcgggtagagatattgtggagcaccctgaacctgtatcaggacaccggtctcaccatgcaggataagcgccttttgttccgctcccgcgagtgccttccggagctgttccgcgatttcaatgataatgctgtgctggtgcatggcaacttcactctgcgcagcatgctaaaagatccgcgcagcgatcagctgctggcgatggtggggccggggatgatgctgtgggcgccacgcgagtatgaactgttccgccttgctgaaggcggccaggcggaacagctgctgtggcgctacctgcagcaggcgccagtttccgaggcctttgtctggcggcgctggctttatctgctgtgggatgaggtggatagtctggtcaacaccgggcgctttgatcgcgcccgttttgacctcgctgcaaaatcactcctgctctggctcgcctgagctgcctttcagccattgccagacgcgaccaagggtttcatagccgacccggtcgctgtgcatcagccacactggagaaggaatggcccgctcccacggattgagcggcgaggtcaccgccagctgattggccggcgcaggaagcggatccaggccggcatggcgaaagaatatcatcgcccgcggaaggtgtgacgccgaggtgaccagcaggaagggcgcgtcgccgatggcgcgcttcaccgccagcgcttcctcttctgtatctttcggccgaccgagcacaatgatatcgctgcgaggtacgccaaggctctccgccactctcgccccggcttccgccgtgctgacgggattcgttttcgccgccgcgccggtaaagatcattttcgaaccgggattcgcctgccacaggcggatgccctccgtcaggcgcggcaggctgttattgataagattagagcttggcgcccactccggattccaggtatagccgccgcccagcaccaccacgtagttcaccggctgctcgccgcgccaggtggggtaggtatcttcaatcggtttcagcaggctgtcggccacgggctgaaggctcagcagcgtcagcagcagccagccgaggctcacgcatagcttcccggtacgctgaaagcggctgaaccataacagcgcgatcccgataccgatcagcaacagtaaggcgggtagcggcaacagcaggccgccgacgatcttttttagcgtgaaaagcatgccagatggttccttttttaaccatataaccaaagttatgttcggatcttataacagatcgcttcattctcggcgcgggtatgacaaaatagcggttttgtgttggcttgtggagtcactcgtgcaggatcgcaatttcgatgacattgctgaaaagttttcgcgcaatatttacggcaccacaaaaggccagttgcgtcaggcgatcctctggcaggatctggaaccgctgttggcgcagctggggccgggaccgctgagggtgctggatgccggcggcggggaagggcaaacggccatcaaagtcgcgcaactgggccatcacgtgacgctgtgcgatctctccgctgagatggtggctcgcgcccgccaggcggccgccgataaaggtgtgatcgacaacatgcattttgtacaatgcgcggctcaggatattgcgcagcatttggaaagcccggtcgatctggtactgtttcatgcggtgctggagtgggtggcggagccccaggaaatactgcataccctgtggtcgacgctgcgtgctggcggtggactgtcattgatgttctacaatgctaacggcctgttgatgcacaatatggttgccggtaattttgattacgttcaactgggcatgccaaaaaagaaaaaacgcacgctgtcgccggattatccgcgtgaaccacagcaggtttatcactggctggaagagattggctggcagatcgtcagcaaaaccggcgtgcgggtgtttcatgattatctgcgtgaaaaacgccaacagcatgacagctatgcggcgctgctggcgctggagacgcgctactgtcgtcaggagccgtatctcagcctgggccgttatattcatgtcaccgcgcttaagagccaggctcatagccgcagatgcaaggataaagtatgagtgaattttcccagacagtccccgaactggttgcctgggccagaaaaaatgatttttcaatctcgctaccggtcgacagactctcttttctgctggcgatcgccactctgaacggtgaacgactggaaggggaaatgagcgagggtgaactggtggatgcgttccgccacgtcagtgatgcgtttgagcagaccagcgaaaccatcagccagcgcgccaataacgcgatcaacgatttggtgcgccagcgtctgctgaaccgctttaccagcgaaattaccgaaggcaatgcgatctatcgcctgacgccgttggggattgggatcaccgattattatatccgtcagcgcgaattctcgacgctgcgtctctcgatgcagctgtcgatcgtcgccggcgagctgaagcgcgcggcggacgccgcggaagagggcggtgatgaattccactggcatcgcaacgtttttgcgccgctgaagtattccgtagcggaaattttcgacagcatcgacctgacgcagcgcattatggatgagcagcagcagctggtgaaagacgatatcgcgcagttgttgaataaagactggcgcgcggcgatttccagctgtgaactgctgctgtcggaaacctccggcaccctgcgcgaactgcaggatacgctggatgcggcaggggataagctgcaggcgaacctgctgcgcattcaggactcgaccatggcgcgcgacgatctccattttgtcgatcggctggtgttcgatctgcaaagcaagctcgaccgcatcgtcagctggggtcagcaggcgattgacctgtggatcggctacgaccgccatgtgcacaagtttatccgtaccgctatcgatatggataagaaccgcgtcttcgcccagcgtctgcgccagtcggtacagacctattttgatgaaccgtgggcgctaacttacgccaacgccgaccgcctgctggatatgcgcgatgaagagatggccctgcgcgatgaagaggtcaccggcgagctgccggcggacctcgaatttgaagagtttaacgaaattcgcgagcagctggcggcgctgatcgaagcgcagctggcggtctataaagagaaaggaataccgctggatctcggcctggtggcgcgggagttcctggcgcagtatccgcgcgggcgtcacttcgacgtggcgcggatcgtcgtggatcaggcggtacagctgggcgtcgcccaggcagatttcaccggactgccggcaaaatggcagccgattaatgattacggagccaaggtacaggcgcatgtcattgacaaatattgaacaagtgatgccggttaagctggcgcaggcgttggccaatccgttatttccggcgctggacagcgccctgcgcgcgggccgtcatatcggtctcgacgagctggataatcacgcatttttgatggattttcaggattacctggaagagttttacgctcgctataacgtcgagctgatccgcgcgccggagggattcttctacctgcgcccgcggtccaccacgctgatttcgcgctcggtactgtccgagctggatatgatggtgggcaaaattctttgctatctctatctcagcccggagcgcctggcgaacgaagggatttttacccagcaggagctctatgacgagctgctgaccctggccgatgaatccaggctgctgaagctggtgaacaaccgttccaccggttcggatctggaccgccagaagctgcaggaaaaaatgcgggcctcgcttaaccgcttacgccgtctggggatggtgtggtttatgggccacgatagcagcaagtttcgcattaccgaatcggtattccgctttggcgccgatgtgcgcgccggcgacgacccgcgcgaagcgcagcgccgtctgatccgcgacggggaagcgatggccctggaaaatcacctgcagctcaatgatgagaatgaagaaaaccagccggatagcggggaggaagagtaatgattgaacgcggtaagtttcgctcgctaacgctggttaactggaacggcttctttgcccggacctttgatcttgatgaactggtgaccaccctctccggggggaacggcgcgggtaagtccacgaccatggcggccttcgtcacggcgctgatcccggatttaaccctgctgcacttccgtaacaccaccgaagcgggggccaccagcggctcacgcgataaaggcctgcacggtaagctgcgcgccggggtgtgttactcggtactcgatgtgatcaattcccgccaccagcgcgtggtggtcggcgtgcgcctgcagcaggtcgccgggcgcgatcgtaaagtcgatattaaacctttcgccattcagggactgccgacctctatcctgccgacccagctgttgaccgaaacgctgaacgatcgccaggcgcgcgtcgtgagcctcaacgagctgaaagataaactcgaggcgatggaaggggtccagtttaaacagttcaactcgatcaccgaatatcactcgctaatgttcgatctgggcgtggtggcgcgtcgcctgcgttccgcctccgatcgtagcaagtactaccgcctgattgaggcctcgctgtacggcgggatctccagcaccattacccgctcgctgcgcgactacctgctgccggaaaacagcggcgtgcgtaaagcgttccaggatatggaagcggcgctgcgggaaaaccgcatgacgctggaagccattcgcgttacccagtccgaccgcgatctgtttaaacacctgatcagcgaagccaccaactacgtggcggcggactatatgcgtcacgccaacgagaggcgcattcacctggataaggcgctggagtatcgccgcgatctcttcacctcgcgttcgcagctggcggctgagcagtataagcacgtcgacatggcgcgcgaactgcaggagcataacggcgcggagggcgatctggaagccgattaccaggccgccagcgatcacctgaacctggtgcagactgcgctgcgtcagcaggaaaaaatcgagcgctacgaagcggatctcgacgagctgcagatccgtctggaagagcagaatgaagtggtggcggaagccgtcgatcgtcaggaagagaacgaagcccgcgctgaggccgccgagctggaagtggatgagctgaaaagccaactcgccgactatcagcaggcgctcgatgtgcagcagacccgcgccattcagtataaccaggcgctgcaggcgctggagcgcgcgaaggcgctgtgccatctgccggatctgaccccggagagcgccgacgagtggctggaaaccttccaggcgaaagagcaggaagcgacggagaaaatgctgtcgctggaacagaaaatgagcgtggcgcaaaccgcgcacagccagtttgaacaggcttaccagttggtggcggcgattaacggcccgctggcgcgcaatgaagcctgggacgtggcgcgcgaattgctgcgcgacggcgtgaaccagcgccaccaggccgagcaggcgcaggggctgcgcagccgcctcaacgagcttgaacagcgcctgcgcgagcagcaggacgctgagcgtcagctggccgagttctgcaaacgccagggtaaacgctacgatatcgacgatctggaaacgctgcatcaggagctggaagcgcgcatcgcgtcgctggccgacagcgtctccaatgctcaggagcagcgcatggcgctgcgtcaggagctggagcaactgcagtcgcgtacccagacgctgatgcgtcgggcgccggtctggctggcggcgcagaacagccttaaccagctgtgcgagcaaagcggcgagcagtttgcgtccggccaggaggtcaccgaatacctgcagcagctgctggagcgtgaacgagaggctatcgttgaacgtgacgaggtcggcgcccgcaagcgcgccatcgacgaagaaatcgagcgtcttagccagccgggcggttcggaagatccgcgcctcaacgccctggcggaacggttcggcggcgttctgctgtccgagatctacgatgatgttagcctggacgatgcgccgtacttctccgcgctgtacggtccgtcgcgccatgcgatcgtggttccggatctgtcgcgggtagccgagcagcttgaggggctggaagattgcccggaagatctctatctgatcgaaggcgatccgcaatcctttgacgacagcgtattcagcgtcgacgagctggaaaaagcggtggtggtgaagattgccgatcgccagtggcgttattcgcgcttcccgtcgctgccgctgtttggccgcgcggcacgtgaaaaccgcattgaaaccctgcatgccgagcgtgaatcgctgtcagagcgttttgcgaccctgtcgttcgatgtgcagaaaacccagcgcctgcaccaggccttcagccgctttatcggcagccatctggcggtggctttcgaggacgatccggaagaagagatccgcaaactcaacagccgccgcggcgagctggagcgtgcgctgagcgcccatgaaagcgataaccaacagaaccgtgtgcagtacgagcaggcgaaagagggcgtgtcggcgctcaaccgcctgctgccgcgcttgaacctgctggcggatgatacgctggccgaccgcgtggacgagatccaggaacgtctggacgaagcgcaggaggccgcgcgctttattcagcagcacggtaaccagctggcgaagctggagcctattgtttcggtgctgcagagcgatccggagcagtttgagcagctgaaagaagattacgcctatgcgcagcaaacccagcgcgatgcgcgtcagcaggcttttgccctggcggaagttgtgcagcgcagggcccacttcagctactccgattcggcggaaatgctcagcggcaacagcgatctcaacgagaagctgcgccagcgtctggagcaggcggagtccgaacgcagccgcgcgcgcgacgcgatgcgtgcccatgcggcgcagcttagtcagtacaatcaggtgctggcctcgctgaagagctcgtatgacaccaagaaagagctgctcaacgatctgtataaagagttgcaggacattggcgtgcgcgccgacgccggcgcggaagagcgtgctcgcgcgcgtcgcgatgagctgcacatgcagctgagcaataaccgctcccgacgcaatcagctggagaaagcgttgaccttctgcgaagcggaaatggacaacctgacccgtaaactgcgcaagctggagcgcgattactgcgaaatgcgcgagcaggtggtgaccgccaaggcgggctggtgcgcggtgatgcgtctggtgaaagacaacggcgtcgaacgtcgtctgcatcgccgcgagctggcctatctctccgccgatgagctgcgctcaatgtcggataaggcgctgggggcgctgcgtctggcggtcgccgataacgaacatctgcgtgacgtgctgcgtatctcggaagatccgaagcgtccggagcgcaaaattcagttcttcgttgccgtataccagcatctgcgcgagcgtattcgtcaggatattattcgcaccgatgatccggtggaagcgatcgagcagatggagatcgagctcagccgcctgaccgaagagctgaccaaccgtgaacagaagctggcgatcagttcccgcagcgtggccaacattattcgcaaaaccattcagcgcgagcagaaccgtatccggatgctcaaccagggtctgcagagcgtctccttcggccaggtcaacagcgtgcgtctgaacgtcaatgtgcgtgagacccactcgatgctgctcgacgtgctctccgagcagcatgagcagcaccaggatctgtttaacagcaatcgtctgaccttctctgaggcgctggccaagctctatcagcgtctcaacccacagatcgacatggggcagcgtacgccgcaaaccatcggtgaagagctgctcgactaccgcaactatctggagatggaagtggaagttaaccgcggctccgacggctggctgcgcgcggagtccggcgcgctgtctaccggggaagctatcggtaccgggatgtcgattctggtgatggtggtgcagagttgggaagatgaatcccgtcgcctgcgcggcaaggatatctcgccttgccgtctgctgttcctcgatgaagcggcgcgtctcgacgcccgctccatcgccaccctgttcgagctgtgcgaacgtctggagatgcagctgattatcgcagcgccggagaacatcagtccggaaaaaggcactacctataaactggtgcgtaaggtgttcaataatcacgaacatgtgcacgttgtggggctgcgcgggtttgctgcgccgctgccggaagcgctgccgggaacggccgacgcctcgtgacgatgcagctcactactggcgggtaagcgctgaaaagggcaacgttaagttgccctttttgctatccagcttgctatgccagggtggtataatctttaagcttctttacattaggtaaggcaaaagccttttcgtctttatatactgtgttaaagcccacgaatttgtgggcggcaatgtgtgacaacagggggcaagggatgttgcttaagaaacggtatggtcgtccattgtcagcgctcagtctgagcctggcaatggcatttgctccgctgttcaatgtccaggccgcagagcctgaagtcgtaccaggtgatagctccgctacgcctggagagctttccgtcgcgctgtcgcaaagcgacgggcaatcgccggcggtcgcgaagctggccggtgagcagccgctgtcgatggaagccgcggcgaacagtcgcgcccagatcgaagcgctattgccggctggctacaaacccgtctttatgaatccgctggtctcgctatacgccgccagggatatgaaaccgatgtgggaaaaccgcgaggcggtgcaggcgttccagcagcagctggcggagatcgccatcgccggttttcagccgcagtttaccacctgggtcagtctgctgaccgatcctgccgtcagcggcatggcgcgcgatgtggtgttgtctgatgccatgatgggctatctgcactttatcagcggcatccccacccaggggacccgctggttatatagctcgacaccgtacaagatggcgaccccgccgctgtcggtgattaaccagtggcagctggcgctggataatggctccctgccggcgtttatcgccggcctggcgccgcgtcatccgcagtatgaggccatgcaccagtcgctgctggcgctggtggctgattcacgtccatggccgcagatgaccggcagcggctcgctgcgcccgggagaatggagcaatgatatcggcgcgctgcgcgagatcctccagcgtaccgggatgttggaaaattccgccaatatcgttctgcccggcgacgtggtgagtccttcggcgaagaaaaagagcaagcccgcggcgcgcggtgtgtacgatcgccagctgggggagggcgttaagcgctttcaggccatgcaggggctgggggcggatggggtcatcggccaatccacccgtgactggctcaatgtctcatcggcacagcgcgctggcgtgctggcgctgaacattcagcgtctacgtctgctgccaggcaaactatcgaccggtatcatggtgaatattcccgcgttttcgctggtctattaccaggacggcagtcaggtgctggcctcgcgggtgatcgtcggacgtccggaccgcaagacgccgatgatgagcagcgcgctgaacaacgtagtggtcaatccgccgtggaacgtaccgcccaccctggcgcgcaaagatattctgccgaaggtgcgtaataatcctggctatctggagcagcatggctacaccgtgatgcgcggctggaacagtaaagagaccatcgatccttaccgggttgactggtcaaccatcaccgagaacaatttaccgttccgttttcagcaagcgcctggggcacgtaattcactggggcgttacaagtttaatatgccgagttcggatgctatctatctgcacgatacgccgaaccataatctgtttcagaaggatgtccgtgcgctcagttccggctgcgtcagggtcaataaagcctcggagctggccaatatgctgctgcaggacgcgggctggaatgacacgcgcatttccgacgccctgaagcagggggatacgcgctatgtcaatattcggcaaaatataccggtgaatttatattacttaacggcgtttgtggacgctgatggacgtacacaatatcgaacagatatttacaattacgatatcaccgcgcgatccagcgcacaaattctgacgaaagcggaacaattaatcaggtaaatgaagtagttcaatggattttgttgtcctagcactgggtaaaaaagggcgctgcacctctgcagcgcccgattttcctggggtgaggctgccttgacgttggcaataatgcccggtaaggtgcctttcgtgcgccagaagtgcatatacatatcattccgctcaatgcgtagcgcggttagcgcgaacgttctcctttgccgggcaacatctcggtcgtggcgagcgatagcgagctgatcctggcatcgcgcaaagcggaaaaagtatataacgattcattgactgtagacctgattatcatggacaaatttgacgctaatcgccgcagattgctggcgttgggtggcgctgcgctgggtgctgccgccattctccctgcgccggcatttgccaccctctcgaccccccgtccgcgtattttgacgctgaataacctgcataccggtgaatcgctcagggcggagtttttcgatggcagaggctatattcaggatgaattagcaagacttaaccattttttccgtgactatcgcgcgaataaaattaagtccatcgatccaaatctgttcgatcatctttatcggttgcagggactacttggcaccaacaaacctgtccagcttatctctggctatcgttccctcgataccaacgatgagcttcgcgcacgaagccgtggtgtagcgaaacacagctatcacaccaaggggcaggcgatggatttccatattgaaggtatttcgttaagcaatattcgcaaagcggcgttatctatgcgcgcaggtggtgtaggatattacccacgtagtaactttgtgcatattgataccggtcccgtaaggcactggtaacgaaaggagcgtcatgaactatcgtattattccggttaccgcgttcgcgcagaactgttctcttatctggtgcgggcaaacccggctggcggcgctggtcgatcctggcggcgatgctgaacgtatcaaagcggtggtggcggaggctggcgtcacgctgatgcagatcctgctgacgcatggccacctcgatcacgttggcgccgcggctgaactggcgcagcattatggcgtaccggttattggtccggaaaaagaggatgagttctggctggaaggattaccggcgcaaagccggatgttcggcctggaggattgccaaccgctgcgtccggatcgctggctcaatgaaggcgatgtggtcaatgtggggaatgtggcgctgcaggtgctgcactgcccgggccatacgccgggccatgtggtcttttttgatgacgcctcccgactgctgatctccggagacgtgattttcaaaggcggggtgggacgcagcgattttccgcgcggcgaccatgggcagctgattgcggctatcaaggaaaagctgttgccgctgggcgatgatgtgacctttattcccggccatggtccgctgtcgacgctgggtgaggaacgccgtaataacccgtttctgcaggatgagatgccggtctggtaacagacatgacgcgaacacataaaaaaggccgcattcgcggcctttttctttataccgaatactatcgcttacagtacggcgacgatggcttcgcacagcggcgccatattgtcaggcgtcatcccggccacgttgatacgtccggaagctaccgcatagatggcgaactcttcacgcaggcgcagcacctgctctttagtcaggccgctgaatgagaacatgccgttctgctggctgataaagctgaagtcgcggctcgcgcctttctcctgcagggtattgacgaacagcagacgcatacgctggatgcgctggcgcatatcggtcagttcctgctcccagattgcccgcagcgcatcgttgctcagaatggtggcgaccacggaggcgccatgcgcaggcgggttcgagtagttggcgcggatcaccgacttcatctgactgaaggcgcggtctacagtctcttgatccgcggcgaccagagtgcaggcgccgacgcgctcgttgtacaggccaaagtttttcgaataggagctggcgaccagcagctctttatgtagagcagcaaaagcgcgtagcccttcagcatcttcttccagaccgcgggcgaagccctggtaggcgaaatcgaacagcggtagccagcctttttccaccgacagctgcgccagctgctgccactgatcgagcgtcggatcgataccggtcgggttgtggcagcagccgtggaacagtaccacgtcgcccgcctgggcttcgttcaggctggccagcagaccatcaaagtccagcgcgtggttagccgcgtcgtagtatgcgtattcgcgcacttccagcccggcagaagtgaatacgcttttatggttcggccagctcggattacttacccacacacgtttcacgtcggtgtttttggcgaggaagtctgcggcgacacgcagcgcaccggtaccgcccggtgtctgcgcggtgcgggcgcgtttatcagcgataatcgcattgcctttaccgaacagcagctcctgggtgcagcgaccaaattcaggaatgccatcgatgcccagatagtttttagtcgtttcattttccagcagatactgctctgcttttttgacgctggtcagaacgggcgttttaccggtttcatccttgtaaacaccaattccgaggttaattttttcagggcggtcatcggcacgaaacagatcggccagacctaaaatcgggtcggctggggcggcggtaatgttctcaaacatgacgaggttccattgtgattactgaagggaaatccgctatcaggttaacgggagaataacgaattgccaaccgtttgcgacaaaaagcgcgaaggttttcgaaagagacgatctttgtctcacgaatacagaaaagcaggaccgaagtcctgctttgaaggcatatcacgaaggggtgtactgcagattagaactggtaaacgatacccacggccgcctggtcgtcagtggcgacaccagccgctttggtgtaatcgttgtcgtccagctggttgaatttatacgcagcgtagacgttcatgttcttgttaaagtagtaccaggtacccacttcgatgtatttaaccagatccgcatcgccgccggagaagccagcacgcgactgcaggtccttgcctttggtctgtacgtagccgatggacggacgcaggccgaagtcaaactgatactgtacaactgcttcaaagttctgagttttaccggcgaagtggttatcttcttccggagtcatgttgtaagtctgggagtacatgacggccgcatagatgttgttagcgtcatattttgcagaggtcgcccaggcttcggctttgtcgccattgccgtcagctttctgatcgacgctacggttagagctggagtagcctgcagacagtgcgataccgttgtcgaacgcgtaggtggctgcggtgctgaagccgtcgccattctgcttgcgaatcgcacggtcgtggtcgtttttaccctggtactgcagcgcgaagctcagaccgtcaaccagaccgaagaagtcggagttacggtaggttgcgacgccgttggtacgaccggtcatgtagttgtcggtgtagttccagccgtcaccgccccattcaaccagcatatcggttgccgcttcgacgtcgtagatcgcgccgtagttacggccatagtcgaatgaaccgtattcgcccgctttcaggcccgcgaacgccagacgggtttttgtggtctgggaaccttcaacattggacgcgtccatgttgtattcccactggccgtagccgatcagctgatcgttaatctgagtttcgcctttcaggccgatacgggcataggtgggatcgtcgctgctggtgtcgccattggtggtccagacgtgctcgccgaccatttttccatagaagtccagtttgttgccgtttttgttatagatttctgcagcgttggctgcaccggctaccagcagggcagggatcaccactgccagaatattgcgcttcatcattatttattaccctcattaatattttttatatgaacacgtgccactgccgtcaataagttctgtcaataaaaacttacagaaccattgatgagagtttggtgtctgaaggcatctttccatccgcgacaacgtttcgctagccggaaaatgctacgaatatctcatatgagtaacaaaacgaaaaatcatgtaactaaatgtgtatttaacggaactttgtgaacttaatcaaaattccgttccaccggataagggcaaacgccattacttatctatctatatgaattatttatgattaatttggctaagcggcaattcgttcattttgtgtattgaattcgtattctttttattcagtctctgtctttgcaagatgtgcgggtaaaggtcaaaaaatgagcaaatttatcagccattttgctctgttatgaacataaagtgcgatctacatcaccaggatgcaccgaaacagtgcgtaacataattgtgatttccaggccttgatgtttaaggttgttgaattttactaacagtaattgacataaaaaaaaggccagcttgcgctggcctttcagattgatgtcagaaaaatttagaatgtcgcgttgcgcggcgtccgcgggaacggaataacatcgcggacgttctgcacgccggtcacgtaagcgatgaggcgttcgaagcccagaccgaagccggaatgcggcacggtgccgtagcgacgcaggtcgcgataccaccagtagtcttctttgttaagacccatctctgccatacgcgcgtcaagcacgtcgagacgctcttcacgctgggaaccgccgataatctcgccgatgcccggcgccagaacgtccattgccgcgacggttttaccgtcttcgttaaggcgcatatagaacgctttaatgtctttcgggtagtttttcaccaccaccggcgctttgaagtgctcttcggccaggtaacgttcgtgctcagaggagagatccacgccccagtacaccgggttctcgaactgtttgccgcagttttccagaatggtgacggcgtcggtgtaatccacctgagcaaaatcagcggtgataaagcgctgcagacggtcgatagcgtctttatccacgcgctcggcgaagaactgcatgtcgtccgcacgctcttccagtaccgctttgaagacgtacttgagcatcgcttccgccaggccggcaacgtcgttcaggttggcgaaggccacttccggctccagcatccagaattccgccaggtggcggctggtgttggagttctcggcgcggaaggtcgggccgaaggtataaatcttcgacagcgcacaggcgtaggtctcgccgttcagctggccggaaacggtcaggaacgactctttaccgaagaagtctttgtcgaaatcgactttgccctgatcgttacgcggcaggttttccagatccagcgtcgacacgcggaacatttcgccggcgccttcggtatcggaggcggtgatcagcggggtggaaacccagaagaagccctgttcgttgaagaagcggtgcagcgcctgcgccagggtgtgacgcacgcgggctaccgcgccaatcaggttggtgcgcggacgcaggtgcgctacttcacgcagatactcgatgctgtggcgcttggccgccatcgggtaggtgtccgggtcttccacccagccggtcacttccacgctggtcgcctggatctcaaagctttgaccctgaccctgagaagccacgactttaccggtgacaatcaccgagcagccggtggtcagacgcagcacttcctgattgtaattgggcagagaattattaataacggcctgtacaggatcaaagcaggaaccgtcatagacggcgaggaaagaaaagccagctttagaatctcggcgggtacgcacccatccgcggaccgtgacttcgctgtcaacggcaacgcggccctggagtacgtcggctacaggcacaacgctcataataatctctctatgtagtccaataaaaaagtctcttcccccaacagcggggggatatctatgttacctgtcatcttccatcagacaagtagatttcgcacagggaagggtggatttcggaaataaatacccctccggggcgttctttggctcaccatttcgacttttacacgacttactcgataatgaccgtcatttcctgcttcgcattttgcatcgacacgatggtccggaaagacttgatatttcccgaggcaaaaaagagttcacgggttagcgcttcgtattccgccatatcacggacgttgatcacgagcaggaaatcgaagtcgccagtgacatagtagacctgctgcacttgcggacaggtaacgaaacgctgtttatcctcctcaagcagatcgagacgttcattctcaatggtcacctgcaccataatggtgattggtcttcccactttactggcgtccactaagctaacactgcctttaatcacccctgcatcctccagtgcagcgatacgccgattgactgccgaaggagacaggctgatccgatcggcgatctcccgttgcgacaagcgattattacgctgcaagagcgtaagaatttttttatcccatgcgtcaagtttcatcatatatctcgtcctgcaagcctgtgatcaacctcactaatgcaacgttgttgcgtatgaatgataaaacagagtgaaaattgcggcgcgatgggcaactttgcgccaattaaccgccgggcgcagtgtaccatcacaggcagtgggaaagcggtatatcgcgacaaaaagcctctcacattctgacttaaccaatttaaagcgaccgtcctgtctcaggccgcacggatccgtgcacccgtcgtttaggcggaatggtcgcaaataacgttatcgtcgcaggacgatatgaaaatagaggtgcctgaatagtggacacaattaaatttcaacttaacgcccggcggcagccctatggccagggagcagacttgagtctgctgaatgaaagcgtggggaacgaagtgctggcattccatcaaaaatttcctgattaccgggtcacgccgctgcgtaagctggaatttttaagccagcggctggggctgggatcgatccatataaaagatgaagcgcagcgattcggtttgaatgcgtttaaaggattaggcggatcttatgcgatggggaaatatctcgccgctctgcttgagcgagatattaatacgttgagctttgccgagcttaattcaccagtgattaaggcgcgtatcaaggacatcgtatttgtgactgctaccgacggtaaccacggacgtggcgtggcgtgggcggctgagcagcttgggctgcgtgcggtggtgtatatgccaaagggctcgtcaccggtacgcgcgcagaatattcgccggcatggcgccgaatgcacgattactgaactgaactacgacgacacagttcggctggcggccaaaaccgcgcgcgagcagggatgggttctactccaggataccgcctggcagggctacgagcagatccccacatggatcatgcaaggctatatgaccctcgctgttgaaatctggcagcagctggcagaaagcggagcgtcgatgccgacgcatctgtttttacaagccggggtcgggtcgtttgccggtagcatcatgggatatttcatcgaaaagatgcagcagcaggctcccaccatcatcatcgttgagccgcacaaggcgaactgcctgtttcgctcggcaaccattaatgacggactgccgcacagcgtcggcggggatatgtcaaccctgatggccgggcttgcctgtggtgaacctaatatcaccagctggccaatgctccgcgaccatgccacctgttttatttccgccgacgattgtctggcggccaacggcatgcgcctgttggccgctccgcgaccaggtactgacgaaccttttgtctccggggaatccggcgctattggcacaggagtgctttatgcgctgatgactcaaccggcgtatcgcgagcttgccgaatcgctgcgcctgaatgccgatgcacaggttctgttaatcagcacggaaggagatacatcacccgatgtctatgaagacatcgtctggtttggccgtaatggttgagcgctatcgacaataacaagggggccatcttaccttccctacaagccctcggtatgacaagcgttctgactcataacgaaaacatacgcgctttcgcgtcatgcatagagagaacctgaccgatgaatactgaaaatataattatcaataaaggatattccgatcccgcaaagtggcatagcgaagataccgtttgggtccttggcctgttcggtaccgccattggcgctggggtgctgtttctgccgattaatgccggaattggcggcttctggccgctgctgattgtttttgtcctcgcttttcctattacttatctggctcaccgcggtctggcgagattcatttactcttccaatacgccggaaagcagtattaccgatgttattggcgagcattttggcgcgctggcgggaaaagtatttaccgtcatctatttcttcgccgtctataccattctgattatgtatgcggtggctatcaccaacaccgcgcagagctttatcacccaccagttggcaatggccgagcctccccggtcgctggtggccatcgttctgatcctcgggctgatgtttatcgtccgtttcggacagcgtttgataatgcgggtgatgagcaccctggtttatcccttcatcatctcgcttatttttatggcactttttctgattccgcactggaacggcgcaattttgcaaaccgtaagcttcagcgccacgggcgatgggcaggggatcatgttatccctgtggatgaccttcccggtactggtgatgtcgtttaaccactatcccatcatttcgccgatggtggtgcgccagaagcagcgttacggtctggcgctcgctgagggtaaatgtgcgcagatccagcgctacggtatcctgctcatgacggtggtggtgctgttttttgttctcagctgcgtgttaagcctgtcgccgcagcaactggcggaagccaaagcccagaatctgtcgattttgtcctatctggccaatcagtacgatacaccgattattgcctggctatcgccgattatcgcctttgtcgctattactaaatcatttcttggccactacatcggcgcctatgaatcgctgcgcgacctgattctggaggccgccgccgcacgcggtaaaaaaccaggtattcgcctcgtcgacgcggtcatcctggtgtttatggtgcttacctgctggttcgccgcgtacaagaaccccagtatcctcggtattatcgaatgcatcagcggtcccaccggggcggcaattctgctgctgttgcctatgtacgccattcataaattaccggtgcttgccccctggcgcggtaaagcgagcaacgttttcgtcaccctgatcggtcttatcaccgtatctgccattttttacggcatgttccaataaccaccataattagcgagatgttatatgagtcattatctgcagattaacggccaacggcttatcgattccctgtatgcacttggcgaacatggtgcgctgccaggcggcggcgtatgccgcctggcagcgactgccgaagataaagccggcagggactttgttgtagcccgcatgaaggcgctgggcctgagcgtgtcaattgatgctatcggcaatgtcaccggcgtttatcacggcgaggagacgttgccgatggtgatgatggggtcacatatcgataccgtcgccaccggtgggttatacgatggcaactacggcgttatggccggccttgaggtgattgccaccctccaggatgccgggatccgcacccgacgaccgttggcggtaaccttctttactaacgaggagggggtgcgatttcagcccgatatgatgggcagcgtggtgtttgccggcgagtatccgttggcgcaggcgctcgcggcaaaagatctcgacggtatcacgctcgatgaagcgctgcgtaacattggttataaaggcgaacgtcagccgggagatatggcggtagatagctacgttgagctgcatatcgaacagggaccaattcttgataaagagcagattgatattggcgtggttaccggcgtacagggtatttcgtggcaggaatttaccctgagaggcgtatcgaatcatgcgggtactaccccaatgtccatgagacgtgatgccgggctggcggctgcgaaaatcgctgtttttgcccgtgagctggcgctaagccttggtggtaatcaggtagctaccgttggacatttcagcgtgaagcctaatctgatcaacgtcattcccaaccatgtcgtcatgtcagtggatctccgcaataccgataatgcgatcttatgtctggcggagcagcaattagccgaatttgtcgcgaaaacgtcgcaggaagagggcgtggagataaccagccgctcactggtgcgctttaatccggtcatttttgccgatgagatcgtcaatgcggtggaagccgaggcggagcgtcaggcgctcagttaccgacgtttgccaagcggcgccggacacgatgcacaatttatggcgtcggtatgtcccgccgggatgatttttgtcccctgcgtcgatggcattagccataacgtcaaagaacatagcgcagccaaagatctgattgctggcgccaatgtgctgctgcaggtggttttacagcgcgcccagcgtatggactaatgtttacaggagcagagaatgaatcagcaacagctaaagcagcagcttatcgcctggcgtcactatttgcatgcccatccggaaagcgccttcgaagagcagaatacttcacggtttattgccgaaaagctcgaagctatgggcattgaggtgcaccgcgatattggcaaaaccggggtggtggggagattgaaatgcggcgacgggaagggcgttatcgctattcgtgccgatatcgatgccattcaattgaccgaacagggagactggtcttaccgctccatgaccgccgagcggatgcacggctgcggacatgatggtcatacctgcattgcgctgggcacggcgcagttgttattgcagcggcagaattttaacggcacggtctgctttgtttttcagcctgctgaggaacctggctatggcgccagagcgatgatggacgatggcgttattgaacgctttggcatagaggaaatctacggtctgcataatatgccgggtatgaaagccgggactatcgccacgcgagtcggtggcattatggccagtgaagataactttattattcgtattaaagggcagggagcgcatgcggcgcggccgcatatggcgaaagatccgctggtcattgcggcggaaatcatcctggctttgcagacaattgtttcgcgaaatgttgatccgaacgtgccagcggtcatttcctgtactgaactgcacaccgatggcatccgcaatgcgattccgacgcacgtcgaaatcaaaggggatacgcgcagctttgcaccggaggtgcagatgctgctcgaagaacgaatgcgtaccattagcgaagcgatttgcgcgatgcacggtgcgacgtgccagttcagctatacccatgaatttgcgccaacggtgaactggcagcaatgcgttgatgtagcggtcaccgctgcgattaacgtggtaggggctgagaaggtggacggcaacgtcgcacagatgatgatttcggaagattttggcgcttttctgcaaaaaatccccggctgtttcatctttttaggcaacggcgatagttcagatgctcagggcaatacaccgttgcataatgcctgctacgactttaatgatgagatattgctaactggcgcggagtattttgccgaggtcgtcagaacccgtctgccgcaggagtgatattgattggcccgatagcagaatgccgtcgggccatgttttttagcttgcctttttaatcggcggcaggtcgaacgcttcgcgcagggcgcggacgaaggccttatcgtggcagatggttttccccgggctgtcggagagtttcgccaccggcttgccgttacattccaccagcttaatcacgatattgagcggtttaacctgcggcagatcgcaggttaatcgggtgccgatcccaaagctgagcttcacccgcgaggcgaagtggcgatacagatcgacggctttcgccaggtcgagattatcggagaagaccagcactttgctcagcggatcgatacccagcttctgataatgggcgatagctttttctccccattccaccgggtcgccggaatcgtggcgcaacccctgatagcgggtggcgaattccggaccgaaatcgcgcaggaacgcatccatagtgatgcagtcggtcagcgcgatgcccagctggtcgggatactcttccagccaggcggcaagggccgcccgctggctgctggcaaggctggggctgatctgctggtgggcctggaaccactcatgggcctgggtacccatcggggttaaattcagacggcgcgccagatcgtaattgctggtgccgacaaaccatggttcctgctgcagacgccgcacaataccttcctgcacctcgcgtgagaaacgacggcgggtgccgaagtccatcagacggaaggcgctcatgtcgaggtcagcggtcatggtggcgaagtcgcctagcttatgttccagcgtgttgagcgcctgatcgacgcccatctctggtgaacgatagcgatggaccaactcgcttatcaccgccagcagcgggacttcccacatgatggcttcccgccatgggccggtaaggcgaatgttcagcttaccattgtcattgctgaccgttacctggctcgggtcatagcgaaaatcgcgcagccagttgaggtaatcctggcgaaaaaagggaagggtggacagccagcgatattcatcatcccgcagcctcaggtcgcgcatggactccacctgctcgcggatcgcgtcggcatagatgccgagcaggtcgtctccgcggcagcgaaactccgccgccacatgcacatcgccgtagcggtggaagacagcctgctgcatgtgcagcttataggcatccgtatcaagcagcgagtgcagtacaggagaagtgaattgtgtcatggtgcgcagtagcatcctctcactggagcgttccatcgaaaccaacgcggaaaatggaggcggagtatacctttattacccgactctgtcccgcgatggcgagcaatggtgacgctgacggtcatttgcgaggcctagtttaatatattgaacatggatcacaccacaagctttgcgtcgggtcgagggcatttcgtgccgcgagtgttaacaaaatgtagcgatttccgtgtttcacgttgaaaagatgaagattctgcatagcgcgattgacacaacaggaatagactgggacgacactttaccgaagatgctaaaggttttttatgacacaacagccccaagccaaataccgccacgactatcgtgcgccggagtatctgattagcgatatcgatttgacctttgacctggatgccgcaaaaaccgttgttacggccgagagcaaggtctcccgccacgcggctgcgtctgatgtgccattgcgcctggacggcgaagatctgaccctgatcgctctgcaggtgaacggccagccgtggagtgactataaagaagaaaacaatcagctggtgatcggcggcctgccggagcatttcaccctgaccatcttcaatgagatcagcccggcggcgaacaccgcgctggaaggcctgtatcagtcaggcgaagcgctgtgcacccagtgcgaagcggaaggtttccgccatatcacctggtatctggaccgtccggatgtgctagcgcgctttaccaccaaaattatcgccgataaagcgaaatacccgttcctgctttccaacggcaaccgtatggcggaaggggagctggagaacggtcgtcactgggtacagtggcaggatccgttcccgaagccgtgctatctgtttgcgctggtggccggtgattttgacgtcctgcgcgattcattccgcacccgctctggccgcgaagtggcgctggagctgtacgtcgatcgcggcaacctcgatcgcgcgccctgggcgatgacctcgctgaaaaactctatgaagtgggatgaggagcgctttggcctcgagtacgacctcgatatctatatgattgtcgccgtcgacttctttaatatgggtgccatggagaacaaaggactcaacgtctttaactccaaatatgttctggcccgtaccgataccgccaccgataaagactacctcgatattgagcgcgtgattggtcatgaatatttccataactggaccggcaaccgcgtcacctgtcgtgactggttccagctcagcctgaaagaggggctgaccgtgttccgcgatcaggagttcagttccgacctcggctcacgggcggtgaaccgcatcaacaacgtgcgcaccatgcgcgggctgcagtttgccgaagacgccagcccgatggcgcacccgatccgtccggatatggttatcgagatgaacaacttctacaccctgacggtctatgaaaagggtgccgaagtgatccgcatgttgcacaccctgctgggtgaagaaaacttccagaaagggatgcagctgtactttgaacgccatgacggcagcgccgccacctgcgacgatttcgtgcaggcgatggaagatgcctctaacgtcgacctgtcgcacttccgcctctggtacagccagtccggtacgccaatcgtcaccgtgcatgacgactataatccggagaccgagcagtatacgttgaccatcagccagcgtacgccgccgaccgccgagcaggccgagaagcagccgctgcatatcccgtttgccattgagctgtacgataacgagggcaaggtgatccccctgcagaagggtggccacccggtacacccggtgcttaatgtgacccaggccgagcagacgtttgtcttcgataacgtttatttccagccggtgccggcgctgctgtgcgaattttcagcgcctgtgaaactggaatacaagtggagcgatcagcagctgaccttcctgatgcgtcacgcgcggaatgatttctcgcgctgggatgcggcgcagagcctgctggcgacttacatcaagctgaacgtcaaccgccatcagcaggggcagccgctgtcgctgccggtgcacgtagcggatgccttccgcgccatcctgctggatgagaagattgatccggcgctggccgctgagatcttaaccctgccgtcagccaacgaaatcgccgagatgttcgcgattatcgatccgatcgccatcgccgccgtgcgcgaagcgctcacccgcaccctggcgaacgaactggcggacgaattcctcgcggtttataacgccaataagctcgacagctatcgggtggagcacgccgatattggtaaacgtgctctgcgcaatacctgcctgcgctatctggcgtttgcggaaccgacgctgggcgataagctggtggcgacgcagtatcaccaggcagataacatgaccgacgcgctggccgccctgtcggcggcggttgccgctgagttgccgtgccgcgatgcgctgatgcaggagtacgatgacaaatggcatcaggacggtctggtgatggataagtggtttatcctgcagtccaccagcccggcagccaacgtggtggaaaccgtgcgcggtctgctgaaccaccgttcgttcagcatgagcaacccgaaccgtgtgcgctcgttaatcggcgctttcgccagcagcaacccggcggcgttccatgctgaagatggcagcggctatcagttcctggtggagatgctgaccgagcttaaccagcgtaacccgcaggtggcgtcgcgcctgattgagccgttgattcgtctgaagcgttatgatgagaagcgacaggcgctgatgcgcgccgcgctggagcagctgaaggggctggagaatctctctggcgacctgttcgagaaaatcagtaaggcgctggcgtaacggtggcataaccccggattgcggcgcgccttgcgccctgtccgggttacccgttagcgtggtgatgttgtcgggcggcgcgatgcttacccgacctggaatacacggctgatttggcgttggtagcccggctgtgcaacgcgcgagccggggacatgtcggatgacgatatgcccccgttcagacagcagacagttacgccggtcagccatgactaaacaaacgcggcgcacgctcgctgtcgccgcgtttcatcacccgatccagtacttcagcctccagctcggccagcttcgccgaaccggtgcgccgcggtcgcgggatatccacgcttaaatcgaggccaatcttcttctcttcaattaacagcacccgatcggccatggccaccgcttcactgacgtcgtgcgtgaccagcaggaccgtaaagccatgctcctgccacagggagacgatcagctcctgcatctccagacgggtgagggcatccagcgcccccagcggttcgtccagcagcagcaggcgcgggcgatggatcagcgcgcgggccagcgcaacgcgctgcttctgcccacccgacagcgcggccggccactcctgtgcgcggctttcaagtccgacgctggccaacgcctgcagggcggcgtcgcgccaggcgccttttaaccccagccccacgttatcaatcactgttttccacggcagcaggcgcgcatcctgaaacatcatccgggtgtcgtcctggatcgccgccaggggcgtcgcgccagccagcagttcgccggcgtttggtttttccagacctgccaacaggcgcagcagggtacttttgccgccgccgctgcggcctaccaccgccacaaactggccgctgggaatatgcagatccagctcgttaagaatggtgttgtcgccatagcgtttcgtcaccccgttcagcagcagcgggatacctgggttgagacgggcagtgttcatgcgttagcctcctgaagatgatacgccggattccagcgcagccagagccgttccagcagctgggcgcagacgtcggccagtttgccaaggatggcgtaaagaatgatcgccactaccaccacgtcggtttgcagaaattcacgcgcgttcatcgccagataaccgatgccggcattcgccgagatagtttcggcgacaataagcgtcagccacatcagaccaagggcaaaacgcacgccgaccataactgagggcagggcgccgggtaatatcacgtgacggaacagggcgaagccggataagccatagctgcgcgccatctcaaccagcccacggtcaatattgcggatcccgtgccaggtgttgatatagatcgggaacagggtgcccagcgagacaaggaagatcttggcggtctcatcgatgccgaaccacaagatcaccagcgggatcagcgccagatgcgggacattgcgcagcatctggatcgaggtatccagcagacgctcgccccagcgagacaggccgctgatcaggccgagtattagcccgatcgagccgccgatggcgaagccgaccagcgcccgccatgagctgatggccagatgctgccacagctcaccgctggccgagagggtccagaacgctttcaataccccctccggcgagggcagcacccgcgtcgacagccagccgacggacgaggccagctgccagacaatgaccgtccctaccggcagcagccagggggcgaggcgtaacaacaggggatgggttgattttgccatcacggtctcctcagctttgcgctactttacgcggaataaactcgttggcgaccgcttccccctgcaggcgcaggctttgcggctgcgggatggacggcaccgcgacgtcaagcagggggaacagaagctctccgacccggtacgcctcttccagatgcggatagccggaaaagataaagctatcgatacccagcgcggcgtattcattgatccgttcggcaacggtggcggcatcgcccaccagcgcggtcccggcgccgccgcgcgctaaacccccgccagcccacaggttggggctgatttccagcttatcgcgtcgcccgttgtgcagggccgccatcctttgctggccgacggagtcggttctggcgaaagccgcctgggcgcgggcgatcgtctcgtcgtcaagatgggagataaggctgtccgccgcctgccacgcttcctcgttggtttccctgacgatcacgtgcagacggatgccaaaacgcacctggcgaccatgccgggcggctttctctcgcacctgagctattttctctgccacctgggccggcggttctccccaggtaagataaagatcgacctgctcagcggccagctcctgcgccacctcagacgagccgccgaaatagaggggtggacgcggctgctgcagtggcggaaacagcagtttggcgtcgcgaacgcgctgatgcttgccgttaaaggtgacggtttctccctccatcagcttgcgccagatgtgggtaaattcagccgaggcctcatagcgctcggtgtggtcgaggaagacgccgtcgcctgccagttcggcaggatcgctgccggtgaccagattgaacagcgcccggccgtttgacagccggtccagggtcgccgcctgacgcgcggcaaccgtcggcgataccacgcttggcctgagggcgacaaggaatttcagccgctgcgtcaccgggatcattgaggccgcgaccagccacgcatcctcacaagagcgtccggtcgggatcagcacgccggtgaagcccagccgatccgccgtctgcgcgatttgctgcagatagccataatcgaccggacgggcaccctcttcggtacccagataacgaccatcaccatgggtcggtaaaaaccagaacatattcagactcatgatttcgctccttgtgtggcggtgggctgccagatgcgggcccggatatcaactttttttggcaccagcttgttctcgtagaacaggtctgccgtctgctgctggcgagcggcggtttcggcgctcaccggggtaaccgcggtggggggacgatggtccagatagctggcgatcaccgcctccggtaagcccatcgttttcgccagcagcgtaatgctttgcgcgcgttggctgtgggtcagggcatcggcctgagtaaaggtgtcgagtacgccttcaatgaaagcgccattgcgttcagcgtagggccgggaagcaagatagaaggatcccgtctgtttcagatcggttccgtcagtgagtacccgggcgccgccctgcagcagcgcggcggagtagtacggatcccagatggcccatgcgtcgacattgccctgctggaaggcggcgcgcgcatcggcgggggcaaggtaaaccggctgaatatcgctaaatttcagacctgcgagctgcagggcgcgcagcagcagattgtgggagctggagcctttctgaaaagcgacctttttcccttttaactcagcaacgttatgaatcgggctgccctgcgccaccaggatcacctccgccttgggcttgggcggctccgcgccgatatagaccaaatcggcgcctgccgcctgggcaaagataggcggaatatcgccggtactgccgatatcaatgctgccgacgttcagcgcctccagcatctgcggaccggccgggaactcaatccacgagatatgggtttgcggatagcgctgctccagcagctgatggctcttcgccagcaccatgctgacgctgcctttctggtagccgatgcgcagagcgtcaggcgccgccggggcggcgtgacccagcgtagagaatagcagcagtccgcccagagtcagggcgcggagaggattaagcatgctccaccccacgcagagatgttaacgacggcgcacggctgctggggcgatgcagcgcctgccagaaggtctccagggcgtcatcaaggcgccgctgcagattcgcggtaaactgcggcttatgctggtaatcggtcacctggctgtcatcagcgaagacgccatggaggatctcctgggccttgagggcattcagcactggcttcagcgcgtagtccaccgccagcatgtgagcgatggtgccgccggtggccagcggcagcacaattttgccctctagcgctcgctcaggcagcaggtcgagcagcgttttcagcgcgccggagaacgaggctttatacaccggcgtggcgatgatcaggccatcagccccggccagctgttcattgagcgtctgcagcgccgggttgtcaaaacgagcgtacaggaggtcttccggggcaaagttctgcagatgccagtggcagacttcgatatcggcggcggtgagcgtctctctggcgtattccagcaaggcactggaacgggaagggtaacgcgggctgcccgcaagcgtaatgacgcgcatctctctctccttataactaaatgtttgcatttatctataattgataacatttatagtgagtgtgacagagggccattatttccctaaatgatttatccgcggttagatagccgaaaagcgcataatggcgcgcggggtaggtaatcgtttgcgctgatgggggattttttgtcgcaggtcaattccctttccgcaacagatcgcacataatacgcccccggtttgcacaccgggaatccaggagagttcatgtactaccccttcgttcgtaaagccctttttcagctcgatcctgagcgcgctcatgaagttacctttcaacaattacgccgtgtcaccgggacgccgctggaaatgctggttcgccagaaggtaccggccaggcctgtcacctgcatggggctaacctttaaaaacccgctgggtctggcggccgggctggataaaaatggggaatgcattgacgcgctgggcgcgatggggtttggttcgattgagatcggcaccgtgacgccgcgtccgcagccgggcaacgataagccaaggatcttccgtctggttgatgccgagggattgatcaaccgcatgggctttaataaccatggcgtcgataacctggttgagaacgtgaaaaaggcgcattttgacggcgtgctgggtatcaatatcggcaaaaataaagatacgccggttgagcacgggaaagatgattacctgatttgtatggaaaaagtctatccgtacgccgggtatatcgccattaatatctcctcgccgaataccccagggctgcgcacgctgcaatacggcgaagcgctggatgatttactctccggtattaaaaataagcagctcgagctgcagcagaagcatcaaaaatatgtcccggtcgccgtaaagatcgcgccggatcttttgcctgaggaattgatccaggttgccgatagcctcgtgcgtcataatattgatggcgtgattgcaaccaataccaccctcgatcgttccctggttcagggaatgaaacattgcgatgagaccggcgggcttagcggtcgtccattacaattaaaaagcactgaaattatccgtatgctctccgctgagctgaatggccgtttgcctatcatcggcgtgggcggcattgattcggtgattgccgcgcgggaaaagattgccgccggggcatcgctggtgcagatctattctggatttatttttaaaggtccgccgctgattaaagaaattgttacccacatctaatcttttcctcctctgaatcccacccagggctttatttccggccctggttgttttatattccctcactgttgcttatttaaacattttagacttttcttaattttagaaaatattctgcggtaagtcgcaacaactttgcagaggcgtatgaaaggggacagggggaaaaatgcggattaaacctgacgataactggcgttggtattacgatgaagagcacgaccgcatgatgctcgatctggccaatggcatgttatttcgctcgcgcttcgcccggcgcatgctgactccggatgcctttgccccttcgggattttgcgttgatgacgccgcgctctatttctcttttgaagaaaaatgtcgcgatctcgagctatcgaaagagcagcgggcggaattagtccttaacgcgctcaccgccatccgttttctcaaaccgcagatgccgaaaagctggcactttatcgcccatacccatcactggcagccgagcggcggcgacgccgcctgcgtttggctgagcgataccggcgagcaggtgaatttactggtggtggagccgggcgataacgccgcgctctgtctgttggctcagccgggtctcacccttgccggccgcgtcatgcagctgggcgatgtcattaaaatcatgaatgacagactgcagccggcgcagagcgcggtcagctacagtctggggcaggcggtttaaggcgccaggcgtagcgctgttttcggtacacagctgcaggcgagaatagtgccatccccggcaaccgcgtttttctttaacggactcacttctccctcttccagccggatgcggcagctgccgcagatccccgcccgacacgaatagggtacgcgaatgccctgttgttccagttgctccagcagcacctgctggttattgccggtaaactgttgaccctgccattcgatggcaaccgtagcctgctgctgcgcctcgggagccggggtatcgtcgctttcacctgccccgtaggctttcgccgggccgcgggtaaggatttccccttcatctcccacccggatcaccccgctgttgcgggcaatcaggttctggccaaaatcgacatcgccattgtccagcgcggtacgaaaacgctttaaggtttccagcggctccccggcgggatgcttctgaccgcgctccgggctgacggtggtaaaaatgcagcggctgcacggcttagcgacatcaaacaccacctcgccgatgcggatcactttccagctatcttcatcccaggccgccgcgccggtgaccacaaggttagggcgaaactgttctatgcttacgctggccgggcagcgctgttgcagatcgcgcagggaggcctcgttagccagcaggtaagggtagccgtcggcgaaggagagcggcaccgcatcatggcgctttacccggcgggttagctgcggccccagccagcgcagctggacatcgcgcttgaaaaagccgctgagccactggttaacggcggcgggcgcgatgagggcggtaaaatggttgccccagacttcggtcggctcggcctgcgtggcgaaatcgctaaaacgcaccacggcgctgctgccgtccggtgcggtcaggtgaaggccatcatgcagcggcgccggaataaatttcaccatttgcggaaactggcgagcggtaataaaggtcccgtcggtttcggtgaccataaacaggcgatcgaaggccaggccgctgatatcagcaaaggcgtgggtcaggcccatgccgcgcatggatttaacaggatgaataaaaagtcgcgatagcgttaccatacgctgcctccgggttccaaaaataagcctataactttatgacatagggcacatattggctataatgcgcaccaattttctttaagtaaaagtgacgatatgaattctctgtttgccagtacggctcgtgggctggaagagctgttaaaaactgaactggaagggcttggcgcgacggactgccaggtagtccagggcggggtccattttcagggggatacgcgcctgctgtatcaaagcctgatgtggagccggctggcttcgcgcatcatgctgccgctgggcgaatgtcgcgtatacagcgatctggatctgtacctcggcgtacaggccattccgtggacggagatgtttaaccctggcgccaccttcgcggtgcattttagcggcctcaatgacgagatccgtaacagccagtacggcgcgctgaaggttaaagacgccattgtcgacagcttcacccgtaagaatctaccgcgcccgaacgtcgatcgtgagtcgcccgatctgcggatcaacgtctggctgaacaaagagacggcgcacatctcgctggatctgagcggcgaaggcctgcacctgcgcggctatcgcgatggtaccggaatggcgccgatcaaagaaaacctcgcggcggcgatcgtcatgcgctctggctgggtaccgggtacgccgctgctcgatccgatgtgcggctccggtaccctgctgattgaagcggcgatgctggcgaccgaccgcgcgccgggcctgcaccgcggccactggggctttggcggctgggcgcagcacgatgacgccatctggaaagaggtgaaggcggaagcgcaaacccgcgctcgtcagggattggcagcgtatgagtcacgcttctacggctcagacgtcgacgcgcgcgtaatcgagcgcgcgcgccgcaacgcccgccgcgccggcattggcgagctgatcgattttgacgtgaaagacgtcgcccaactgaacaacccgctgccgaaaggcccgtacgggacggtgatcagtaacccgccgtacggcgaacgtctggaaagcgagccagcgctgatcgctctgcacagcctgcttggccggataatgaaaagtcagttcggcggctggaacctgtcggtattcagcgcttcgccggagctgctgagttgcctgcagctgcgtgccgacaagcagtttaaagccaagaacggcccgctggactgcgtgcagaagaattatcacctggcggagagcgaaagcggcaagccggcgatgctggcggaggattttgctaaccgtctgcgtaaaaacctgaagaagtttgaaaaatgggcccgccaggaaggaatcgaatgctatcgcctgtacgatgctgatctaccggaatacaacgtggccattgaccgctatgccgactgggtggtggtccaggagtatgccccgccgaaaaccgtcgacgcgcataaggcgcgccagcgtctgttcgacatcatcgctgcgactatcgccgtactggacatggcgcctaacaagctggtgctgaaaacccgtgaacggcagaaggggaaaaaccagtatcagaagatggcggagaagggcgactttattgaggtacaggagtataacgcgcgcctgtgggtcaacctcaccgactacctggataccggtctgttcctcgaccaccgtatcgcccgtcgcatgctcggccagatgagtaaaggtaaggacttcctgaacctgttctcctataccggcagcgccagcgtccacgcaggcctcggcggtgcgcgatccaccaccacggtggatatgtcacgcacctacctggagtgggcggaacgcaacctgcgtctcaatggcctgaccggccgcgcgcatcgcctgatgcaggcggacgtgctgggttggctgcgggagagcaccgagcagttcgatctgatctttatcgatccgccgaccttttccaactccaaacgaatggaagatgcgtttgacgtccagcgcgatcacattcgcctgatgaccgatctaaaacgtctgctgcgtaaaggcggcaccattatgttctcgaataacaaacgcggtttccgtatggatcatgacgggctggcggcgcttggcctgaaggcgcaagagatttcgcaaaaaacgctgtcgcaggattttgcccgcaaccgtcagatccacaactgctggctgattaccgcagcctgaaaggaataaataatgtcactgattagtatgcacggcgcctggctttccttcagcgatgcgccgctgctggataatgccgagctgcatattgaagataacgaacgcgtctgcctcgtcggacgcaacggcgccggtaaatctaccctgatgaagatcctcaaccgcgcacaggggctggatgacggacgcatcatttatgaacaggacctgatcgtggcgcgtctgcagcaggatccgccgcggaacgttgctggtacggtgtacgattttgtcgccgaagggatcgccgagcaggcggcttatctgaaagcctaccatgacgtgtcgcatcaggtgatgaccgatccgagcgacaaaaatttaaatgaactggcgcgcctgcaggagcagctcgataacctgggactatggcagctggacagccgcattaacgaagtgattgagcagctgggccttgacgccaatgcgcagctggcgtcgctgtccggtggctggctacgtaaagcggcgctgggccgcgccctggtcagtgggccgcgcgtgctgctgctggatgagcccactaaccacctcgatatcgaaaccatcgactggctggaaggtttcctgaaaacctttaaaggcacgattatctttatttcgcatgaccgttcctttatccgcaatatggcgacgcgcattgtcgacctcgatcgtggcaagctggtgacctatccgggaaattacgatcagtatctcctcgataaagaagaagccctgcgggtcgaagaactgcagaatgcagaatttgaccgcaagctggcccaggaagaggtgtggatccgtcagggtatcaaagcgcgccggacccgtaacgaaggccgagtccgcgcgctgaaggcgatgcgccgcgagcgcggtgagcgtcgggaagtgatgggcagcgcgaagatgcaggttgaggaggcttcccgttccggcaaaatcgtctttgagatggaaaacgtcaactatcaggttgacggcaaagtgctggtgaaggatttctccgcacagatccagcgcggcgacaagatcgccctgatcggccccaacggctgcgggaaaaccacgttgctgaagctgatgctcggccagctgcaggccgacagcgggcggatccatgttggcaccaagctggaggtcgcctacttcgaccagcaccgcgcggagttggatccggataaaacggtgatggacaacctggcggaaggcaaacaggaggtaatggttaacggtaaaccacgccatgtgctgggttatctacaggacttcctgttccatccaaaacgagcgatgaccccggtacgtgcgctttccggaggggaacgtaaccgcctgctgctggcccggctgttcctgaaacccagcaatctgctgatccttgatgaaccgactaacgacctcgatgttgaaacgctggagctgctggaagagctgatcgatggctatcaggggaccgtgatgctggtgagccacgatcgtcagtttgtcgacaataccgtgaccgagtgctggatcttcgaaggcggcggtcgtattggccagtacgtcggcggctatcacgacgcccgcggtcagcaggcccagtctttggcgcaaaagcagacggtcgttaaaaaaacgacggaagtcgctcagccaaaagcagaaactgtcaaacgcggcgggaacaaactaagctataacctgcagcgcgagctggaacaactgccgcagaagctggaggctctcgaggccgaactgcagacgctgcaggatcaggttgccgatcccgatttcttcgggcaaccgcacgatcgcacgcagcaggtgctggcgcagctggccgaagcggagcaggcgctggaagcggcctttgaacgctgggaatatctcgaaggattaaagaacggcgcctgagccgaggagttgtcatgtgcgatcatcatcatgctgcgcgacatattctatgtccccaatgtgatttgctggtggctttgccgcagcttgagcatcgccagaaagccgcctgcccgcgctgcggtacaacgttaaccaccacgtgggacgcgcctcgccagcgtcccacggcgtatgcgctggtcgcgctgtttatgctgctgctggccaacctgttcccttttatctatatgaaagtgggcggcatcagtagcgaaatagagctgctggaaattcccaacgtactgtttaccgaggattacgccagtctcgggactttctttttactctttgttcaattagtgccggcgttttgcctggtcaccattttgctgctggttaatcgggtcagaatgcctgccggcctgaagacgttccttgcgcgaattctctttcaactgaaaacctggggcatggcggagatctttcttgccggcgtgctggtgagcttcgtcaagctgatggcctacggtgatatcggcatcggtctgagctttgttccctggtgtatgttttgcctgctgcagttacgtacttttcagtgcgtcgaccgccgctggctatgggatgatattgcccccatgccggccattacccagccgctgaaggtcggggtgaccggtatccgtcaggggctgcgctcctgtgcctgctgtacggcggtgttgccggtcgatcagaccgtctgcccgcgctgtaacagtaaaggaacggcgcggcgcaaaaatagcctgcagtggacgctggcgctgctggtgacgtcatttatcctttatctccctgccaacattatgccgatcatgatcaccgatctgctgggcgataaaatgccatcgaccattatggccggggtgattttactgtggagcgaaggttcttatccggtggcgctggtgatctttatcgccagtattatggtgccgacgctgaagatgatcgctatcgcctggttatgctggaacgccaacggcaacggcgcgcgagattcggagcgcatgcatctgatctatgaggtggtggaatttgttggccgctggtcaatgattgacgtttttgtcatcgccgtgctctctgcgctggtccgcatgggagggttaatgaatatctatccagccatcggcgcggtcatgtttgcgctggtggtggtgatgaccatgttttcagccatgacatttgatccccgtttactgtgggatcgtgagccagattcaagccatgaggaaatacaacaacatggaaaataagagcggagaagcgaaagtgcagaaggtgaagaactggtcaccggtgtggatcttccctatcgtcactgcgctgatcggggcatggatcctgttttatcattacagccatcaggggcctgaggtcacgctgatcaccaccaatgcggaagggattgaagggggaaaaacccggatcaagagccgcagcgtagacgttggggtggtggagagcgcaacgctgaccgacgatctcacccacgtggaaatcaaagcccgcctcaattccgggatgcagaagctgctgcacaacgattccgtcttctgggtggtaaagccgcaggttgggcgcgaggggatcagcggtcttgggacattgttgtccggggcctatattgaactgcagccgggaacgaaaggttcggtgccagcgcagtatccgctactggattctccgccgctggcctcgccggatgccaaggggatccgtattctgctggaaagcagcaaggcgggccagctgtcgccgggcgatccggtgttgttccgcggctatcgcgtggggtcagtggaaaccagcaccttcgacacgcagaaacgtcgtataacttaccagctgttcatcaatgcgccgaacgatcgcctggtgaccaccaacgttcgtttctggaaggacagcgggatcgctgtagatttgacctcggcggggatgcgcgtcgagatgggctcgctgtcgacgctgtttggcggcggggtgagcttcgatattcctgaaggactggacctcggcgagccggtggcgaataaaacggaataccatctgtttgacgatcaaaagagcattcaggattcagtctttaccgagcatatcgattacgtcatgttcttcaaagactcggttcgcggcctgcagccgggcgcgccggtggagttccgcggtatccgtctgggcaccgtcggcaaagtgccgttctttattccggggctgaagcagcgtttgaacgatgactatcgtattccagtggaagtgcgggttgaaccgcaacggctgattaatcagcttggcggcgatccgaatattcgcgcccacattgacgatctgatcaaccgcggactgcgcggctcgctgaaaaccggtaacctggtgaccggcgcgctgtatatcgatctcgacttctatccgaaggcgcccccgcgcgggaaaatacaggagtttaacggctatccgattatcccgaccatcagcggtggactggcacagatccagcagcgtctgatggatgcgctggataagattaataacctgccgattaatccgctgctggagcaggcgaccagtaccctggcgcagagcgagaagacgatgcagcacgtgcagaccacgctggataatctgaataagatcacctccagccagtcaatgcagcagctgcccgccgatatgcagacgacgctgcgtgagctgaaccgtagcatgcagggcttccagcctggctctgcggcctacaataagatggtggccgatatgcagcgtctggatcaggtgctgcgtgagctgcagccggttctgaaaacgctaaatgataagagcaatgcgctggtatttgaggcgaaggataaaaaagatccacagccgaagggagcgaaacaatgaaaaaatggttactggcggcagccgtatgcgtactgacggcgtgcagtagcggcggggaaagcaagacatactatcagctaccggttgtgcagggcggcgcgcagagcgacgccagtcagggggcacgtctgctgtgggtagagcaggtcagcatcccggattatctggcgggtaacggggtggtctatcagaccaccgacgtgcagtatgtgatcgccaataataatctgtgggccagtccgctggatcagcagctgcgcactacgctgctggcaaatctcagccagcagttgcccggctgggtagtgtcgtcccagccgctggggagcgagcaggataccctcaacgttgcggtcaatggctttcatggtcgctatgacgggcgggttatcgttagcggtgagtggctgctgaagcatcagggacagctgattaagcgcccgtttaacatcgtcctcaggcaggaacaggatggttatgacgcgatggtcaagaccctggcgcaggcgtggagccaggaggcggctgccattgccagcgagcttaatcgtctgccataagtaaaattcatcataatgacctgccgcgcggttcacctgggccgcgcggcatttttttttgccaggtcagtttgttaccggcggctacgccgagcgaacaaaaaatgaactcttatataggtcacaaatatgacactggcgtgaattttgcgcattgacgttgccttcttttcgcggtattcgtaacccgtggctgcacaatttgcgaccactgttttcttttccaccagatcaaagaatgagggaaacgaggcatgaagagacaaaaacgagatcgcctggaacgggcacaccaacgcggatatcaggcgggtatcgcgggaagatcgaaagaaatgtgtccataccagagcctgaatcaacgctcatggtggctgggaggctggcgagaagccatggaggacagggtactaacggcctgacactgtctctttaaaaaagaagcctccgcatagcgggggcttcgccttttaatcgctgctgaatgttatcagaaagcggaagtatcctggaacagacccactttcagatcgttcgcggtgtagatcagacgatcgtcaaccagcacttcaccatccgcaagtcccataatcagacgacggttaacaatgcgcttgaagtggatacggtaggtgacttttttcgcggtcggcagaacctgaccggtaaatttcacttcgccaacgcccagcgcgcggcctttgccttcgccgcccagccagccaagatagaacccgaccagctgccacatagcatccaggcccaggcagcccggcatcaccggatcgccgataaagtggcaaccgaagaaccacaggtcaggattgatgtcgagttctgcctcaacataacctttatcgtagttaccaccggtttcggtcattttgatgacgcggtccatcatcagcatgtttggtgccggtaactgcgggcctttcgcgccgaacagttcaccacgaccagaggcaagaagatcttcttttgtataggattcgcgtttatctaccatgttttcagtaagccttattttaagttcgggacgcaggatagctaacacgtgtaagctgaacaagtccgatcagttagaacttgtcccacctaaccagcgtagcggccacggaaaacgatggcgagtctcttgctgggtcgcctgcgctatccgctcctgaatggtttgtcgcagcgtctgtccttcaccgtcccacatcagctgggtcaacatcggcagcgcttcggtaatatcgtcaatggcccagatagcaaactggttgtcggcaacggcctgacgtagctcgtggctcaggctgagatgacgaacgttggcggcagggataatcactccctgtttgccggttaaaccgcgctgctgacagatagtgaagaagccttcaattttctcgttcaggccgccgaccggctgcacgcgaccaaactggtcgacggagccggtgatcgcgatgctctgatttatcggtacgttggccagggcgctgattaaggcgcagagttccgccatggaggcgctgtcgccatccacttcactgtaggactgctcaaaggtcagcgaagcagtgaagggaagctgctgctccagctccagctcggacatcagaaaagcctgcatgatcatcatgcctttcgcatgaatgttaccgcccagctcggctttacgttcgacgtcgataaattcgccatcgccaatgtgcacgacgcagctgatgcgtgaaggttcaccgaacgcgcgtggatgaccggggaattcgatcaccgacagggcgttgatctgcccgacgcattcgccttcggtttcaatcaggatctgttcctgcaggatttcatcctgcatacgctccgccaggtagccttcacgccatacccggcgcgccagcatggtctgcatcgcttcgccggtaatctcctcgccttcgcagaaggcggcagcctcccgcagctggcgggttatccatagcggactgagcggcagggtctcctgatcgccggtatagcgcgttccctcatcgatcagcagaggccaggcatcggctgccgggcccggcagctccagctgctgcgcattctgccatacccactggcaccaggcctttagcgtgtcggcgtcagcaaactgcagagtgtcttcatactcgctatagatcgcctgcgcagccagctccggctccatttcctggaaatcggccagcgattcgcgttcgcccaccaggatgattttcagactcagcggcatggagggaatgctgaccggcagcggacgcgattcatccatagaaagccagtcaaagcgctgacgagtcaccatatttttcagacgcacccacagcagcggttgcgccagcagtgtacgtagcgaaagcacaagcacgccgccgttggcctgatggaccagcccaggctggagggtgattgcaccgttaaactggcgtacgcagccaaacagctgttccgcttctacccaatcggccatcacgaccggggcagtgctggcgaaattatcctcagcgccctgcgccggtgcgagcgtcacctgagcgtcggttacctcatagcggacgccgtaaagcggtgcggcaggctcgtgcagagtccgggtttcagccgccagccattgcagatattccggctcttcaggggctttcaccagcatgaaggaggagactgccggcgtgtacagcagctgctcaagcccatagaacaaacgcggctgcagatcgcccgagagggagggggccggatgggaaagttcagcttgagcaaacagcgcctggtaagcttccagatcaggcgcaaggtcggttcgggtcagtttcgtaatggtcaaagtcgctgttttttagttagatgtaaagcgcgcaattatacctgatgccgcgaccgagcacacggaggattatggttaccctgattattacccggtcgcagacttcacgaataatgatttatattcagcacatcagaaaaaaactgatatcctgaaatgagttacacggtcacattgagatcgcaatgaaatatcaacaactggaaaatcttgaaagcggctggaaatggaaatatctggtaaagaagcaccgggaaggtgagctgattacccgctacattgaggccagcgctgcgcaagctgcggtagatgacttgctgacgctcgagaatgaacctgtgctggtgcatgcctggattgagcagcatatgaatccggcgctgatgaaccgcatgaagcagactatccgcgcgcgacggaaacgtcattttaacgctgagcatcagcatacgcgtaagaagtctatcgaccttgagtttgtcgtttggcagcgtcttgctggcctggcgcagcggcggggcaaaaccttgtctgaaaccatcgtccagctgattgaagatgccgagcacaaagagaaatatgccagcaaaatgtcgagcctgaagcacgatctgcaggtactgttagggaaagaatagccaggtaggatcgtcgacccgcctgctggtggttgccctggccgggggctgcttcacagctctcagccgctaaagtgggcgagagggcataaaaaaaacccgccgaagcgggtttttttatcggttataacttaagccgccggctgagttacaacttctttgtagcctttaacttcgatctctacacgacgatccggagccaggcaatcgatcagggcagcgcgagctttcacgttgtcacaggtgttgccagtaaccgggttggattcacccatgccgcgagcggagattttgccagccgggatgcctttagcaaccaggtagtcaacaacggactgagcacgtttctcagacagctgctggttgtaagcttcggaaccgatgcggtcggtgtagcccagaacaacagcggaaccgtctttcggatccatgttgctcagctgagtgtacagctgatccagagcctgctgaccttccggtttcagggtagctttgttgaagttgaacagaacgtcagacttcagggtgaagtgcttggtagccacttccggagccggagccggagccggagcaacaaccggtgcagcatcttcctgaccgaagcggtaggaaacgcccaggctcagcatgccgttatcaggacgggtacccacggtgcccgcgtcgccgatgttgttaacccactggtattccagacgggtagcgatgtcacgagtaacagcccactctacgccgccagcaaatactggggaaacgccagtgtcgtgttcgctacgggaaacgccggtagaagcgtagttgcctttggagtcagcgcgccaaaccatgccgcccagacgggtgtagatgtccagatcgtcagtgatcgggtaacccagtttagcggtcagctgaacgccctgagctttgaaagcaccgttgtcaacgctgcctttatatgccatacggcccagccagtcataacccatttcgaaaccgaggtacgggttaacctggtaaccaccgaacgcaccagcaccaagctgatcgttacgggtcggaccgttgttgttctggaaaccgttaccgtagaaaccggtgtcgtgatactgggaccaacccagtttaccacctgcataccaggtgttatctttcggagcggcctgcgctacggtagcgaagccagccagtgccactgcaatcgcgatagctgtctttttcattttttgcgcctcattatcatccaaaattcgccatgaagttacaaaagacctcacggttaaatccttcaccgggggcgtgacttgttgttaactatgctgatacatgcagcgtaagccgatcacccctggcgatgtaaagtctacaacttagttcgaaacttacaagtgtgaactctgtcaggcatatgaaaaaaaagggttgtgtacacaatatttaacaaatatggttgattttcgtacacgaaaaaaagacagaaatccccgtgtggcaggcattccgcgaaaaagaccataaaaaacgctgtacctttcccagcggtaaaaaaaattccaggaataatcctaatttcactcaatgatacaaatttgagtgaatttttagcccgctgagttgtctgccgagcgtgccctgatttcgcaccgggcgcatgatgaatcccatcgcggaccctacctgggcagcgttaacgagacgttcgtgttcgtcagcggttaactcctccgccagccagcagataaccacactataattacctgtgcgcagggcacggatcattgagtctatggtatggctgggagagagctggctaatttgcatgaccttggacagcggcagaccggcggactgaacccattcgcggctgagcttttgttgcggcgtgagccacagctgccagcgcgactgttgacccagctgctgtaataaaggtagcagcaataactgcgtcatcatgggttgatcttcacgatagacaatttcactgatcagcccattggtgttctgttcgccagaacgatgagcgtagtggcctgccggagcagaagcctgtgctgaacggtttgcgtgagctgaagtaaacatagtctatcccgcctttagttactgtatgcatatacagtatcttcgccaggggaaaagatcaaccgcaatttgccattttgctgccgggaatttaatcgcttctcgtggttccttatctgtcaaaagaagcccctgcattatccaatccttaacgcgcgctaatggtttcatttctccctgtcgattgctgcaacgcttgcgattttctgaaagcgtctcgcaaaaccgcattctggtgaaaaagtcggcgaaaatcatcttgctgctgcccgggaagtcccttatgttttctcttagcggatccgttaacaacttaagtttaattacatgattaacaaaggaatgatcatgagaaaactagtttgtccgcggctcccgcaatttcaggcctgcgtctcaccgctgggtcaactgcatactcgtccgctctttggcggctacagcctggctattgatgatacggtgtttgcgatggtggccgaggggaacatttatctgaaggcctgcgagcagagcgctgcttatcgggtggaacatcgtaatcctctgttaacgctgcgccgacacggccgcatagtgccgctgaagtattatcaaattgacgacactttatggcgcgatgagcagcagctttttcggctatcgctactgtcgtggcagagtgcgcagcgcgaaaagaactaccgacgggcgtcgggccgcctgaaggatttacctaatatcagctttcatatggaattgcagctgattcacgcgggcataccggacgttaggacgttgcgggaagttggtgcgcaggaggcatggttgaggctacgcgtaaataatgcttctttatcgctgagcgtattgctggcgctggagggggcgattgccggggtacatgccgccgcgctcccgacgccacggcgtcaggagcttctcgaatgggcggctacccggtagcggaaaagccttgttattcggtttgggcgtggacccgttgctgcaggcggcagatttcaggcagcagcgccagcagcaggccaatctgctgtaagaccaagggttccttactgtccgcgcgcggttccagatgatggatccggctttgcaggctgttcaaagcctgttgcacccgctgttcatccgcgggggtatggtgcaaggcgtcatccacataacagactgcatcatccagcagggcgaggatttccggcgtggacagtttttcccgatgcgcgccaagagcggagatgtagctggtgaacgtgtggttaaggcatagcagacgaaaggcggtttctcgctgggtggcatccgcgcgtggttcagtcgataagttcgagacgacggaggccagctcagcatcacggttgtaggcgtcacgacgcgcgacacggtaggccagccggttgtcgcggccctgatgatactgctccagaatcgcgtccagatagcggcagttcgcgttcattgcccggtccagcacccgcggcaggttgcggaatttccagtccggccagatgaagctgacagctgcccaggcgatggcgcagccgatcagcgtatcaatgatacgcggcagcgcgacttcaaagccctcgccaagcaggttaaagcacagcagcaccagcagcgtaataaacatcgtggcatgggcgtactgcacgttacggaaggcaaaaaacagcacgccggtcaggacgatcaacagcagttgtccttcaacagagggaaccagcagcaggaccggcaggccgatcgccaccccaaccagcgtgccgataatcctcagcgccaggcgatggcgggtggcgttatagttcggctgacagacgaacaggctggttagcaggatccagtagccatgctggagtccggtaaactggataaaggcatagccggcgcagagcaccaacgacatacgtactgcgtggcggaaaagggccgactctggcgacatattgcgctgcaggcgcagccagatatcgctcagaccgccaagtctgtcgtcggccagcagcgtctcggtattactcccggcaggcgcggtggtttgcaccgattcaatggtggccagctgagcatcgatagcgcgcaggttattcagtaaataccctagggcgttgagctgctcgtcggatgcgccgccggcgcgcacgcgctcaagtgccgcatcgagatgcatgaacgcccgttcaaaatgggcatcatgctgatagggttcgcgtaacagaatcgcccgcgacagtttctggcaggcctgcgcctgcatcgaaagcattcgctggaaacggaacatcacatcgctatagcgaaattgatcgcgtagggtttgatactgaatatgcgatgagctggcgcgttcatgaatatcctgggccacaaagtagtactgcagggtgcggcgggtgccgcgctggccccgatcgcctcgcagtcgggttagcagcgagaccttggtttggttaagcgtagctaccagctggccattagcgagcgccagatcgtacagcggcgcctggctctcatcctcaaggtcaggatcaaacagccgggatttgagctcaagatagcgggccagttgctcatagctacgcgccaggttgtcctgcaatggacgaatcggaaagatcaggtgcccggacagcgtcagcaggttgtaccacacggcccccgccagcaggaacaacggctgcagataccaatgatcgtacagcgtgacgccgagcatggtgtagatggcgataagcagggcgccgaaggcaatggtcgcatagcgctgaccgaggccgccaagcaaaataaagccgatggtagacacggttaaaccaagggcaaacagcggcggccacggaaacagcagctccacggaggcggaggcgataaaaaagcaaaccagagtaatggcaagattacgcagacggccagccagacggtcgtcaaggtcggtcagagccgcagccacgacgccgagggtgagggggatggtcagtttgacttcgccgatccaccagggaaacagcgttgtgccgcagagcgcgataaaaattcgtacgttataaagccaggcgctgttccaggtgtagcggcgtagcagggggctaatcatgtccgtgttccgttcggttactgaaagcgacgacgcgcattggcttcacgcgcagcacgcgcggtttccacagaaacgacccggcgacccaccggccagagggcgatggcggcgattttgaaattcgcgatccccaccgggatgcctatgatagtcaggcactgagctataccgctgaaaatgtgcatcaggcagagccaccagccgaaaaaaatgaaccacagaatgttcagaacggtaccgccggcgttcagtagaccgtttttgcgccccggctcgagctcgtcaacatgaatcgcctcgttaccgtagggaaataacgaaaggcgagtgatttcccagcaggaacgagtcagcggcagcgtgacaatcagaatgatgctgaccagggtggcgagtagccagcctagagtggtggcgaaaccgccaaggataaagttcaaaatattcagaatggtacgcataaagcctcggttttgcccggtggataataagacctgatgattgtaacgtttttttgcgctggagcacctggtccggggcggttaaactgaaaaacaatccaccctgattgaaaatcgacattatatggaacttaaagcgacaacattgggcaaacgcatggctcagcacccttatgatcgggtgcagctactgaacgccggggtaaaagtttccggcgatcgtcatgagtatcttatccctttcaatcagttattgtcagtgcattgtaagcgcggtctggtctggggcgaactggagtttgtgctaccggacgggaaagtcgtgcgtttgcacggtaccgagtggagcgaaacgcagcgcttttatcatcatttacatacgctctggcagcagtggagcacggagatgagcgatatcgccgccggcgtgctgaagcagcagctggcgacgatcgagcacactcgcgcagaaggcaagtggctaacccgtcagcaggtggcggatgttcaggataatatacgccatgcgttgactggtttgccgatgcccaccagtcggcttgatgcctttgataactgccgggagctgtggcgggagtgtcagcgctggttaggcgatattgaagcgacgcgtctggcccataaccaggcctttaccgaggcgatgctggagcaatatcgcgaattttttgatagcgttgagtcgtccccgctcaatgcgtcacaagcgcgtgcggtagtgaacggcgagcgctccctgctggtgctggcgggagcgggcagcggtaaaacctcggtgctggtggcgcgagcgggctggctgctggcgcggggagaagccgcggcagatcaaattttgctgctggcattcggccgccaggcggcgcaggaaatggatgagcggatccgcgagcgtctggcatcagatgatattaccgcgcgtactttccattcgctggcgttgcatattattcagcagggcagcaaaaaagtgcccactatcagtaagctggaaagcgatactgcggcccgccacgcattgctgctgaaaagctggcaaaagcagtgccaggagaaaaaagcgcaggcgaaaggttggcgcctgtggctggaagaagagatgggctggcaactgccggagggggacttctggcaggacaaaaaggtgcagcggcggatggccagccggcttgaccgctgggtgagcctgatgcgcatgcacggcgactcccaggcggagatgattgccggggcgccggaagcggtacgcgacctgttcagtaaacgggtgaagctgatgtcgcctctgatgaaagactggaaagcggcgctcaaggccgagaatgcggtcgatttttccggcctgatccatcaggcggtcaatattctcgataaaggccgcttcgtcagcccatggaaacacattctggtggatgaatttcaagatatttcgccgcagcgagcctcgctgttggccgcgttacgccggcagaatagccaaaccacgctctttgccgtcggggatgactggcaggcgatctaccggttcagcggggcgcagctttctctgaccaccgcattcaaccactactttggcgaaggggattgctgtgcgctggataccacctatcgctttaacgggcgtatcggcgaaatagccaatggctttatccagcaaaatccgcatcagttaagcaaaccgctgaacagccttatggcaggtgataaaaaggccgtcacgctgttagccgacgacaagctggacgatcttctggataagctgagcggttacgttaagcccgagcagcgcatcctgctgcttgcccgttatcaccatctgaagcctgaggcgctcaacaaagcggcgacgcgctggccgcacctgcagcttgattttatgacgattcatgccagcaaaggtcagcaggctgactttgtcattgtgttgggactacaggatggggaggatgcgtttccggccccggcgcgcgagtcgattatggagcaggcgctcctgccgcagccggaagattttccggatgcggaggagcgtagactgttgtacgtggcgctcacccgcgctcgtcaccgggtatggctgttatttaacaaggcgcaaccttcgccgtttgtcgagatcctgcaggcgctggatgtgcccatggccaggaagccgtaatcgcggctcgattatttcaggcgctcggcaagatagcgtggataatccgggatcagaatatcgagcggttgaccgaagtgcggcgactggataataaagtcagcggtggagacgttagtggcgaccggaatgttccagacggtggccaggcgcagcaacgctttgacatccgggtcgtggggaacggcgttcagcggatcccagaagaagatcagcacgtcgattttgccttctgaaatgagggcacccacctgctggtcgccgcccatcggaccgctcagcatggcattaacctccaggccggtagcccgggagacgagattaccggtagtgccggtagcatacaaaatatgttgcgccagcagcgcctgatggcgagcaacccatttcatcagcatatctttgcagtgatcgtgagccaccagcgcgatatgtttttgcgcaggcagggtacgtgttgtcagttccatattttcattccacattttgacctgcaaacagattactgaatgtggctgtcgctgcaagcatcggggatgaaaattttgctgaatctgtgggttaggctggatggccccctgctgcggattagcatacacttaagtgaaatagcaggaggaaaccatgaaagagaatgatattgctggcatcctgacctcgacacggacgattgcgctggtcggagccagcgacaagcctgaccgtccgagctaccgggtcatgaagtatctgctggatcaggggtatcacgttatcccggtttcgccgaaggtggcgggcaagacgctgctgggacaacaggggtatgcgacgctcgccgacgttccggaaaaggtcgacatggttgatgtcttccgtaattcagaagcggcgtggggtgtagcgcaggaggcgatagccatcggcgcgaaaacgctatggctgcagctgggggtgatcaatgagcaggctgcggtgctggccagggaagccggattgaacgtggtgatggatcgttgcccggccattgagctaccgcgactgggattagcaaaataacaaaaaaccccgcctggcggggttttgttttagttgcgaaggcgcggagcctgcagctgctgacgaatcgttttggccagttcgtcgagggacggctgttccgggtgttcgtcgcgggtttcgctgctcagctgcgcttctgccagataggtgtgaatcggctggccatcatcatcttccatcaccacatggtaccagggcgccgcgcgcaattcgtcattggcggcaatttcatcctcttccggctccgcgagcgaatactcgggatcgacatcgacgatgacgcccaggtagcccaagagcgtatggcggacctgttggccgataccgaatttgctggctatcataggcacctcctgggaaacatgaatactccctatatgaggctcatgtttcgtttttcaagttacatgacgcgacaggcaaaccccttcagatacagcccttccgggtaggttgcgatcaccgggtggtcggcagcctgacggaactgttctataaattgtacatcacgcccggcatcaattgcggcatcggcgatgattttctgaaataaatcggtggtcatcagcacggagcaggagaatgtcagcagcacgccgccggggttcagcagctggatcgccagcatattgatatctttatagccgcggcaggcgcccatcagctggcttttattttccacgaacttcggcggatccatcacgatcacgtcgaatttctctccctgatcgcggtatttacgcagcagtttgaacacgtcgtcgcgcacaaactccgctttggacagatccagtccgttgatctccacgttctggcgggcaacgtcgagcgcctcctgagaggtatccacgctggtgacctggcggcagccgcccatcagcgccgacaccgcaaagccgccggtgtaggagaagcagttcagcacccgtttatccgcgacatagcggcgggtggccaggcggctgtcgcgctggtcgaggtagtagccggtcttgtgcccgccctggatatcgactaacagcttcatgccgtgctcggtgatcggcagcagcgccgggggcagttcgcccaccaccggcccctgggccagctccagtccctcttttttacgcacggcgacatcgctgcgatcgtaaatggcgcagtccgggaacaggttctgcagggcgctgatgatggcggcgcgctggtattcggcgcctgcgctgagcagctgcagcacgaaaaagttgccaaagcggtcgatagtgacgcccggcaggccatcggactcgccggcgatcaggcggtagctgtcgaggccatcgcgctcggccagccaggcacgccaggtttgcgcctgctgcagacggcgttcaaagaaggcgctatcgatggcttcattgcggtcgaaggtccacacgcgggcgcggatctgcgacgacggcgagtaagcgccgcgggccagccattttccctgatggtcaacgatatcgatggtttcaccgctgcgggctttaccttccatgcgggcgacgccgccggagaatatccacggatggcgacgcagcagggatttctcgcgtcctttggctaacactaagcgggggaatagggaatctgtcatggggctacctttaagcaacgggaatgtcggcaccgaaaaatggcgcgtagattagcacacctggcgcacgcaagcatctttcgcccggctggcacaggtgagcgtttcggcacaaaatgcaggcgcttcggcacattcagctggtgcggactctcataccctgttttctcaccccaacgaggagcagacgatgaaaaaagatatccgcatggctgtggcgatggtagcggctgtgagcagcggcgcgatggccgcgccgtttagcgtaagcagcaatgatatgcgtgacgggcagccgctggcccagcagcactggtttgccggtttcggctgtaccggaggcaatgtctctccgcagctggcatggaaaaacgccccggcgggcacacgcagcttcgcggtcaccgtccgggatcccgatgcgcctaccggcagcggctggtggcactggacggtggtcaatatcgccagcagcgtcttttcgctgcccgctggcgcgggagataaaaacagcgctacactgccgggcggagcggtccagggccgcaacgattttggctatgccggcttcggcggcgcctgtccgccggcgggagataaaccgcaccgctatcgctttacggtatgggcgctggatgtccccacgctgccggtggatgccggggccagcggggcgctggtcggctatctgttacatagccatgctctcgccagcgcacagttgacggcgatggccgggcgttaaaataaaaggtcggtctgatggagagtatccactttcagcataacgccttaaccgcggcggagatcaccacccgacggctatgcagactgcatcgcgtgcggctgttctccccggcgctctgtcgggtgaaacgcggcagcaaagtgattgtgcaaggggagagccgggtgctggcgactccgcaacagctgattgttttgccagctgacgtggaactggaggtgattaaccagccggagaatggcctattttgctccgatctgctatcgctgacgcccgagctgctgacgaggtttaagactcgttatctcagcgaaccaccgccagggcgcctgacctcgctctgcgcaccggtgacgacagagctggcgtttatgtggcaaagcgttctgcaggcggtgcgggagggattgtccgtcgcgctgcagcagcaccagaccatggggctgctgctggccctgcatgaggctggctatgcgggcccgctgctcgtcgagcggcagcaggatctgtcggcgcaggtgcggcagctgattatgctggcgccggcgcaggcatggagcgtgtcgcgggtggcgaaaatgctctttctcggcgagtccacgctgcgccgtcggctgcagcaggaatcgcagagttttcgccagatcgtcgaggaggtgcggatggcccacgccctggggcagctgcagaccacctcgcggccaataggcgaaattgcgcagaacagcggatatcagtcgggatcgcgctttaccgcgcgcttccgtcagcattatggtttactgccgaagcatgtacgctgagcgaatttgctatcctcagcgtatagcgtgagcgaaaaggagatgattatggccagtatctgcacaatggcatgggtttacggttcggttcagggcgtgggatttcgctattccacgcagcgggaagcgctgcagctgggggtgaccggttatgcccgtaatctggatgacggcggggtggaagtgcttgcctgcggcgaggcggagcaggtggaaaaactcatcgcctggctgaaagccggggggccgcgcagcgcgcgggttgaccgagtgttaaccgagccccatcaacccacccgcagctgggacaaattcgcgatcctctattagatgcacttcaccggcttcggcaagccggcgattttagtcgcctgtttggcgggtcctttcgggaacaggcgatagagatagcggctgttgcctttctcttcgccaaacttgttggccatcgccttgaccagcatacggatcgccggagaggtgttaaattcaaggtaaaactcgcgcacaaagcgcactacttcccagtgttcaacggcgagcgttatcccttcctgcgcggcaatgacttccgccatcgcctcgctccactgggtggtatctttcagatagccttcgctatccgtttcaatttcgttgccttcaaaaataaacatgatttttcacataccgcctgaaactggccgcagtgtagcaaaaaaaaaggccccgcataagcgaggcctctgttaagcaggggagcggttagtcccggctggcgaagcccaggatgctcagcaggctgacaaaaatgttgtacagcgagacatacagactgaccgtcgcgcggatatagttggtttcaccgccgcggataatgttgctggtctcgaacaggatggcgcccgaagagatcaggatgaacaccgcgctaatcgccaggtgcagcgccggcagctgcaggaacaggttagcgaccataccaatcaggacgaccaccacgccggccatcagcatcccgccaaggaatgacatgtctttacgcgtcgtcagcacataggccgagcagcagaagaagaccagcgccgtgccgcccagcgccaggccgattaaatcgcccatgccggcagaaagatacgcgttcagcatcggcccaaggatatagccgaggaacccggtgaaggcgaaggcggaaataatcccggtgggtttattcgccgttttgtaggtcaggaacatcagaccgtacatccccacgagggtcaaaatgagacccggcgaagggagcatcagcactgtgctggcggtggcggtgatagcggaaaacgccagcgtcaggctgagcaggaagtaggtgttacgcagaaccttgtgcgtgctgagcagcgaggaacggtcacgcgatgatgtaattatgcgatccatgagtcactctcttatgacagatgtaattagggataaagaataagaaaaacaagcgtgaagccctaatgcttttacccatctttacttagtttttaccgcttttgcctggcataaaattctatatagatagggaaaagcgatatattttcgcttttcgcgtcgctgagccgatcgaaatcttataggtcactgaaaaatattgccttatggcagttctgcgactaagtgtggaagagggggattaccccgtacgtcaaaggcaaagggaaatgacattacacaaaaaaaatcacatcacccgaacactcctggctgtcagtatgctggctatgagcggcggggcgctggcggcgcaggtgccgccgggcacccagctggcggaaaagcaggagctggtcagaaataacggcagtgaaccggcgtcactcgatccgcataaagtcgagagcgatgttgaattcaatatcattagcgatctctttgaagggctggttaacgtgtcgccagcgggggcgatccagccgcgactggcggaacgctgggaaaacaaagacaacctgttatggacctttcatttacgccccggtctgacctggtccgacggcactgccattacagcgcaggatatcgtctggagctggcaacggctggtctcgccggcaacagcctccccctacgcgagctaccctggcaatatgcatatcgccaacgcccgcgagattgccctcgggcaaaagggacccgagacgttgggggtgaaagcgctgaacgacaccacgctgcaggtcactctgacccagccgaatgccgccttcctggcgatgctggcgcacccttcgctggtaccgatcgacaaagtgctggtggagcggtatgccgataaatggacccgaccagagcatatcgtcaccagcggcccgtataagctgtcccaatgggtggtgaatgagcggctggtggctgaacgtaatgcaaagtactgggataatgcgcataccgttattaataaagtgacttacctgccaatctcttcggaggccgccgatgtcaaccgctacaaagcaggggagattgatattgtctatacggtgccgatcaatcagtttgcgcagttgcagaaaaccatgggcgaccagctggacgtttcgccgcagctggcgacctattactacgaattcaatactacccggccgccgtttaacgaagcccgtgtgcgtcgcgcgctgaatatggcgcttgataaagatatcattgccgaaaaagtgcttggccagggccagcgcccggcctggctgatcggtcagccggatatcggcggcgtgacgctgcataacccggactacgccagctggccgcgtgagaaacggattgccgaggcgaaaaaactgctggcgcaggcggggtatgatgaaagccatccgctggtctttaccctgctctataacacctctgagtcgcaccagcgtatcgccattgccgccagctctatgtggaagaaaaacctcggcgtcgaggcgaagctacagaaccaggagtggaagacgatgctggataccatgcatacgcataacttcgacgccgtccgctacgcgtggattgccgactacgacgatgccgccaccttcctcaatactttccgtaccggggatagcgagaacaccagtcagtacagcaaccctgcttacgatgaggccctgcgcaatgcggcgaaagcctccgacgtggcgacccggggcaaatactatcagcaggcggaagatctgctggcgcaggatgttcccgccattccggtctatcactatgtacgtacccatctggtgaaaccttgggtagggggcttcacgccggataagctggggtattactacaccaaagacatgtacattaaaaaacacccatccgccagcggcgatgggcgttgattttctgtgcaaactgcctgaaattcagacgaataacacaaaattgtttgtttttaaggcagttgatcaaaatgatgctttacagcatccgccgaggtgtttatagtgcgcctcacaccggaagtgtggccgagcggttgaaggcaccggtcttgaaaaccggcgacccgaaagggttccagagttcgaatctctgcgcttccgccatataaaagaaggggttaccgaaaggtaaccccttcttgctttgtccggtcggtcgtgcatgacccggacagcgaccgacgacgttttcattcccacagcgctgacggatacatagcccgtcgcatggcaggacttttcacaacgcccgcttattcttcgacaatccgcgccttcggtttgctcagcaggagcatgaccagcgcgacgtagggcatcggcttccagaaatagtagccctgcagcagatgaatattctggcgattaagataatcccgttgggcctcggtttcgacgccctcggcaatgatgcgcagtgacagcgtccgcgccatctctatcacgcagtccagcagcttgcttgtcggcgcctccccggttacccggccgacaaaactctgatcgattttgatatagtcgaaaaccagctcgtggagacaggaaagcccggaatagccggtgccaaagttgtccagcgcgatggaaaacccgcgggagtgtaacgtattgagcttgtccacaaccgccccgttgagcaacagcggctcctgctccgtgatctccagcatcagcttcaccgctttaccctcaaagccgcgctgatagtgcaggcagtcatcgataaacgtcggcgcgttaatatatgacacgctgatattcaggccaatatgaaacccatccggtagtttactaaagtgtggtctcatctgcgcgttgacctgcgccatcaggctgcgggttaggggaataattaagccggtacgttcggccagcggaataaattccgcgggcgagcgcgctggcgtcgtgctgttttgccagcgggcgaggtaaatacctcctggtgtgggtccgcagccagcggcttaacatcgccatatctggcaatcatttggttctgcacccagagtgccagcccgttgtcatcggtatcgctatatagcgcatcgcgcagatggatgtcgctgatcgtgacaatcaccctgatcggcgctaagcgcgtctgatagatcagcaccggccgcttattgaccatcattctggccgggagcagtaacagagggtcatcaggcaaagactcagggctaagtgtcaggacccggttgccagttaatgacgaacacgccagcaagaaataccatcagcgccagggaaaaggcaatcactcgcagccggtggatgaagagacggcgttgtttcttggcgatcgcaccgtcagccagccggcgtggcagcccggcgcgatggtgcgactgacggtcagcggcaaggcgcgggtatttagcggctaatccctgagcaggcggcgccggctatcgccggtgccgcacagaaagctaatcaggcggaggatgaagccgatagtatccgcgccactgacctcgtcgccatggagtggtagtacgttggaacaattccgcggggtcagtccatctcaccgccgttttgccggtgtgcgctttacaaatccagcactaaccggccgcctttggcgcgcgagcagcagatcagcatactctgctggctggctttctcttcctcgctgtaatactgatcgcggtggtcggcttccccctccagaatcatcgtttcgcaggtgccgcacaccccttctcggcacaggcattcgaccttcgccgctttgttattctcgatcacctgcaaaatggtcatatcctgcggcacggtaaattcgcgtccggaacgcgccagcaccagggtaaatgcctctccgcttttatcctcaaggataaactgctcaaagtgcagctggctggcgggcacctgatggcgttcggcggcggctttcaccgcctcgttaagcgccgctgggccgcaggtatacacgtgggttcctggctcgaggtcggcgaacaggcgcggtaggtcgagacggctgccgagcgctgatacatgaacattgacccgatcgcgccatggcgcagcgctgagcgcatcgacgaaagcattactgtcggcgtcgtgaaaacagtaatgcagctgccagtcggcctgccgctgttccagttccggaatatgcgataagaatggcgtaatgccgatgccgccggcgatcagcagatgttttcgcgcctgtggttcgatggcgaacagattgttgggcgtggacaccgtcagggtatcgcccgggcgcacccgctggtgcataaaacgcgagccgcctttggaaggcgactcaagacgcaccgcaatctgccagctggaggtatccagcggcgagctcatcagcgaataggcgttactgtagcgctgctcgccatcctgcatctggacgataatatggctgccgccgctgaatgccggcagcggggcgccggtcggcgacaccagcgaaaaacgcttcacaagaggggtgatctgttcaacatcgcgaacgaccgcctcaaacatttgataatcagacatcgctgaactccattaaaaaatcccggcgtggctagcgccatcgccgggagagcagatttacaacccctggcagagatacttcatctccaggtaatcttcgattccgtgttccgacccttcgcggccaagaccggactgctttaccccgccaaacggtgcgacttcgttggaaattagcccggtattgataccgaccatcccgtattccagctgctcggagacgcgccagatacgggcggcatcgttgctgtaaaaataggaggcgaggccgtagatggtgttattcgcctgtttgatgacctgctgctcatcgtcaaatttcaccaaagcggccaccgggccgaagatctcttcctgcagcagcagtgaccccggctgtacgtcgccgatcaccgtaggggtgaagaaattaccgcccagcggatgcgctttaccgccagttaacagcgtggcgccgcggctcagggcgtcgtcgagcagggactgcactttgcgcccggcgtcggcgttgatcagcgggccaatctgtacatcggactcgctgccatcgcccactttcagggcggcgacgcgggcgacgaatttatcgcagaattggtcgtagatggcgcgatgaatatagaagcggttgacgcagacgcaggtttgcccggcgttacggaacttggcgatcagcgcgccctcgaccgctttatcgatatcggcgtcgttaaagacgataaacggcgcgttaccgccgagctctaaggagagctttttgatggattccgcgcactggcgcatcagcacgcggccaacttcggtcgaaccggtaaaggagagcttacgcacccgctcatcgccggtgaacaccgcgccaatctctcgcgactggccggtaacgacgttaatgacgccctgcgggatcccggcctgattcgccagctccgccatcgccagcgcggtaaacggcgtttcgttagccggcttaatcaccatcgtacaacccgcggccagcgccgggccggccttccgggtgatcatcgccgccgggaagttccacggggtgatcgccgcgcagacgcctaccccctggcggatcaccatcaggcgtttatcggcgccgggggaggggattatctcgccgttggcgcgtttcccttgttcggcaaaccactcgataaacgaggcggcataggcgatttcgccttccgcttccgccagcggcttgccctgctcggcggtcattatctgcgccagcgcggttttgttttcgaggatcaggcggtgccagtttttcaatagcgcggcgcgctgggcggcggtgaacgcgcgccagcccggcagcgcggccgcggcggcatccactgcctgttgcgcttccgcacgccccatattggggatctggccgagcgtcgcgccggtggagggattgctgacggcaagcgttgtaccgtctgcggcgtcgcgccagcttccggcaatcagcgcctgctggcgaaacagatttgagtgaaatacggacatggccaactccttcaataattacggctggaatacctgggcgaccagattgtggaaatgcgcgatcccgtgctcggagataccgctgccgctgttatccgccataatgcgcccctggccgcgatagccgcgggacttcagccccttctgcacgctttccaccaggcgtaaatcttccgggcggaacacgtcgcgataccactcaatcagcgctttctgatcgtcagtcagctcttcgttggtgaaatagatgtcgtaattctgcagagtggtctcttcatccaccgggaattcatagataacggtcatcatgcccttgatcggcgtgacgttgaacatggtgcacggccacagccagaaaccgtgaaacgcggcgtcggtaccctcttcgaatttaaacgactgctcggacggtttggcgaagccatactgcagcgtccatttgccgtgcatggtgtgccagtagcggtcaacctggacggaatccgagaagcccgggtgcgccggaccgcagtggtaacattccagatagttatcgacgatatttttccagttcgccggggtgagggtggtaaagcgcgccgccagtttcagatcatgcacgtccggacaggcttccagcactttgtcctgcagccccggtagctgcgtttccacactctccgcttccggattcatattgataaacacaaagccggcatactcttccaggcgaaccggcaccagcgttgccttttcgctatcgaaattcgccacgttttcgcagttgcgggcgtgggcgagattgccgtccagcttgaaggcccaggcgtgataggggcaggtaatcacgtttttggctttgccttcgccgctcagtagctggtggccgcggtgcgggcagacgttatagaaggcgcgcagaatgttgtcgcggccgcggacgataacgatattttcgccgatgatctcccgggtaatgtaatcgttcggccgggcgacctcgctgccgtgggcgacgcaaatccagctattggcgaagatgcgctctttctcgtgctcaaacgcctggctgtcggtataaaaacgggccggaatggtccaggcatcctgcggattagcgcaaaagttaatcggcagggtgaagtcagggctcaaattgctcatgtagggtctccttgtgattattgtcagtaagaggttttacagcgactggccgtcgcctttgagtaccgcgccaaccggcagcgtctcggctttaataatgggctcgggggtatgggtttctatctgatggaccggaacgtgggcgtagtcctgttttaaccagcgcacgaagccgccggttttaatcagtaaaatggccaggaacggtagggcggtcagcaccacggtggttttcatggtctcaagcgaagcgccggtaaacagaatcgacagcgggatgagggtgatcaccacgcaccagaacaggcgcatgccgcgatccggatcctcgccttcgcgcaggttgcgggtactggtcgccgccatggtgtaggccaccgcatccatgtgcgaggcgaggaatacaatcatcacgaacagataggcggcgaggaacagcttacctgccggcagcgacatcaggacctgctggacggcggtttcgccgccgagagtctgcatcacctgtggtacgttaatcacgccgttaacgaactggtgcatggcgtagctttccatcaccccgaagaaaaaccagcagccggcggtgctaccgaggagcagtccccagatcacctctttgattttgcgcccgcgggagacgcgggtgacgaacatcgccacgcctggggtgtaggagatccaccacagccagtagaagacggtccagttgcgggtaaaggcgccgtcgccgagcgggtcggtaaacaggctcatctgcaggaagttttgggtcgtcaggccgacggcgttaatgacgttattggtgatgaattcggtcggaccaaccagtaataccaccaacggcagcagaaacgccccccagccgaccattttgctcaggcgctgcaggccgttgttgatgccaatccacgaactcatgcagaaaataccgccggagagcaggatcacaaatgcctgcacggtgaagttatccggcagtcctgtcagcgctgacaggccgcgggtgaaggtggcggcggtgactaccagcgaaatggttaacgcgccgacggtagcgatcaggaacatcagatcgaccagacggccccagaaaccttgcggattaacgccggtgatcgccgaaacgatcccggagaggctgaggcctttatttttccgcacgtggaagtgataggccatgatcagcgaggcgagggtataggttgcccaggcgcttacgccccagtggaagaaagagtaagggatgctgtattccagcgctttcggcgattgcggggcaatgttaaggcccggggtctggtagtaataagcccattcggcaacgccccagtacagcgtggaggagccgagaccggcgcagataaacataaacagccatgagagggtactgtattcgactttaccttcgccgagacggatattgccgtatttgctggtggccagatacaacaccagtcccagcgccagcagcaccagtacctgtaccgtggaacccagcaggcgggtcacgccgttaaaaatcgaatcagccgcctgcgcggtttgctgggggaagagacttaatgtagcggcgatgaaaacaatggccgccaggctgatggcaatcagcggcacatcttttttctttacgttgctcaacatgagtgatctcctgggcatgattgcccgtcggtggctttagcctgtcgttgttatcacgctgtagggtcagggttcgcagcaagatgctattaacaattggattatttcttcgttacatgaattaaacaattggccgtttcgtgaagcaataaaacacgaaacggaaataataaaaggtgaattggcgcaggttctgtcctttcaggaattaataaggttcaccgctgtgatgcggttcacttgtcaatcgtggggtattctgcatagcgaaaagagaggggagttggcggaccaggcgcgcgggttttcccgggtagcggctgcgccttacccgggctacttgctgtgccgttttttgccgggtagcggctgcgccttacccgggctactcactacattatcgtgccattgtagccccggtaagcgcagcgccaccggggagcggcggggtaattacgccaaaatggccttgcagatagcctcgctaacctgctgcgttgaggcactgcctttcatgtccggagttttcggtccacaggcgatcgtctgctcaatcgcagccagaatgccatcgtgagcggcgtggtagcgctcatcgccgttgccgaggaaatcgagcatcatcgccccggcccaaacggtggcgatcgggttggcgatatttttaccgtaaatatccggcgccgacccgtgaaccggttcgaacagcgacgggaaattgcgctccggattgagattggccgatggcgcaataccgatagtgccggtacaggccgggccgagatcggagagaatatcgccgaacaggttagaacccactaccacgtcgaaacgctccggctgcagcacgaaacgggcgcacaggatatcgatatgctgcttgtcccagcgaatttcgggatagtttttggccatctcttccacccgctcatcccagtagggcatgctgatcgccaggccattggatttggttgcggaggtcagcgttttgcgtgggcggctttgcgccagttcgaaggcgtagcgcaggatccggtccacgccgcggcgggtaaagaccgactcctgaatcaccacttcatgctcggtgccttcattggcgcggccgcccagggcggaatattcgccttcggtattttcgcgcaccacgtaaaaatcaatatcgccggcctttttacccgccagcgggcaggggacgccggggaacaggcgcaccgggcgcaggttgacgtattggtcaaactcgcggcggaacttcagcagcgacccccacagcgaaatgtggtcgggaacggtatccggccagccgacggcgccgaagtagatggcatcgaagccctgcagctgctcgcgccagtcgtccggcatcatcttgccataatgggcgtaatattcgcagcttgcccactccatctgctcgaagctcagcgacagatcccaacgctgtgcggcggcttgcagcacgcgaatcccttcaggcagaacttctttgccaattccgtcacccgggatggcggcaatacgacaggtttttttcattccggttctcactttttaacgatgatgtttgaccacctgcctatcctataattgactggttcataattaatcacgctaactggtgaaacataaaacacagatcatgaataatctgccgctgctaaatgatttacgcgtctttatgctggtcgctcgccgggccgggttcgccgccgccgccgaggagcttggcgtatcgccggcgttcgtcagcaagcgggtttcgctgctggagcaaaccctgaatgtgatgttgctgcaccggaccacccgtcgggtcaccattaccgaagagggggagcggatctatgaatgggcgcagcgcattttgcaggatgtcgatgagatgatggatgagctttccgacgtgcgccaggtgccgcagggaacgctgcgtattatcagtagcttcggctttggccgtcgggttgtcgccccggcgctgtcggcgctggctctccagtacccgcagctggagctgcgtttcgatgtccaggaccggctggtggatttagtcaatgaaggggtggatctcgatattcgcgtcggcgacgatatcgcaccgaatctgattgcccgccagctggcggccaatcaccgcgtactctgcgcctcgccgcagttccttgcccgccatgcgccgccgaaacagctgagcgatctggccgcgttaccctgcctggtgattaaagagcgcgatcatccgttcggcgtctggcaattgcatagcaaagagggccagcacgccatcaaggtaaccgggccgctctcctccaaccatggtgaaattgtgcatcagtggtgtctggacgggcaggggattgcgctccgttcgtggtgggacgtccgggagaatatcgccagcggacatctggtgcaggtgctgccggactactggcagccggccaacgtctgggcggtttacgtctcccggctggcgacgtcggccaaaatccgcaccaccgtggagtttctgcgccactactttcagctgcactatccgcagcatgagccgacggccagcgccgtcggcagaggcgattaaaccccaaggcggtcgcgcaggctgtagtaggcggcgcccatggcggtaaaaggaatgcgcaggctgcggccgcccgggaacgggtagtgcggcagtttggcgaaggcgtcgaaacgctcggcgtcgccgcgcagcagctctgaaatcaagcgtccggcaaggtgggtacaggtcacgccgtggccgctgtagccctgcatgtagtaaatattgttatcgagacgcccgaactgcggcatccgcgacagggttagcaggaagttgcccgtccagcggtagtcaatcttcaccccctgcagctgcgggaaggttttcagcagtttcggcataatcagccgctccacgtcgtccggatcgcgcgcgccgtagaccacgccgccgccgtacagcagacggttgtcgccggtcagacggtagtagtccagcaggtagttacagtcttccacacagtagtttttcgggatcagcgagcgggcgacctcttccgacagcggagcggtagtgaccacctgggtgccgcacggcatgctgcgtttcgccagctccggctccagtttatcgccgagataggcgttgccggcgacgatcacgtagcgcgcggtgacctggccgcgcgcggtgctgaccaccgccgggctggtgtgctggatgcgggtgaccggcgactgctcatacacccggccgccgttcaggcgaatggcatccgcttcgccgatggcgaggttcagcgggtgaatatggccgccgctgtggtcgagcagggcgccgacgtagcggtcgctgtccacttcgcgacgaatggcttctctgtccagcagctccagctgggtgttgccgtagcgctcccagttggctttctgctcttccagggtttccagctgtttatggttcatcgccacgaacaggccgcccgggcggtaatcgcactggatctgataccgctggatgcgttcgcggatgatatcgccaccttcgaacatcatactgccgagcatttttgccgcatccgggccgtagttcttttcaatgacgtcgatatcgcggctataggagttgaccagctgcccgccgttgcggccgctggcgccgaagccgatgcgcgccccttccagcaccaccacgtcgtagcccatttcggccagatgcagggcagacgagaggccggtgtagccgccgccgacgacgcagacgtcacagttgatggatccctccagcgtcgggaacggttcatacttgttggcgctggcggcatagtagctagtggtatgttcagtcatgatcaagactccagggcaatccagatggttttcagttcggtgaatttttccagcgcgtgcagcgatttatcgcgcccgttgccgctctgcttgtagccgccgaacggaacggtcatatcaccatcgttatagttgttgacgaagaccgagccggccttcaggcggcggctcatgcggtgggcgcgggagagatcgcgggtccacaccgcggcgcccaagccgtagtcgctgtcattggcgagctttagcgcctcttcttcgcttttgaagcgggtcaccaccagcaccgggccgaagatctcttcccggctgagggttgatgccgggtcgacgtcaacgaaaatggtcgggccaacggcggcaggccacgggtttttccgtccgtcgaggaacagggtgctttggctttcgccgccgcgaataaagctatgcacgttgtcggcatgggtattgtcaatcagcatgcccatggtggtgtccggatcgagcgggttgcccggctgccagtgttgtgcctcatctttcagccgcgccaggaattcgtcagcgatgctctcctcgagcagcagacgggtcccggcgatgcacacctgtccctggttgtagaagatgccgccggcggtggcgcgaaccgcttgttgcagatccgggcaatcggcgaagacaatgttggcgctcttgccgcccgcttccagccacacgcgcttcatattgctgtcgccggcgtctttcagcagctgcttgccggtgcgggtggagccggtgaaggtgatgacttcaacatcaggatgcagggccagcgcctgcccggcctcgtggccaaagccgctgaccacgttcaacacgccgtccggcaggccggcctctttcgccagcccggccagacgcagggcggtaagcggcgatttttccgagggtttgaggattacgctattgcccgccgccagcgccgggccgagtttccagcaggccagcagcagcgggaagttccacggcaccaccgcggcgatcacgccaattggttcgcgaacgatcatcgccagctcgttgctgccggtgggggccacttcgccatagactttatccagcgcttcggcataccagcgaatggcgcgggcggcgccgggaatatcgtcgcgcaggctgtggcgaatcggtttgccggtatccagcgtttccagcagcgccagctcttcacgatgggcctccatcagatcagcaaagcgagtgaggatcgctttacgctgtgcgggggaggcctgcgaccagtcgccgttatcaaaagcctggcgcgcggctttcaccgcccgttcgacgtcggcttttttaccgcgggcgacctgggctaatgtctgctgcgcggcagggtcgatagtctcaaaggtggtattatcggccgcggcgcaatattcgccgttaataaataagcgtgtttcaatggccaggtttttcgctttttcctgccagtaagccaggtgctgaaaattcatcatgactccttaaaaacattatcggcaaaataatcagtgcggcgttttcaggctgcacggggcactgcgccgggcgcagggcatagcgtatccccggagttgaataccgttttattctcctgagttttgacaggttgtttgcaacccgaattattcaggagcgagtcgccattcactggcgttaattatttcagggccaacaggaaataatattccgtacggcgcagacgttattactacgagttcttcgccgcgacgaaaatagattttccgtcgcgacaggcctgaagtaagcctgaacctcgttcaggcgaaataatcagaatgtggtgggggtgtgggcactgatgatgcggcagatgcctgccgaggtgttgctgaagctgtgcggaatgccggtattaatggcatagctttgtccagccaccaggtggtacgactgaccgttaatggtcagcacgatctcaccttccagtatggtgcctatctcctcaccctgatgcttaatcctctccccggtcgtggttccaggctggtaagtttcaaaaatcatcgccagcgtacggttcggatttccgttatgaaccagcttcatggaaacgccctgacttcccatctcaatcaggtcatcctgattaatgaccacctggggttcgtccggcttttcgggttcagaaaagaattccgagagcgacagcccatagactttcagcagcttttgcagcgtactgatggcaggactgactttatcctgctctatggtgctgatggcactatgtgttaacccagacagttcggcggcacgacgctgtgagagacccagctgctggcggatctctgacagacgtttccctggcgccagtccgtcatcgctcatatttgcatttccttaacggtagtggtcagcgccgccgcttttcagcatgatggccctgacaggcggtgataaaaccatcaaacaacatacgcgacagggcgtattcgctactgttccattctggatgccactgtacgcccagcgcgaaaggatgatcgttcacgctgaccgcttccaccagtccatccggcgctcgcgcctccacgcgcagctgcggactgagggtttttgccccttgcccatgtagcgagtttacccaaaacgtgttgcagcccggtatcaattgcgacagcaatcctccttcctgaacctcaacctgatgggacggcgcatactgctgctcgacgggcagttcaggatcttcgcgatgttcaaggagctcaggctgctcgaacagacgacgatacagagtcccgccggtggcgacaaccagttcctgcagtccacgacagatggcgaaaatggggatgcgcctttcgagcgcggcgttaatcagcgccatgctcagaagatcacgcccggggtcggcgtcaggctcatcgccgttttcaccataaaggtgcggctgcacattgctggggctgcctggcaggtagatcccgtccagtttatcaacgaccgcgttcagtagctccggctccgccagcgcatgcggcagggcaatcggcagtccgccggcgttaacaattgcattcaggtacttttcttgcaaggtctgggtctggtgacccttaagcctgtttctacacatcacgacgccaataactggcttgtacattatattttccatgatcgccctcacaaagtggactaaattatgaccgctatagcgggtttaacggccatatcgttcaatattttctcaatctagcagtggaaatagccctttgcaaacttaatttaacatttgacaaacaatttatttgcatacacagtcgatggggtggacattatatttaacggtctgagtgcaggaccgaaacccaaccaacggcggtgaatcatggaaaccaatatcgtagaagttgagaattttgttcagcaaacggaagagagacgggttagcgcgttcgcgaaagaagtgaagcgctacctcgaaacctaccctgatacccagtatgtcgatgtcctcctcactgacctgaacggctgcttccgcggcaagcgcatcccggttgccggcctgagcaaactggagaaaggctgttatttcccggcctcggtgtttgcgatggatattctcggcaatgtggtggaagaggccggtctgggccaggagatgggcgagccggatcgcagctgcatcccggtacccggcaccttaaccccttcggcggctgacccacaatcgatagcccaggtacagctaaccatggttgatgaagatggcgctccctttgacgttgagccgcggaacgtactcaaccgcctctggcagcagttgcgccagcgcgggctgttccccgtggtagcggtagagctggagttctatttactggaccgcaaacgcgatgccgaaggctacctgcagccgccgtgtgcgccgggcactgacgatcgcaacacccaaagccaggtctactcggtcgataaccttaaccacttcgccgacgtgctcaacgacatcgacgagctggccaaactgcagctgatccccgccgatggcgcggtggcggaagcctcgccgggccagtttgaaatcaaccttcaccataccgataacgtgctggacgcctgcgatgatgcgctggcgttaaaacgtctcgtgcgtttgatggcggagaagcataagatgcacgccacttttatggcgaagccttatgaagagcatgccggcagtgggatgcatatccacatcagcatgctgaacaataaaggggaaaacgtgctggtggacggcgatggggaagactctgcgctgctcaaacgcgcgctggccgggatgatcgatctgatgccggcctcgatggcgctgctggcgccgaacgtgaactcgtatcgccgcttccagccggggatgtacgtcccgacgcaggcttcgtgggggcataacaaccgcaccgtcgcgctgcgtattccgtgcggcgagcggcagaaccaccgcgtggagtatcgcgtcgcgggggcggacgccaacccgtatctggtgatggcggcgatttttgccggcattctgcacgggctggataacccccagctgcctttacaggaagaggtggaaggtaacggtctggaacaagagggcctgccattcccgatccgccagagcgatgcgctgtgggagtttatgcagaacgatcacttgcgtgagcgcctcggcgagcgtttctgccatgttttccatgcctgtaagcatgatgaattactgcagtttgagcgtcttatcacagaaaccgaaattgagtggatgttgaaaaacgcctgatggtcgccccgcgaggggcccataagtttggtaatcagtagcatcatacggcctgagcggagcctggccgacgtttttgctgggagcccagccatttcccggatgtcgcgttaaggagcgcaggcggcaacggggcttcagttaacgacacagtgtgtgacgaggaaatgagatgatgcagatgttcaaatatccgcagggagagggaggccgctcaggccgcattggatgccagccagctaccgcttaccggtccgtcttacccttttatctatgccttacccctttgctaagcaggtttgtcacgcggacgttgggcccgcaaactgttaacagcaagggggggatgggcgatggctattaatcctccggcgcataacgccgctcaggcgggcagaccgcgtctgcgtaaatccctcaaactctggcaagtggtgatgatggggctggcctatctgacgccaatgacggtgtttgataccttcggcatcgtctccggcatcagcaatggccacgttccggcgtcttatctgctggcgctggctggcgtgctgttcaccgccatcagctacggcaaactggtgcgtcagtttccggaagccggttccgcctatacctacgcgcaaaaatccatcagtccgcacgtcggctttatggttggctggtcgtcgctgctggattatctgtttctgccgatgatcaacgtcctgctggcgaagatctatctctcggccttgttccccgaagtgccgccgtgggtgtgggtagtgacctttgtcgctattctgaccgccgcgaacctgaaaagcgttaacctggtggccaacttcaataccctgttcgtgctggtgcagatttcgatcatggtggtgtttgtcattctggtggtgcaggggctgcataaaggcgagggggtgggtaccgtctggtcgctgcagccgtttatcagccagaatgcgcatctgatcccgattattaccggcgcgaccattgtctgcttctcgtttctcggcttcgacgcggtgaccaccctgtcggaagagacccctgacgccgcgcgggtgatcccgaaggcaatttttctcaccgcgatgtacggcggcattatctttatcgtcgcgtcgttctttatgcagctgttcttcccggatattcatcgctttaaagaccccgatgccgcgctgccggagattgcgctgtacgtgggcggcaagctgttccagtcgattttcctgtgcaccacctttgttaacaccctggcgtccggcctggcctcccatgccagcgtctcccgtctgctgtacgtgatgggccgcgacaacgtcttcccggagcgcatttttggctatgtgcatccgaaatggcgtaccccagcgctgaacgtgattatggtgggcatcgttgcgctgtcggcgctgttcttcgacctggtgaccgccaccgcgttgattaatttcggcgcgctggtggccttcaccttcgttaacctgtcggtgttcaaccacttctggcggcgcaaggggtacaacaaaacctggaaggatcgactgcattatctgctgctgccgatggtcggggcgttgacggtcggggtattgtggatcaatctcgaggccacctccctgacgctcggcctggtgtgggcggcgcttggtctgctgtacctgacttatctgacccgacgcttccgcaaaccgccgccgcagtttgatgccgctaaagcggagcaggcctgggagtcataggttctgaggcataaactgaacgaaggcaggcccgcaggcctgctttcgttttggcttcggtaagggacagtacaggacggtaaagaaatcagcagaaaacggtggggaacggaaggtattatttcttctttttatggacaggtaactgactggcgcgccgctctttgaggtacgacaccaggctgtagatggcgacgcccagcagcgccaccgcgacgataaagagaataagacccgacatagaccaacctaatattctgtttggaaagggaaaaagatacagggctctgtgtgaagataacatcgggatatgtctgaaagatgacgcctcatcgcgagaatatccggcggcggggttgtgataaaatgtttcccgcagggatgtgaccgcctgggtttcagctgaaatggcgtaacactccgttaagtgattttacagaagtgcggcctacagcgagttacgctgaccgcgaataagaacgatctgagagtcagtcatgtataagaaaaccctcagcctgctgggcgtagcgttggcgctgtctgccttcgccagtcaggctgaaagtgaacgtcaggcgagccgcgagcggatcgtggagcaggtcctcaagccgtgtgaaggcaaaaaggcgggcgataaggtggtgattaccgatcgccgcggcggcgagcacgaggcgatctgtaccctgacggcggttccgctaccggagtagcgcccgccgcacggtgccgcttatcgataccgcggcgcaggctgtccggttcgcgcgctggtaaacagcgccactctggactgctcaaaagtctcccacagtcccaggtcatgaaccggtggtaaggtgacctgttcccccatctccagccccctgagagcggcgtcaaccagatcctcggtggtcattaccgtgccgctgggcagagcgtccagcgccacgccggaggtcggccacagatcggtagcggtcgccgccggcaataccgcctgaatacgcacgccgctgtcggcaaactcctcctgcaggccgcgggtgaagctcaacacccaggctttgctggcgctgtagactgcgctgcccggcagcgtatgcagcgcgaggatagaggcaatattgatcagcgtcccccggtgtcgtggggtgaaagcggccagcgcggcatagctcagacgcagcagcgcggtggtgttgagcgtatgaatcgcctggtgctcgcgtggcgtactggcgagaaaacccgccaatttcgcggtgccggcgttgttaatgaacaggtcgatggcgggatcctgctgcagacgctgctctacggcggcaatcccgtgctcttcgctaagatcggctttgaggatgcttgcctggatggcgtagcgcgcctgcagctggtcggcgagcgcctgcagacggtcttcacgacgggcggcgaggatcaggttgtagccgcgggcggcgagtcgttcggcatagatcgcgccgatacctgaggacgcgccggtgataaaagctgtgtgcgatggttgggtcatgagaaatgcctcgtaaaaggttgcattattaaaccaaattcagcatgagatattaggtttaataatgcaaccattttgccaggactttttcatttttgcctgtcgagggcagcgtttagtcgttcagcgggatagcgatggtgatgtccgccggggccagctcacggccatccgccgcctgcaggaccagcttacgcaggggctggcgctgctggcggtcaatgagccgggtcgccggttcgtcaggatcgaacagatagtcgtctgcccactgggagagggcgaccagcaccgtttgcagggcacggcccttatcggtcaggacatactcctgccaggcgctgccgtcggaggccggctgcaggcgcaggatgccttcatccaccagcattttcagccgcccggcgagcatgtttttggcgataccgaggtttttctggaattcgctaaaacggcgcaccccgcgcagagcatcgcggacgatcagcagcgaccaccagtcaccgataacgtcgagggagcgggcgatagggcaacagctgttttccagacgggtacgtttcacgaaagcctccaggttaattgtttcattataaaactctttgccctgcaggggaaattttcggctacggtctaagtttgcgagcgattaccaggaaaaatgtcataaatccggcacaattaacgcgatgataataaatgactaaggatgaagggatgaaaaaacgtctacttgccgccgccgttgccggcgcggtgatgttatccgctggcgctcaggcgcaggacacggccgccccggaggggtatcagctgcagcaggtgctgatcatgagtcgtcacaacttgcgtgcgccgttggccaataacggcagcgtgctggagcagtccaccgccaaggcctggccgcagtgggatgtgccgggcggccagctgaccaccaaaggcggtgtgctggaggtgtatatgggccactatatgcgcgaatggctggcgcagcagaagctggtgaccagcggcgagtgcccgccggaaaacgcggtttatgcctacgctaacagcctgcagcgcaccgtcgccaccgcgcagttctttatcaccggcgcgttcccgggctgcggcatcccggtgcatcaccagccgcagatgggcaccatggacccgaccttcaacccggttattaccgacgactccccggcgtttcgcgagaaagcgctgcaggcgatggaaaaagagcgccagggaatgcagttgaccgagagctacaagctgctggagacgatgatcgattaccgcaactcgccctcctgcaaagagaagaaggtctgttccctgagcgagggtaaagatacctttagcgccggttatcagcaggagccgggagtgtccggaccgttgaaggtgggcaactcgctggtagacgccttcaccctgcaatattatgaaggcttcccgaaagatcaggtggcgtggggggagatcgccagcgataagcagtggcaagtgctgtcgaagctgaaaaatggctatcaggatagtctgtttacctcggtggcggtggcgcaaaacgtcgccaaaccgctggttaaatatatcgataacgcgctggtgggcgagggagccagcaaggcgaaagtcacgctgctggtgggacacgactcgaatatcgcttcgctgctcaccgccctggattttaagccctatcaactgcccggccagtatgagcgcactcctatcggcggcaaactgctgtttcagcgctggcatgacagcgccggtaatcgcgatctgatgaagattgagtatgtctatcaaagtaccgagcaactgcgtaacgccgacgcgttaaccctgcaggccccgccgcagcggatcactctggcgcttaacggctgtccggttgatgaccagggattctgcccgctggagacctttaaaaaggtgatcaacgaggcggcgaaataacgaaaaaaacccggagcactccgggtttttttagcaggttagggtgagcccaggtggggataaacctcctagacgtttttacgctcaatcgtctgttcgccccagaacaggctgtctttatcggttttggcaaaggccagcgccagcacttcgtcgctgccttcctcccagatttgctccgccagtttctcatcgtagtgggcgacttcgaaaatcgcctcggcaatttccggtgaggtgttacgtaaacttgcccattcgccgacgcgatgtgcttttgcttcttgagttggcatagtgctcctcctgcagaagattagccgtgcagtttaacggccagtttggcgacatgttcaccctgatagcgggcgatggctaactcttcctcgctcggctgccgcgagccgtcgccgccggcgatggtggttgcgccataaggggtaccgccgcgtacctgggagatatcgaatagctcctgggcgccatagccgatcgggacgatgatcatgccgtggtgggccagcgtcgtccaggtcgaggtaatggtttgttcctggccgccgccggtaccggttgagctaaatacgctggcgattttgccatacagagcgccggacgcccacagaccgccggtttgatcgaggaaagtacgcatctgaccggacatgttgccgaagcgcgtcggggtaccaaagatgatggcgtcatactctgccagctcctgcggcgtggcgacgggcgcgttttgcgttttcccgcctgctttggcgaatgcttcagcctgcatggtttccggcacgcgcttcacaaccacctcaacgccgtccacccggttcgccccatcggcgacggcgtgagccatggtttcaatgtgtccatacatggaataataaagcaccagaattttagccatttccatcactcctcggttgcattataagccagcaaaatagctggtacctttaaagataaagcctccgccggagagtgcaaatccaacgggcatttgtttgatttataacaaaatgacaaagcgttatttacttttccttgcaccgcgcggcctgaaaggaagtgaaggaggaagcgttgcgcctgctattttggccgctgcggcgaggatgtagcatcaggatacatttttgctgactattttttcttcgccagcagagtcggttaggagctgttcgcggcgcgaggaagcttttttcgcccggctttgtttctggatattacattcgccgccgtcagccgcagtcattcactaaccttatagatacgcggcaggacagcggcgtcgccgctcccgcgtaatgcactatgatgtctaacctaatggaggtcagtaatggcaaaccatcgtggcggttccggcaactttgccgaagaccgtgaaagagcatcagaagcaggacgtaaaggtggccagcatagcggggggaattttaaaaatgaccctcagcgcgcctcagaggctggcaaaaaagggggtaaaaacagtcatggtagtcgtgaaagttaacgcgcgactcgcactgttctctttgatgcggtgttaatctccccgacccaaccgcatcgccctcgccgccggcatctgccggcggtttttttatctgtcggtggttgcgctcccgccgggcggattgcacactggtcgcccgttaatcgtcatggctgtcttatgtcttcgttaaaattctccgttagccgccaggaagcgctccttatcatgatcaccatgttctggggagggacgttccttgccgtacagtacgcggtgagcctcagcgggccgctgttttttgtcggtttgcgttttgcgactgccgcgctgtcggtgggcctgctttcgctgcgcactctgcgcggtctgacgtggctggaggtgaaggccggggtagcgattggcgtggcgattgcgctggggtatggcctgcagacctggggactacagaccatctccagcagtaaatctgcctttatcaccgcgatgtatgtgccgctggtgccgctgctgcagtggctgtgcctgggacgtatgccgggggtgatgtcctgcgtggggattgtgctggcctttattggtttaattctgctggccgggccggaaaataatctgctggcgcttggcgtgggggagatgatcactctggcaagcgcggtggcgatcgcggcggagattatccttatcagcgcctgggccgggaaagtcgatgtccgccgggtgacggtggtgcagctggcgaccgcgtcgctggtggctttcgccgccatgaagccggcgggtgaatcggtgccgtcgttgacgccggccctgctcggcgtcgcgctggggctggggattttcagcgcgatcattcaggtgaccatgaactgggcgcagcgcagcgtctcgccgacgcgggccacccttatttataccggtgaaccggtatgggccggtatttttggccggctggccggtgagcgtctgccgctgctggccctgctcggctgcgttttgatcctcgcgggagtgctggtgagcgagctgaagtggaagcgcaagtcgccgccgcaggtttccacaaacgacgatgcgcagccgctcacggacctggccgatcgccgcgagccataatattttccttctgacccgacagcggcgcttatcctggctggtactcgtccggctctgattgtctccaggcccgtgcaagcgcagcgccgccgggcggtcaggttccgtgcccgtggtggtgccggatggcggcataaatgccttatccggcctacaggatcacaccacccaggcccacaccgctccctgcgccaacgccgcgctaatgtggcttacaccggcgttaccctggcctccttcgcctcgcgcgtcccgcgatgaagcagcgcgtgcagcaggatcgccccgaaggtggctgtgccaatcccgcccagcgtaaagccgcccagcgacagcgcgaaatcgccggcgcccagcaccagggtcaccgacaccatgatcaaattgctgttttgactcagatccacccggttttgcacccagatccgcgccccggcgacggcaattaagccaaataccacgatcgaggcgccgccgatcaccggcccgggaatggtgtggattaatgcgccgaacttcggcgagaaacccaacagcatggcaatcagcgccgcggcgacaaacaccagcgttgagtagaccttggtcaccgccatgacgccgatgttctccgcataggtggtgaccccgctgccgcccaccgaaccggagagcatggtcgccagcccgtcgccgacgaaggcgcgccccatgtacgggtccatattgcgcccggtcatcccggcgacggccttcaggtgcccgaggttctcggccaccaggatcaccgcgaccggcgcaatcaacatcatcgcctggccgttaaaggatgggggggtaaagtgcggcagcccgaaccacgccgcctgggcgaggggggagaagtccagcggtttgccaaggcccaggccgttagccagcagggcgtacagcgcgcaggcgacaatcaggccgaccaggatcagcagtcgctgcagcatcccgcgggtaaataccgccactatgccgatgcagagcacagttaacaccgccatccagctgtcgaaggcgctggcggagacgctgcgcacggcaatcggcgccaggttcaggccgatagccatcaccaccgcgccggtcaccaccggcggcatcaggcgctcgatccagcgggtgccgatcttcatcaccaccagaccaatcagggtgtagaccagcccgcaggcgatgatcccgccaagggcgacgctcagatgagggttcagcccctggccgttaaagccggtaatggcgatcaccaccccgacaaaagcggcgctggagccgagatagctcggcacccgtccgccggtgacgacaaagaacagcagggtgccgacgcccgacatcagaatagacaggttcgggtcgagccccatcaacaacggcatcagcaccgtcgcgccgaacatcgcaacggcgtgctgcacgcccatcaccagcgtttgcccggccgacaagcgttcatcgggggcgacaacgccggattcggcggcgggggaggtcagcttccagcgaggaaaatcgaagagtgccatgatgatatcccgggttaaaggttaacaagcgggtcgcataagcgtgtgatagccgcggtcaaaccacatcagtccccggggctccgggtgacgggtaatggccacgacgtgacaaaacagaatgtcgtgcgtcccgacgctgacgcgctggtcgatgcggcagtcaaagctgaccagagccgcctccagccgcggacagccggtggcgccggtctgccagtcggcggcggcaaaacgctcgtccattgccgttttaccgccaaacagcgtcgacagggcctcctgtccggccgccagggtattgacgcacagcgtgtggtgttcgctgaacaccggccacaccgaagccgagcggttcaggcagaccagcagggtcggcggcgtgtcggtaacgctgcagaccgcgctggcggtgaaccccgcccggcccgccgggccatcggtggtaataatgttaaccgcggcgccgacgtgggccatggcgtcacggaaactcgctttgtccgttaactccatcgtaaactccttatgccagcaggcaggcttcatcaaaggacaggcgcggcaggcggccgtacagcttgccggggtcgccatagccgatattcaccagtagattgcttttccagccgttgtcggcaaaaaatgccgcgtcgactttttcccggtcaaaaccggacattggcccggtgtcgaggcccagcgcccggcaggcaaaaatcagatacgccgcctgcagggagctgttgcgaaacgcggtctcttccgccagctgcgggctggaggtaaaccagctgcgggcgtcaccgtggggaaacagggtcggcagccggtcgtagaaggcgctatcccacgccacgatggcggtcaccggcgcctgcatggttttctgcagattgccgctggagagcgtcgggcgaagtttctctttgccttccgcgctgcgcacgaacacgatgcgcgctggcgaacagttggcggaagtcggccccattttcatcaggtcccagacggcctgcagctgcgcatcgctcaccggcttatccagccagccgttgtgggtccgggcctgggtaaacagcgtctcgcaggccgtgtggtttatcgcgtcgttcatcgggtctccctggcgaccggcagcatagcggacagcccgtcgcgtaaaatggtattaaaggtatcggcgtcggtgacgttacaggcatggccgccccacggcatttccacgagctggctgccggggatcgccgtctgcagcacgcgggagcaggaggcggggaccagcaggtcgtcagcggcgctgataatcagcgtcgggcaggcgatggccgacgcacggcgtgaaaaatcagcctgcttcagggcctgcagccgcttcagcagattctctttgccctgaaaatggctgatggcaagcgcatcttccgcttcgaggcgcggcaggcgcgcggccatccattccgccgggtagagaaatagcggctgcgcttcgacccacgcctgcgcgccgccggcatgcagcagacgctcgcgcacctggaagcagcggcgggtatgcggcgacagcgacagccagccgttgaccagcgccagggcgctcaccgcctcggggcgatcgagcgccagctgcaggccaatcagcgcccccagggcgtggcccaccagcgcgaagcgggcgatccccgccgcccgcagagcgctgaacagctccccggccatcgtcgccaggctgtagccggcgggcagcggaccggcgttctccccggtcccgttatggtcataactcaccagctgatactgttcctccagcgccgcgcgctgcgccagccagtagccgccgcccccgcccagaccggcgctgaggaccaccaccggcgcgccgggccacggagccggagcaatattgagcctcatcatgtcggggtaccgatatgggcgacgctggcgatttccaccagcgcatcgggcttcaccagtccgcactgaatgcagaagcgcgccggtttatcgccggggaagaactcggcgtagacctcgttaatcgcggcgtaatttgtccagtcggtgataaagatgctgttgaaagtcacatccgccatactcccgcccgccgtttcgataacgctcctgatggtctccagcacgtggcgggtttgcgcctttgggtcgccgatgtgcaccacattgttttgcttatcaaacggcagggtgcccgagacgtagaccaccccgtcggcgagcgtccccggaacaaagggggcaatcggcgcggtggtgcctggcggaataatcacctgtttaggcataacgtttctccttggctaaagccagcggggcggcgggggacagcgcgtggcagaagctctcgacgtcgctgacccagccgaaaaaggtttcaatattgaacagcgccgcctgctgggcgaaggccgggccggcctgatgggtggcatcctccagcacgatgccgaagtattcgagaaagaagccatcgcgcagcgtcgattcgacgcagacgttggtggcgatcccggtgaacaccaggtggcgtatgccgcggctgcgcaaaatgctgtcgagcggggtgttaaagaagccgctgtagcgcggtttcggcaacacgatatcgccttcctgcggcgtcagctcgtccaccagctgataatcccagccgcctttcgccagcagcttgccctgcagctccggacgctgacgcatcgttttcagcgcgttggatttgtgatagttcggcgagcccgggccgccggcttcaacatactgatcatcccagccattctggaaccagataatcaacatacccgcggcgcgagcggcggcgacggcggtattaatattgtcgataaccggccgggtagcggagacgtcaaagccggcgagatccagataaccgccctggctggcgtaggcgttctgcatatcgaccacaatcagcgcgctctgctgcggcgcgaaggtcagggattccgggcgagcgggaagggtaatcatcaggccacctcacgggtaacagaagcaatgtggttccggcagcgcatcagcggctgaatgcgttcgccaaaggcgtcaatgccggcaagaaaatcatcaaaagtcagcagcacgccgtcggtgccgggcacgctcgctacttcatcaagcatacgggcgacgctggcatacgatccgaccagggtgcccatgttaatgttgaccgccgaggtggggtcggccatctggcgcacgttggtatcgctgccggagcgggtatctttctgactctgctcggtgagccacgccagcgcttcttcatcggcgcccgctttgtaatgttcccatttggcgcgcgccgcctcgtcggtttcgtcggcgatcaccatgaacagcacataggaccccacgtcgcggccggttttttccgccgcctgcatcatgcgtgcggcggtcggggcaaaggccgttggcgtgttgacccctttgccaaagcaaaagttgtagtccgcatgctgggcggagaaggccatcccggcatcgctctgcccggcgcagatcaccttcatcggctgcgacgggcgcgggctgacccggcagtcgttcatggtgaagtagtcacctttgaaatcgctgcgcccggtgccccacaggtcacggagcacctggacgtattcggtgagatagtcatagcggctggcgaaatagtcatctcccggccacatgcccatctggtcatattccggtttttgccagccggtcaccagattgacgccaaaccggccgccggagatggagtcgatagtggaggccatccgggcgacaatcgccggcggcagcgtcagggtggcggcggtggcgtagatctggatcttcgaggtcaccgcggccaggccggccatcagggtaaaggactccaggttgtgatcccagaattcagttttcccgccgaagccgcgcagtttgatcatggagagcgcgaagtcgaaatggtagtgctcggccttctgcacgatggccttattcagttcaaaggtcggcatatactgcggggcatgggtggagatcagccagccgttgttgccaatgggaacgaaaacaccaattttcatacctacctctctgcagtcatggaagatgggttgcgatggtgcggcatcctgcctctccctggaccacctcgcagaaaaggtaaagcaaaggcgatgccagttttataaatgctaatgttattaatgtgttacttttgagttgctaaaaaggacgataaaaaagtggactggatggtcaaaatcagtgcacgaaaaaacggcagtcatgcgcaatcagggtgcatggggtcgtgtcggcgcagggcttttgctatgctggtggcgtcaactgaaggagaggatgtatggcacagggcgcggtgaagaaaagcggcaaacgttcacaagcggtcagcgccaaaaaggaggccatcctggccgccgcgctggaggcattttcgcaatttggtattcacggtacgcggctggagcaggtggctgagcgcgccggggtatcgaaaaccaatctgctctattactacccttcgaaagaggcgctgtatgtggcagtcctgcagcagatcctcgccatctggctggcgccgctgaaggcctttcgtgaggatatcagcccgctggtggcgatccgtgaatatattcgcctgaagctggaggtgtcccgcgatcatccccaggcctcgaagctcttctgcctcgagatgctgcagggggcgccgctgctgatgggcgaactgaccggggatctgaaagcgctggtcgacgaaaaatcggcgatagtctccggctggatcgaccgcggcaagctggcgccggtcgatccacagcatttaatctttatgatctgggctaccacccagcattacgccgacttcgccacccaggtggaggcggtcaccggcgccacgctgcaggatgcggccttttttgaacaaacggtcgataatgtccagcggatgattatcgaaggcattcgcgtccgttaattggcgggcggcagcgggcagctttgatcgccatcctcgcactgtagcagcgaggcgaggaaagactcccgctccacgctcttatcggtcatgcactggctgaccagcattggctgcatgctgccgccttcggcgccggacgcgagaaaggcgcagtcggcgtcgcggagggcgatccatgcctgctgcgcctgcttcagtaatgtttgttgtttacccaccgcccgctgcagggcctgctgccaggtgtcgttcagttttttatcggccgcctgatactgcgcggccgcgcactgattcatttcggtttgggtgttggcgctgctgcactcgtccgccagcgccgcgccgctggccagcagggccatcacggcaaataacgtgcgtttcattgttctgctcccataaaaaagctcccgtccgggagccttaattaaacacagctgacgtcggctgtcattagctgatcgcagcgcagactgattgcccggatggcggcgcaccgcgccttatccgggctaccctttggcggtggtaggtagccccggtaagcgtagcgccaccggggggcccgttttagccgatggtcatcaggctggcgttaccgcctgccgccgcggtgttaacgctcagcgaacgctcgatatacagccgctccagcagcagattggtttcgccgcgggcgaagccctgcacggagacaatcgccccgtcgcgcgccgccacctgctcgcacagctcgcgcagctggtcggaatcgccgtggtagataaccgcgtcgaaggcctggccaggcaactgctccgctttggcaaagcgaatgcgctcgctgacctcccgcggcagtttcttcgccagatcgcgctgcagggcgctgtccggccacagtacttcacaacccaccgccagcacagccgccagctggatcagcgcatcctgttcgttatccgctacgcacagcacgcgctcgcgcggcatcagcgtcagggtgttgcgctcgccggttggccccggcagcaggcgttgggtgccgctttgcgcctgctcgctgtactgctggcacagcgcctgcagctcaggacggcccgcggcccactgctgcagcgcctgcagcggtttttccagcagcgttttcagctgggcgtccagcggacgctccgcatcctggcgggcgaaggttacgccaaccgcgtcctgtggacggctggagagcagacggtacagatacagcggaccgccggctttcggaccggtaccggacagcccttcgccgccgaacggctgcacgccgaccaccgcgccaaccatattgcggttgacgtacaggttgcccaccttggcgctgccggtgacctgggcgatggtttcgtcgatacgggtatgcacgccgagggtcaggccgtagccagaggcgttaatctgctcgaccagtttgtccagctcgttacggttatagcgcaccacgtgcagtaccgggccgaagacctcttttttcagctcgtcgaagctgtcgagctcgataagcgtcggcggcacgaaggtcccgtgacgccattcgcgggcgtcttcgctattctcgcgcaccgcctggtagacggtgcggcctttggcgcgcatcgcctgaatatggcgttcgatattctctttcgcttccgcatcgataaccggaccgatatcggtggtcaggcgccccggattgcccatccggcactcgctcatggcgccgcgcagcatggttaaggtgtgatcggcgacctcttcctgcaggcaaagcacgcgcagggcggagcagcgctggccagcgctgtcgaacgcggaagccagcacgtcgatcactacctgctcggtgagcgccgacgaatcgacgatcatcgcgttcatcccgccggtttcggcgatcagcggcgtcgggcggccctggggatcgaggcggctggcgatattgcgctgcagcagggtggccacttcggtggagcctgtgaacatcacgccgcgtacgcgctcatcggaggttagcgcggcgcccacggtctccccgcgacccggcagcagttgaataacgcccggcggcacgccggcttccagcagaatcgccacgccctgggcggcgataagcggcgtctgctcggcaggtttcgccagcacgctgttgccggccgccagcgcggcggcaatctggccggtgaagatcgccagcgggaagttccacgggctgatacagaccaccggacccagcgggcggtgagtttcattatcgaaatcgtcgcgcacctggcctgcgtaatagtgcaggaagtcaacggcttcgcgcacttcagcgatggcgttgctgaaggttttacccgcctcgcgcaccaggatccccatcagggtcggcatctggctttccatcagcaccgcggcgcgctcaagaatggcggcgcgctcctgcggcggagtggcgaaccagatcggcgcattgttgatagcgctggtcagcgcctgctgcacttcagcgtcgctggcttcgcggacgtagccgacgatatctttcggctctgccgggttaaccaccggctgcatttcgccttcggccaccggctgctccagcatcggcaatgcctgccatttatgcagcgcgctgttgagcagggaagaggagagggaggccagacggtgctcgttcgccagatcgagaccggcggagttgctccggccgctgccgtagagatcgcgcggcagcgggattttcggatgcggcaggccggcctggccttcctgctgcgccagtttttctaccgcgctgaccgggtcggccaccagctcgtccagcggcagggtattgtccgcgatacggttgacgaaagaggtattggcgccgttctccagcagacgacgcaccagatacgccagcagcgtctcgtgggtgcccaccggggcgtagatccggcacggacggttcagcttgccgtcagcgaccttgcccactacctgctcgtacagcggttcgcccatgccgtgcaggcactggaactcatactggcccgggtagtagttctggcctgccagctggtagatagccgccagagtatgggcgttatgggtggcaaactgcgggtaaatcaggttcggcaccgccagcagcttcttcgcgcaggcgaggtaggagacgtcggtgtaaaccttgcgggtgtataccggatagccttcgagaccttccatctgcgcgcgtttaatttcgctatcccagtaggcgcctttcaccagacggatcatcaggcgacggcggctgcgggtggcgaggtcaatcaggtaatcaatgacaaacggacagcgcttctggtaggcctgaatcacgaagccaatcccgttccagccggccagttccggctcgaagcacagtttttccagcaggtcgagggagatctccagacggtcggcctcttcggcgtcaatattgatgccgatgtcatactggcgcgccagcagggtcagcgatttcagccgcgggtaaagctcttccatcacccggtcatactgcgcgcggctgtagcgcgggtgcagcgcggagagcttaatggagatacccggaccttcataaatgccgcggccgttggaggctttgccgatggcatggatcgcctgctgataagaaaccatataggcctgggcgtcagcggcggtcagggcggcttcgccgagcatatcgtaggagtagcggaaccctttttcttccagcttgcgggcgttggccagcgcttcggcgatggtttccccggtgacgaactgctcgcccatcaggcgcatcgccatatccacgcctttgcggatcagcggttcgccgctcttgccgatgatgcggttcagggagcgggagaggctggtctcgttatgggtcgacaccagttttccggtgaacagcagcccccaggtggcggcgttgacgaacagcgacgggctgcggccgatgtgcgactgccagttgccgttgctgattttgtcgcggatcagcgcatcgcgggtggctttatccggaatacgcagcagggcttccgccaggcacatcagcgccaccccttcctgtgaagagagggagaactcctgcagcaggctctgcaccataccggcgcggccgctggcggttttctggttgcgcagtttttccgccagctgatacgccagcttgtgcgcctgttcgcccagcggctgcggcagacgggcctgctccagcagcatcggtaccgcgtcggtttccggacgtcgccaggcggcggtgatcgccgcgcggctcaccgactgcggcaggatctgctcggcgaattcgaggaacggctgatagggctcttccgttggttcgctggcgtcatcgctttcgttggcggccccggagagcagggccggcagctcaggcagcgtctcgtcgttctccagtttttccagataattaaagatggcctgcttaatcagccagtgcggcgtgcggtcaatacggctcgcggcggatttaatgcgctcgcgggttgcgtcgtcaagcttaacacccatggtggtggtgcccatgctcaaaactcctgtcatttatcgttaggcttatgcggttgcatggaaatatccactatgttgcaactttgtgcaaccttgttaattgtggcttgtgacggaagccgtgaaatggctaatttgttaaaaataacccctaaaatagcagaaatttaaccccgggctcatagggtatttgtatgcgtgagttaacacttttgtttggtgcaacctttaaaaacgtgagagagtgcaacctctaacaaattgacgttttgcgccgtcggtttttcgtgtaaatgctgtgttaaatcgtttgtgaaaaaccgaagcttccgtcaggatacggtcgcccaattaaacaatgcgccattaccccgttccggtagtggaaaaaaacgacgaagttggacgctgtcgataaaaattctggagactttgcatggctattagcacaccgatgctggtgacatttattgtttatatttttggtatggtattgatagggtttattgcctggcgttcgaccaaaaacttcgatgattatattctcgggggaaggagtctggggccatttgtgaccgcgctttccgcaggggcgtcggatatgagcggctggctgctgatgggtctgccaggggcgatttttctctccgggatttccgaaagctggatcgccattggcttaacgctgggggcgtggattaactggaagctggtggccggtcgcctgcgcgtgcataccgaggtgaataataacgccctgacgctgcccgattattttaccggccgttttgaagataaaagccgggtgctgagaattatttcggcgctggttattctgctgttctttaccatctattgcgcttcaggaattgtcgcgggggcgcgtctgtttgaaagcaccttcggcatgagttatgaaaccgcactgtgggccggggcggcggcgacgattatctataccttcgtcggcggcttcctcgcggttagctggaccgataccgtgcaggccagcctgatgatttttgcgctgatcctcaccccggtgatcgtgattatttccgtcggcggctttggcgattcgctggaagtgattaagcagaagagcatcgaaaatatcgacatgctgaaagggctgaacttcgtggcgattatctcgctgatgggctgggggctgggttatttcggtcagccgcatattctggcgcgctttatggcggcggattcgcaccacagcatcgttcacgcacgtcgcattagtatgacctggatgatcctctgcctcggcggggcggtggccgtcggcttctttggcatcgcctacttcaataacaacccgagcctggcgggcgcggttaaccagaacgccgagcgcgtgtttatcgaactggcgcaaatcctgtttaacccgtggattgccgggatcctgctgtcggcgattctggcggcggtgatgtccaccctgagctgtcagctgctagtctgctcgagcgcaattaccgaagacctgtataaagccttcctgcgtaaaaacgccggtcagaaagagctggtgtgggtgggccgtatgatggtgctggtggttgccctggtggccattgccctggcggccaatccggaaaaccgcgtgctgggtctggtgagctacgcctgggctggcttcggcgccgcctttggcccggtggtcctgttctcggtaatgtggtcgcgcatgacccgtaacggcgcgctggccgggatggtgattggcgccctgaccgtgatcgtctggaagcagtttggctggctgggcctgtatgaaattattccgggcttcgtcttcggcagcatcgggattgtggtctttagcctgctggataaagcgccgtcggccagcatgcagcagcgctttgccgaagcggatgcccactaccatacgccgccgccggtacgcgccacggctgagtaagatcatctgatgctcacgagcccgccgctggcgggctttttattgcctggtgccgtgccggaatattataacccttgctaattatctgaaaatccgctgatatttcctgactaataacaatgaggatagcaaagatgacgttcagacagggtgcaatggcgctggtgctggcagggttactcagcggctgcgtggcgggtggaagttcatcgaccagcgcgccgaagcccggcgtctgcccggcggataagtccatggtgcaaaccacgctttacttcggtctgagccgcccggcggggaaagacatcaccgctgaagagtggcaacagtttgtcgaccgtgacgtcacgccgcgctttcgcgacgggctgacggtgtttgatgcccacggccagtggcttggccagaatggtcaggtggtgcgggagcagagcaaggcgctgatggtgatccatgggcatgacgcgcagagcgaggccggtattgaggctctgcgccagggctataaatcacgcttcgcgcaggagtcggtgatgcgtgtcgaccagccggtctgcgtgcagttctgagtaaacggcgggggcagccccgccgtttgttttacagcaccagcccggcgaagctggcggaaagcaggcttaccagcgtggcgctatacaccagccgcaggccgaagcgggagacgatattgccctgcggttcattcaggcctttgatcgccccggcgataatgccgatcgaggcaaagttggcaaacgacaccaggaataccgagagaatgccgagcccgcgaggggtcatgctggcggcaatcttttgcagctcaatcatcgccacaaattcgttagcgaccagtttggtggccatgatgctgccggcgtttagcgcatcgctcagcgggatgccgataagccacgccagcggataaaagacgtagccgaggatctgctggaagctgagaccaaacagggtggcgaatagcgcgttaatggcgctgatcagggcgataaaaccgatcagcatcgccagaataatcatcgccactttaaagccggccagaatatattccccgagcatttcaaagaaactctgcgattcatgcagcttctcgagttttatttcctgctcgctgcccggccgcgtcgggttaattaccgacagcacgataaaggtgctgaacatattgaggatcagcgctgcgacgacatatttggcctccagcatggtcatataggcgccgacaatcgacagcgatacggtcgacatggccgtcgccgccatagtgaacagtcgccgtgaggagaggtcgcccagtacgcccttgtaggcaatgaagttctccgattgaccgaggatcagcgagctgacggcgttgaaagattccagcttacccatgccgtttactttcgacagcagggtgccaatcacgcgaataaaaatcggcaggatccgccagtgctggagaataccaatcagcgcggaaataaacacaatcggacacaggacgccgaggaaaataaaggctaagcctttttcgctcatgccgccaaagacgaaattggtcccttcggcggcaaagcctaacagcgaagcaaaaaagccggaaatattttttaccagccacaggccgctttcggcgtgcaggaaaaagaaagcgagcgctatttcgataataatcaactggagaatataacgaatacgaattttttgtctgtcgtagctgacaagccaggccagggcgaggatcaccgccagcgccagcaggaaatgaaaaaatgcagtcatgttgttcttttcgcaagtcaataaggccgccatttagccatagccgctacggcgggtaaatatctggcgtaaaaaatcctttgcttattctttcccttcataacaggcgaatattttcataagtcattatttgtcagcgatttatttacaactgatcatcattctctgcacatttcgcttgtgtttctgagcattgtaatgataatcactatcataaatattacctgtttttgcattcgttgacggtgctttacatttaagggtattggcatgtttgtcccatttctcattatgttacgcgaaggcctggaggcggcgctgattgtcagcctgatcgccagctatcttaaacgcacccagcgcggcaactggattggcgtgatgtggattggcgtgatcctcgcggcggcgctatgtcttggcttaggcatttttatcaacgaaaccaccggtgaatttcctcagcgtgaacaggagctgttcgaagggatcgtcgcggtcattgcggtggtgatcctgacgtggatggtcttctggatgcgcaatgtctcacgcaacgtcaagcagcagctggagcaggccgtggacaaggcgctgcagcgcggtaatcaccacggctgggcgctggtgatgatggtctttttcgcggtcgcccgtgaggggctggagtcggtcttctttctgctggcggccttccagcaggatgtcggcatctggccgccgctgggggcgctgctgggtctggccaccgctatcgtgctgggcttcctgatctactggggcggtatccgccttaaccttggcgtgttcttcaaatggaccagcctgtttattctgctggtggccgctggcctggccgcgggggcgatccgcgccttccacgaggcgggcctgtggaacctgttccaggataccgccttcgatctgagcaacgtgctgtcgacgcatacgctgttcggcacgctgctggaagggatcttcggttatcaggagacgccgagcgtcagcgaagtggctgtctatctgctttatctgatcccggcgctggtgctgtttgccctgccgccgcggaataataccactgcctcgcgggctgcctgaccgggcgctgcgagcttataagcgacactctacttaccgaaagggatgatcatgatgattcattttcgccgtaatgcgctgcgggtgaccgtggccgcgctgctcagctctgcatttggtgctcaggctgcggatatcccgcaggttaaagtcaccgtcaacgacaagcagtgcgagccgatgcaggtgaccgttaacgcgggtaaaacccagtttattattcagaaccacagccagaaagcgctggagtgggagattctgaaaggggtgatggtggtggaagagcgcgaaaacatcgcgccgggctttactcagaagctcaccgcgaacctgcagccgggcgaatatgacatgacctgtggcctgctcaccaacccgaaaggcaaactgatcgtcaccggcgccgccaccaaagacgcggcgaaagcggatgcggtgctgagcctcggcgacgcgatcaccgcctataaagcctatgtgacggcggaaaccgcgcagctggttagcggcaccaaagcctttaccgacgcggtgaaagccggcgatatcgaaaaagcgaaagcgctgtacgccccgacgcgtcagcattacgagcgcatcgagcccattgccgagctgttctctgaccttgacggcagcatcgacgcccgcgaagacgacttcgagaaaaaagcggaagatccgaaatttaccggtttccaccgtctggaaaaagcgctgtttggcgataacagcgtcaaggggatggaaaaatatgccgatcagctgaacagcgatgtgctggagctgcaaaagcgtatcagcgagctggcgttcccgccgtcaaaagtcgtgggcggcgcggcaggattaattgaggaagtcgcggccagcaagatcagcggtgaagaagatcgctacagccataccgatctgtgggacttccaggccaacattgacggcgcgcagaaaattgtcgacctgctgcgcccgcagctgcaaaaagagaacagcgcgctgctggcgaaagtggacgccaactttaagaaagtggacagcatcctcagcaaatatcgcaccaaagacggtttcgagacctacgataagctgaccaccgccgaccgtaatgcgctgaaagggccgatcaccaccctggcggaagatctggctcagctgcgcgggatcctggggctggactaagtcgatggcacaacagaaaccccacgacgtgaacgaaccgtcacgtcgtcgcttactgaaagggatcggtgcccttggcggcgcgctggccatcgccggcggctgcccggtggcccatgcggcaaaagcggaaagctccccggggacgctggcacctgacgcgcgtcaggaaaaacagcccttctacggcccgcatcaggcgggcatcctcacaccgcagcaggcttcgatgatgctggtggcgttcgatgtgctggcggccgataaagccgacctcgagcgtctgtttcgactgctgacccagcgtatcgcctttttaacccagggcggcccggcgccggacacgccgaatccgcggctgccgccgatggattccggcatcctggggccgtggattgccccggataacctgaccatcaccgtctcggtcggccattcgctgtttgatgagcgttttggcctggcggataaagcgccgaaaaagctgcagccgatgacccgcttccccaacgattcgctggatgccgccctgtgccatggcgacttgctgctgcagatctgcgccaatacccaggatacggtgatccatgccctgcgtgatgtcatcaaacatacgccggatctgctgagcgtgcgctggaagcgggaagggtttatctccgacagcgcggcgcgcagtaaaggcaaagagactcccatcaacctgctgggattcaaggatggcaccgctaacccgccgagcgacgacagcgcgttgatggataacgtcgtgtgggtgacagccgatcaggacgagccggcctggaccgtgggcggcagctatcaggcggcgcgcatcatccagtttcacgtcgagttctgggaccggacgccgctcaaagagcagcagaccatctttggccgcgacaaacacagcggtgcgccgctggggatgaaaaacgaacacgataccccggattacagtaaagatcctaacggcgaagtcattgcgctggatagccatattcgtctggccaatccccgcacgccggaaacccagtccagcctgatgatgcgccgcggctacagctattcgctgggggttactaacgccggacaactggatatggggctgttattcgtttgctatcagcacgatctggaaaagggttttctgacggtgcagaaacggcttaacggcgaggcgctggaggagtatgtcaaaccgatcggcgggggctacttctttgttttacccggcgtagtggatgaaaaacactatctgggagagtcgctgctgcaggcctgataccaaccctgcccgtaagggcagggcgttttctgctgtttttctcatttttcttatatttcctgccatgtgttatatttctgtaatacaaatgaccgatagtctcctacacttgcttaagaactatttgttgcgtcattgtgaaaaataagttgcattaagaatcttttttgatgtacttattacatacgcggtagttcccggcagtgtgacgtttcactatggagatcgcgaatggtaaggtcccgtaccggacaacgtaaaacctcagaccgtactcttcagcacggaagccccgcttccggcagcgattttcttactctttctctctccgcttcgcattattacaaccttggcagggtacgcggtgcgcgtagccgcgactcgttgtcagttctaccggcaagcaatggcttacaaggaagccaaacctcaatcgttcgtgcgcatagtcgcgtcgatgttgacgcgtgtgatgtaaaccaacaacgcaaggtgctatccatgggaagacaaaaagcagtgatcaaagctcgtcgtgaagcaaaacgtgtgctgagacgggattcacgcagccataagcagcgtgaagaagaatcggtcacatcgcttgtgcaaatgagtggcgtagaagcaattggcatggcgcgggacagccgtgatacttccccaattgaggcgcgcaatgaggctcaggcgcattatttgaatgccatcgacaataagcagctgattttcgctaccggcgaagctggatgcggcaagacctggatcagtgcggcgaaggcagctgaagccctgatccataaggatgtggacagaattattgttacccgtcccgttctgcaggccgacgaagatctcggcttcttaccgggagatatcgccgagaagttcgctccctatttccgaccggtttacgatgtgctggtgaaaaggctgggggcttcctttatgcagtactgcctgcgtccggaaatcggcaaggtggaaatcgcgccgttcgcctatatgcgcggacgtacctttgaaaatgcggtggtgattctggacgaggcccagaacgtgaccgcagcgcaaatgaagatgtttttaacccgcctcggggagaacgtgacggtcatcgtcaatggcgatatcacccagtgcgacttgccctctggcgtgagatctggcctgagcgatgcgctggcgcgttttgaggaagacgagatgatcggcattgtgcgtttcaccaccgatgactgcgtgcgctcggctctctgccagcggacgctgaaagcctattattaatcgtcatactgtgagcaaggcccgggctagcccgggctttgttgtttttgggcatcctcccggcggcgctgcgcttagccgggctacctggcgggtagggtctggtagcccgggagaggcattgctgccgaccccggggatgtctgcggtgccacatgcgaaaaaaaagcccgtacatgcgtacgagctcttcttaaaatatggcggtgaggggggattgactcgcttcccggcggtactgcgcgtggccggactacctggcgggtagggtctggtagcccgggagaggcattgctgccgaccccggggatgtctgcggtgccacatgcgaaaaaaaagcccgtacttgcgtacgagctcttcttaaaatatggcggtgagggggggattcgaacccccgatacgttgccgtatacacactttccaggcgtgctccttcagccactcggacacctcaccatattgtcttgctgctcaccttgggtgggcaacggggcgctactatagggagttgcgttaaaacggtcaagcatattttcttctttctttgccgttcgctcacgcaatgaacaatgccccgctgcggctcagcggggcgggcgttttagcgctgggaatccagctgttcgttattcttcacgacgtcctgcgctttgctgtagctttcgatcagcagctggtaggccgggaagactttggtgtacacctccgcccattctgcggcgtccgggcgattccaggtgcgctgcagctcagaggcgatggcggcggtatccattggcactacgccggcctgtaccacgcgagccagggtgatctcttgcgccattttgctgtaggtgccggaagcgtcaatcacggcaaacactttataaccgtcggcgacagcggcgatagccgggaaggccatgcagacgctggtgatggtcccggcgataatcagcgttttacgaccggtcgctttcaccgcggcgacgaattccgggttatcccaggcgttaatctcacctttacgggcgatgtatttcgcatgcggcgcgttttcatgaatctccgggatcagcggaccgttcggcccctgcggcacggaggcggtcgtgatcaccgggatcccggcaagcgacgccatcttggccagcgcggcggcgcgagcgcgcagctctggcatcggcatatcgccgacggtctggaacagaccgctctgatggtcaatcaacagcattgcggtatcgttaacatcaatcaccggacgagcaccgttaaagttagcgggagtagacatagtattcacctcaatcagttagatttggccaaagcggccgctgttaaaatcgcgtacagcttctgcgatctgcgttttgttattcatgacaaacgggccatagcccacaatcggctcctgtagcggttctccggccatcagcagaacttttgccggggcggtcgcctccagatgcactgcgtcacctgcctggctcaggacggccagctggccttcgcgagcagattcggaaccgttaatgatcacttccccttccagcaccaccagcgcggtactccagccctccggttggcgcagcgtgaggtcgtgcccctgattcagctgcagatcccacacgttaagcggtgaaaaggtatgggccggaccgctgacgtcgtcatactggccggcaataacccgaacctgtccggcgccgttcgccagcgccacggtggggatcgtcccagcggtaatgctctggtagccggggggcgccattttgtctttcgcgggcaggttgacccacagctggatcatcttcagctcgccgccgctgcgggtgaaggcctccgagtggaactcttcgtgcaggatcccggcgcccgccgtcatccactgcacgtcgcctggaccaatcaccccgccgcgtccggtggagtcgcgatgctctacttcaccggcgtagacgatggtgacggtttcaaatccgcgatgcggatgctcaccgacgccgcgtttttcgctgcccgccgggaaggtgtacggcccggcatagtcgagcagtaagaaggggctcagctgctggccgtgcgtctgataggaaaacatcgagcgaaccgggaagccgtcgcctacccaatgctgcgcaggcgcggtgtagactcctgtgatctgtttcatggctttctcctgtgtatcggtatctgatgtgaataagcttatatccgggacgacgtatgcggtagtgagcaaaaatgacctatactgttccaaaaatggaacaatggaggaaggatgcaggatctcaatgacttcgcctggtttgtccaggtggtagaccatggcggtttcgccgcggcggggcgagcgcttgaccagccgaaatccaaactcagccgccgcattgcgcaactcgaggagcggttgggcgtgcgtttgattcagcgaaccacccgtcagttcgcggtcaccgaggtcgggcagaccttttatcagcattgcaaagcgatgctgattgaggccgaggcggcgcagcaggcggtcgagacgctgcgcgccgagccgcgcggtagcgtcaggatcacctgtccggtcaccttgctgcatgtccatatcggaccgatgctggcgcgatttatggcgcgctatcctggggtaacgctgcatcttgaggcgaccaaccgccgggtggatgtggtcggggagggcattgatgtggcgatccgcgtccgtccccggcccatcgaggatagcgacctggtgatgcgcgtgctggcggaccgcgggcaccggctggtggccagcccggatctcatttcccggctcggacgtccgcaggcgccgtccgagctgagcgcctggccgggactcagcctgggagcgaacaagcatcagcataaatggcagcttaccgggcccgggggagcgagagcggaagtgtatttcacgccgcgaatggtgaccaccgatatgctggcgctgcgcgaggcggcgatggccggcgtaggcgtggtgcagcttcctttattaatggtgcgcgatcagctggcgtcaggggaattagaggtggttctggacgagtggcagccgcggcgggaagtgatccatgcggtatttgcctcacggcgcgggctgctgccctccgtcagggcgctggtggactacctcagcgaagagtatcagcggatggaggaggattagcttcgggattggcttttctcgaggggctccccccccccggcagagaatattaaagaaaagagcccgtgcttgcgtacaggctctcatcttgaatatggcggtgagggggtccgccatattagtgtccggtaatgtacaccataattatatttttccattagtatacaatatgttgtcattattctttgtccggtaatgtattgatgttttgtttataatctgtcattttatgcagtacaggatgcactacagaagaatgatgataatgccaaagaaagccagaggactgtctgttcttgctgtttccagacttaaagctgatgggcgttatgctgttggtggggtggatggattatacctgcggattgcagggcgctcccgcgcatgggtcctgagtgtggcaatgggaacccgaattaacaaagcaggtaagacggttccccggcgtctgaacatggggcttggtccctgtcaggaagtttctctggcagaagcgcgtgacaaggcgcgtgaggtgcgtaagcaaattcgtgatggcattgatcccctcgaagaaaaacacgcccgtaaagcgtttcacgaagctcaggcgcgtaaacaaaaaaccttccgtgaatgcgctgaagctgtgctggaaatcaaaggtaatgagttaaagaataaaaagcatgtggctcagtggcgttccacactggaaacctatgcttatcctgttattggtgataaagcggtcagtgaaattaccaaaatggacttgttggcaatcctcgaaccaatatggctaactaaaaacgaaacagccagtcgtgtccggggacgtatcgaaacggtaatggattacgccaaagcaaaagagtatttcgaaggtgataaccctgctgcatggaaaggtgtactaaaacctctgttgccaatgccaagtaaagttcagaccaaaaaacatcatgcggcattgccttacaaagatgcaggctcatttatggcagaactgcgtcaacgggccgggatttcagccagagcactggagttttccatactgaccgttgcccgttcgggtgaaattcgaggcgctgaatggtgtgaaatcgatctggatgcgaaaacgtggattattcctgctgagaggatgaaagcagcgaaagaacatcgcgtacccctgtcagatactgctgttgaacttcttaaagccttaccacgatttacagataacaatcttgtttttccggcacctcgcggtggacaactgtcagatatgtcattaacagcagtattgaaacgcatggggcgtagtgatttaacccagcacggatttcgatccacatttcgtgaatgggcgggggaaaccacatcctaccagcgtgaagtgattgaacacgcccttgctcaccagttagcagacaaggcagaagccgcttaccagcgtggcaccttatggcctaaacgtgttgcgttaatggatgactggacaagctattgttctgtagcgtaaaacagctaaaaacagactgatggatagcagataatgaaaagaagtgaaatcaggaaagcgattgaatcgtggtttgacattgaacgctatgacgcaattgaacagctcactctgcagcagttctatgttgagattgaacggcgtatcttggcttacaggatgttgttgagccgaaataccataccgaccctgaacagattattgctggatgattagcgctataagatcctcagaggtgaaatctttttcagtggtgataccgctactcttggacatgagcttgccagaacctatacagtaaaccctacgactcgaagccatgcgcaattttacgcgaaaacgctggcattaaccgaagccacccccgaaatttcgtcgttaagccagtccgaattcctgtcagagtatctgaaagagacaccactgaaaaaccttgcccgtatcactgttgatattcatctggaagaggcatcaaccgaagacatcattgaacatctgaaggtgctgatcccgcaatggaagagacggcttaagatgaaggctccagcggatcgagagtatcgtttcggtaaaagcacgttcagaaaagttattgaatatcgccttattccgatgatggatctgattttttggggtgctgataataatgataccaagatcccactttccctgatgtcttcactgcttcatgaggacagtgataatgatcgtgatgaaggaatgctcaaggcaacggattacccactggcaatggcgttcctgacagatgaaagctatctgaagtcgcttgaagattacatcatgcaaaacaatcacttaaaagatacacctgttgataagcatgttgaggatgataagaagaagaaaaaagcagccaagtaaaaagggttacgttcgccgtgagcgaacgtgatcgcattcagccataacgaacctctttctgttcatctcccttcatatttttcaaaaaactcttttatgaacgcccctaaaacgtcataagcgaattcgctattattgttctcgtcgaaacaacatagagaaaaacgaaatctcatagagattacgtaaaataagagaggacaaacaatgaaagaaaatactgaaaacaacgtaaagcgatttatccgtgttccagatgttctaaaccgagtggggttcagtcgcactaccttatatgagcgtattaaggaagggaactttcctgacagggtaaaaataggaccaaggtgtgtcgcttttgttgaaagtgagatagatgaatggattgaagctactattcgaaactcacgtcagaacgcagcataaaaaataaataccgtttccgggtgaatagatatctttcgctcagggactcttattatcttaatcaataaaagggcaatgtatgaaaatagaatttaatacgacagagcagtttatcagtgaagcagcggattcgtataaccgttatatgaataaacgactacggaaccagcctgtgcatttctaccacctactgaaaaataagggggatatgaacgaagtgattgaaaatattatcgataaaacaaagagccgcttttatggggctgaaggtgaacaaaaaagtaacggatctccgggagcgttaactatgtgaaagtaaagcaacaccttcgtcagctttggattgtctttaagtgtgtataccgctgattcatccataaaaatatctactttaatattaaacaaaaaaggaaataaaaatgaatatatttaaaaataaatctactgaaatcttttatgttgtgtccttgcatatctacgcggagctttttaactcaaaggataaaacaaccagtaatatgattataacgcatgtaatggatcatgagtttgtcagtaaactaatcgatctggcgatgagaaatgcggagaagcatcttctgaaaaaagcatggaaaaagaacgctgatgaaaaactgtctgaggtggattttaaagaggttaagcaggcattagccaaaatgcattacactgttctggcggaatcaatatgttgatgtgttctgaagtctatctgccccttcatggggctgataacaaatctgatttgaaagctaaaaatggcaatgaaaacatactctatacaaggagccaaaatgattgatgaatttcatgtgatgtatatgtataaaaaaatccaagcagaagctgcaaccaccgacattaaaacacttgaacagcttttgaaaaagttcaggagggtggtcaatgaacgtcgtgaagaatactatcaggaaataggtgagaaaaaagcgcgtaagttgaaaatgaaaagagcacaaagattgcttgagaaaatggtgtgcgaccgagtttcgccagaagatttaagggcgtgactattagagatatttttgacataatcacatgaaaatgataatcattattgtctattgtgtctttttgtcgatagataggtgagcgaagggaatctggagggaactgtatgagctttgaagctaaaaaggaacatgccattgccatcatggaaagcaagaaaatgtggcgtagtaactatgcgcctcctttgctacgcctcgcatggaaagctggcctcaagatcccaccgttgccttttgccacgttctggcaaataaccttgctgatgggaggttggtttggtccggcatgggggatttgtatgtggttttcttcatggaaggacagtggtatgcagccgggcgttgcatttgtctcaagcatagtcgcaggtatttgctttggtgttcttatggctgcgtatcattggtggcgaaaggtagttaacaatctgcctgactgggatagtctggagtaaagatctctgtagtggctatataacctctaaatggactgagtgtgagatgggaaaaataaaatattggttaatagcgggatttattatccttcttgcaattgtttacactgctatcagtgacaggtattctacgctttctaggttgaaatcagcaggtgaaaacggagatgtagaagctcagtatgcgttgggtctcatgtatttatatggagaaatactggatgtcgattatcagcaggcaaagatttggtatgaaaaagccgctacccaaaatgatccgcgtgcacaggttaaactcggtttgatgtatgcaaatggtctcggggtaaatcaggattatcaacaggccaaatcttggtatgaaaaagcatcggttctaaatgatgttgatgcgcaatttttgcttggagagatgtataacgatggtctcggggtaggccaagactaccaacaggcaaagatgtggtacgaaaaagctgctgctcaaaatgatgagcgtgctcaggtcaatctcgctgttctatacgcaaagggtaatggggtagaacaggattatcgtcaggccaaaagctggtatgaaaaggctgcagctcaaaatagccctgatgcgcagttcgccattggaattctgtatgccaatgctaatggtgtagagcaggactatcagcaggcaaaagactggtatgagaaagcagcagaacaaaatttcgccaatgctcagtttaatcttggtatgttctattacaaaggtgagggagttaatcaaaactttcagcaagccagagaatggtttgaaaaagccgcgtctcaaaatcagctgaatgctcaatataatttaggtcagatctattactacggtcagggcgtaactcagagctatcgaaaggctaaggaatggttcgaaaaagcagctggggaaggtcatgtcgatgcccaatataaccttggcgtaatatacgaaaatggtgaaggggttgggcaggactttcatcaggcgagagcttggtatgaaaaggcagcttcgcaaaacgatgcgcaggcacagtttgatcttggtgttatgaatgagcttggtcaggggggaagtataaatctgaaacaagcaagaacttggtttgggctggcatgcaataatgggcataaggaaggttgcgaacgttatgaaaataattgaaatggttttttaggggattttttgtcataactaaatttaattttagctttataatttattttgattcttttttgatatgcaaaaatatagtgtgaggagaggggcgataaataatatacaaaacattaatacgaataagaatagttagtagtaaatgggttaaagcctctggaacttcaggattttttacaatgaacaaaggcgtttgcttggttaataacccggaaacaaacacctgctcatgtcagtcaggcactgtagcgaaagaattgttttatacaacagcaactgaacagttaggtggtggtagccatggtggcggcataacagtggtaaaagagagagtattatatcaatgtagataaggatgattgtcttattatactttattttatgcaagataaatttgatttccatcgggatgtaattatatatttaatgtatcccgattttataacatctttttatgttttacaattcaggagaacttaaacctaaaaatatcaggagtgatttatgaataagaaaatattagtattgtccgttttatttggtttttcaactatgtcccatgctagtgaaccaaagtatgcttttccgcaatcagataaacaggtagtctcaaaaattaaaattcaaaatgcaccgataaatcatgataaatatggtcatggtgaggttcttgccaatggggcgtgggttaaaggaaattctggtagtcaaaacaaaaaatgataggctcacttattttaaataaataatccgatggatatataggtgagtagaaatcgttagataaagttgaaatagtggcttgacttaagaataaagagtgctatatctatttgtagctaacatttttttaatttggctgccagatgttttaattttttgctcacattgatgttaggttgttatataccttgtcctgatattctaaaatataactatccttttgtatggtattacaaggcgtcaggaacttggtttgatcctcctgacagtctgttgtggaggattaaatttatccagagtaagcgattatgatggtttttatttaaatagataaatatatttgattatcgatattaaatgttatgtttaataagtgttttctgtgaatattcacttcatgaaatgtctgattactctacgtattgggatatgtattttctccaacggatagttcccttaatgggaaatgaaagggccgaaaggccctataactaattacatattgttaactttttacttccactaatgttctttttttctcaatttcttagcaagcttggggtaatatattttgtgaccatcctctttgggccagcagactgatactgcatagaatagtaatgctgaagaaattaatagaccaatgagataatgtggtgttgtaggatcactgtgttttgattgttcccataaccagtcaataaacatccgactggaaccatttgatgcagataaataccactctattgagaaaacaaaaattgttccaaaagagattatttcagctgctctcccttctttataatttttctctcttttgctttgctcttcagtatacaattttaatgacatgtcgtcgccattttctaaagcatcatctcgtagttctgacataaaaacttcagtagatgatttttggtagatcctctcatctttactttgtagtagattactatacttaattcgtatcagaagtagattaaagcatagagatgttatttctaatattattgatgagaaaattcctaaagcaataatcattccggccaaatctgcaagtgaaagatcgaattccttccctaattttatgccaaataaaccatttccttttagatagaaaaatagaacatcaaaacatagtgtgaaataaattaattttgctactttcgctaaatcccacaatccatctacaaagcttaataccgaaaatgttgaactactattactggatgacatatattgcctctttcagcttttgataaacttcttatattaatgagttaaagaagggaggcaagccatccttggctttcaattctttacttgtgatgagcaaattcaaacggcctgaccataccgttgctgttagcatcaaggaaatcagcaaccactggagcatcaggtgtcgctgcttaaggtgcttggttttatggttataagcaacccggattctgttgctttccttatggtccacttgatgctttacagcgtcttctgaccacaaacctgactcaattaaggcactacaggccagcgtgtgaaaaccttgtccacagatgtcctgtgtggtgttttcaatcagaacagctaaaacatggcaagacaataccccgaccactcatccatcaacgccacccgcttaggccataaggtcccacgttgatatgctgcttcggctttatctgctaactggtgagccagtgcatgttcaatgacttcacgttgatgatcggttgtgacatcatcccagtcacgaaaagtggaacggaaaccatgttgagttaatcctgaatggttcattctctttaagactgccaacagcgacatatctgatagttgtccaccacgaggggctgggaacacaaggttattgtctctgacatgtggtaaatcctttaacagggcaaacagcagtatccgacaacaggacttgctgttctctacccaccacccgccagagataacttattcaatcttttctggggggcagatggaggggagttgttttcatgtgttctatgaccagttcgctacattaatcaaagctttatttttaaagctttgatcaggaaaatcacagcaaaaacaggaagttcagatacaaaaaaagtccgtttgaacggacttttttatgcagcattttatgcagtacaaaaccaaaaatgcgttgtaactaattgattttgtgttaaatatggcggtgagggggggattgactcgcttcgctcgcccctgcggggcagcccgcttactgcgtgcgcggtctgtccaactggctgcgccagttgtcgaaccccggtcgggggttctcatccccccctgcggagaatataaaagaaaagagcccgtacttgcgtacgagctcttcttaaaatatggcggtgagggggggattcgaacccccgatacgttgccgtatacacactttccaggcgtgctccttcagccactcggacacctcaccatattgtctt

SEQ ID NO: 66 - DNA, 134633 bp, Unknown
  source: /note="Description of Unknown: MKP2_coc_1 Mutant Bacteria sequence"
cttatgcggcatcgtcgacgaaccgccgcgaccttccgccaccggctcgcccacctcagccacttcggtctgcatcagcagggaaaagtcgttagcgaatttccccagcgtgccgcagacgccggcaaaccaggcgcccgcctccagcagccgatcgcgctggctgtgccacggagtatccggcagcgacagaccgaggatctgcgccagcgccaggccaaccgccggccctttctcttttagcgcgtccagagtgcccgcggcgccgccgaactgcagcaccagcagccgcggacgcatctcgcgcagccgctgctgccagcgcaggagcgcgtcgagggtgcccgccagcttcaggccaaaggtcaccggcagcgcgtgctgcatccaggtccgtcccggcatcacggtatcgcgataacgatccgcctggagtgccagggccgccaacagctgctcaagcagagtctcagcggcatccagcgccccgcgcagctggagcaccagtccggtgtcgatggcgtcctggctggtagcgccccagtgaacgtagcgcgcagcctcgggatctcgcgcttttacctgggccgtcagctgtttcaccagcgggatggccagattaccggctcccactgccgcctcgcccagcgcggcaaaatcgatggcttcgtggcggcaggccgccacaattggcccgaccgcttccggcggcaccatcccgcaggcggcctgcgcttgcgccagcgccgcttcaaaatccagcatgccctgcacccgctgcgcgtcgctgaaccagtcggttagcggactgctgcgcagcatcggggtcaacaaactcattctggctccttaaacacgttcaataatcagggcgatcccctgtccgacgccgatgcacatggtgcacagggcgtaacgaccgccggtccgtttcagctgataagccgcggtcatcgccagccggccgccggaggcgccgagcgggtggcccagcgcaatcgccccgccgttagggttcacgtgggcggcatcgtccggtaagcccaaatcacgggtcaccgccagcgcctgcgcggcgaaggcttcattcagctcaatgacatccatctggcctaatgtcaggccggtctgcgccagcaccttgcgcaccgccggcgccgggccaaaacccatgatccgcggcgcaacgcccgccgtcgccacgccgaccacccgggccagcggctgaagatcgttggccgacagcgccgtctcgctggccagcagcagcgcgcaggcgccgtcgttaaccccggaggcgttaccggcggtaacgctgccctcggcgcgcaccacgccgcgcagtttagccagcgcctccagcgaggtgctgcgcgggtgctcatcgcggctaaacagcagcggctcgcctttgcgctgcggcacctggacggcgatcagctcatcggcgaaacgccccgcctcttgcgccgcggcggtacgcaactgactgcgtaaggcgaacgcgtcctgatcggcacgggagatggcaaactcatcggcgacgttttccgccgtctccggcatggaatgcacgccgtacagggctttcatctgcgggttaataaagcgccagccgatggtggtatcctccatctgcatgctgcggctaaaggcgctctccgctttccccatcacaaacggcgcgcgggacatgctctccaccccgccggcgatcatcagctgcgtctccccgcttttaatcgcccgcgccgcgacgccgatcgcgtcaaggctggaaccgcacaggcggttgatggtgctcccgggcacgctctccggcaggccggccagcagcagcgccattcgcgccacgttgcggttgtcttccccggcctggttggcgcagccaaagatcacatcgtcaatgcgcgagggatccagtcccgggttgcgcgccagcagcgctttcagcggcagcgccgccaggtcgtcagcgcgcatcgtcgccagggcaccgccgaaacggccaaagggtgtacgcaccgcatcacagataaatgcctgattcatcataggttccttacgcgctttccgccagttgttgaaaggtcagcgccaccggagtgatgcgctgcagctcttcaaaagagaggccgttaaagatttcccgcaccaccgggccgcggtcggtgatgtcgatcaccgccaggtcggtatagatccggctgacgcagccgacgccggtcagcgggtagctgcactgcgccaccagcttgcactcgccgtcacgggtcaggtggtccatcatcacaaatacctggcgggcgccgatggccagatccatcgccccgccaacggccgggatcgcatccggcgcaccggtgctccagttggcgaggtcgccgctggcggaaacctgataggcccccagcacgcagatatcgagatggccgccgcgcatcatggcgaaggagtcgccgtggtggaaatagcagcccccctgcaggagggtgacatactctttaccggcattgatcagctcgggatcttcttccccgggctgcggtttcggccccatccccagcaggccgttttcgctgtgcaggaacacctctttgtcagcgggcaggtaattggcgatgcgggtcggcaggccgatgccgaggttgacgtaagcgccttcgggaatatcgcgggccacgcgctgggccatttcgtcacgggtcagtttttgcatgtcgggctcctcaggcgcgttgtgcggcagtcaggttttccagcgagaagacgcgctggacgaaaatgccgggggtgatgatgttttccggatcgaggtcgcccagcgccaccagctgcgagacctctacgatggtggttttcgccgctgtcgccatgatcgggccaaagttgcgcgccgccttgcgatagaccaggttgccccagcggtcgccctggtgggctttaatcagcgcgaaatcggctttgatcgggtactccagcacgtagtggcgaccgtcgatttcccgtgtctccttgccttccgccagcggcgtgccgtagccggtgggggtaaacaccgcccccagcccggcgccggccgcctggatccgcgccgcgaggttgccctgcggcaccagctccagctccactttgccgcgacggtagagatcatcgaaaatctgggaatccacctggcgcggaaaggagcagatcattttgcgcacccggcccgccttgagcagcgcggcgagacccacttccccgttgccggcgttgttatttatgatggtcaggtcgcgagcgccctggtcaatcagggcgtcaatcagaaaggtcggctggccggcggggccaaagccgccgatcataatagtcgccccatcgtggatcccggcgatggcctcgctcagcgtcgatacgcttttatcaatcatcaggtcgctccagtgatgtgcggtaatcgcacttttattcgttgttcgcacaaaatgtgacccgcttaacgatgtcggtcaagggcgataatcgaaatatggtgcgataatcgaacatcggttatcttttgcgaaagaatgtgatcgatggcaaatatggggaacagaaatggacaagcatccagacgatttactgaccggcgacggcgatccgtttaaaggcgatcctaactttatggcctccctggcgcggggtctggaggtgattcaggcgttcacgccgcagcggcccctgctgtctatctcgcagatcagtcagaagaccggcatcccgcgcgccgcggtgcgccgctgcctgtataccttgagcaagctggggttcgtgtatgccgaagacggtaagaatttccagctgcggccgcggatcctggcgctgggccacgcctggctggcctcgacgccgctggcgcgttcggcgcagccggtgctgcggcatctgagcgaaatgctcaatgagtcctgctccatcgccaccctcgacggcgacgatatcctgtatatcgcccgcgcctccagctcgcggattatgaccatcgacctggatatcggcagtcgccttccggcgtgggcgacctcgatgggccgggtgctgctgagccatcagccggaggagaagctcaacgatatgctggcccgggtgaccatgatccgctataccccacagacggtggattcggtggcgaagctgcgcgccgaactgaaacgggtgcatcagcaggggtatgccctcaacgatcaggagctggagatggggctgcgctccctcgcggtcccgctgtttaacgctcaggggcaggtccaggcggcgctcaacgtcggggtgcatgcgggccagatgacggcccgcgagatgatcgagcgcgtgctgccggagctgcaaaaagccgcccgcgagctgacgctgcttctgcgctaacgactgcgcttggcgtgctgctcccaggtctcctgcttcgcctgcgccgatttacgcagcgcaacatagcaggcgccgctgccgccatgatgcggaagcgcggcgcagaaggcctgcacctccggcagctcttccagccagcgcgccagatagctgcggataatattggcgtgggactggtcgtcgcggcctttgccgtgaacgatcagcacattgcgtaacccctctttctgcgcctgcaccataaaggcgaagagcatctgccggcactgttccaccggctggcgcagcagggagaggctcgcctgctggctgtatttcccccgccgcagcttatccagcacgccgctctgcagcccttctcgcttaaactccagcggcgtggcgagcggcacgatatcgagatagccggtggtgagaaaattatccagctgcagggtatcgacgcgttgcggggcccggctgttacgcccgggatgccagtgcacgtcattattacgtttcagaggctggacatcttccatggcgtcaagaaacagggatttgtcatcaaggttcatgggctctcctccagcggctgtcgccagctactatagccgcctcgcgctcccctctcaacgcgtttagccgcgttcgctggcaaagtgagcgcgacggacgattaaggaaacaattgtcggctctggcggcggaacagggtgattaacgacgccgtgagcggcgtttgccgggtatcgcgccgctggatcagataataggtggcggtgggtaacacttcacggatatggatcatcaccagtttgtcggccatcagcgggtcgttgcccagctccaccggcaggatgctgagaaaatcacttttcaccaccaggctgatgcaggatgagaacgtttcgcagacgatccccacctttggctcccgtcccagctgttcgaagcattcctgcagctgcttgaagtagctgccgcgcggcgtcggcatggtccagtggtgatccatcaattcccccagcgaggtggcctgcgccgccggatggcccgcgcgggcgaacaccgcgaacggtttctcaaacagtttctcaaagctgaactcatggtcgtacggcccggggtaataggtattaatggtgaaatccagctccccctggcgcagctcattaatcatcgccagcagttgaccctccatgatccgtaccttcacctgcggatgctgctgatgaaagcggcagatcaccgacggcatcagcgaccgggcgacgctggcgccaaggccaatattaatttgcccggcctgttccccctggcgctgcagcagttcatcctgcgccgcccgcagctcctcaaggatcaggctcgcatgttgataaaaactttcgccattgtcggttaacgccaccccctggctgcggcggacgaacagctgggcggaaagcccctcctccagctctttaatcgctttggtcagcgccggctgcgagaccgccagcgcccggctggcgccacggatactgccttcccgggctacttcgacgaaggcgcgaatttgatgaaatttaatctgaaatgccatgcttttagtgataaccgttgattatcagacagaagaaaatgacatctactgtaatccatcaggctgtggcaggttaagggtgttaaggcctgtagcgcgtcagtgataaacaaaagctatcacatcgtgaacgccgtcacattttttacttatgacaggataagctatgccgcaacttgatgaatacctccgccagctggcgccctccatgacccaatggcgccgtgattttcacctgcacgctgaatccggctggctggagtttcgcaccgccagtaaggtcgcggatattcttgacgggctaggctatcagctggcgctaggccgcgacgtcatcgatgccgacagccggatggggctgccggacgaggagaccctggcccgggctttcgaacgcgcccgcgaacagggcgcgccggagcgctggctgccggcgtttgaaggtggtttcgccggcgtggtggccacgctcgacaccgggcggcccgggccaaccctggcctttcgcgtcgatatggatgccctcgatctcaacgaacagcatgacgatagccaccgcccccatcgcgatcatttcgcctcctgcaacgccggcatgatgcacgcctgcggccatgacggccataccgccatcgggctggggctggcgcatgtgctcaagcagtatgccgcccagctcaatggcgtcattaaactgattttccagcctgctgaagagggtacccgcggcgcccgcgcgatggtggccgccggcgtggttgatgacgtggattatttcacggcgatccatatcgggaccggcgtgccggcaggtaccgtcgtctgcggtggagacaactttatggccaccaccaaattcgacgtgcagttcagcggcgtggccgcccacgccggcggcaagcccgaggacgggcgcaacgcgctgctggccgccgcccaggccgcccttggcctgcacgccatcccgccgcacagcgccggcgcctcgcgggtcaacgtcggggtgatgcaggccggtaccgggcgcaacgtggtgccctcttccgcgctgttaaaagtggaaacccgcggcgaaagcgaagccattaatcagtacgtgttcgagcgggcgcagcacgtcgtcgccggggctgcggcgatgtacgaagcccgctacgaactgcgcatgatgggcgcggcgaccgccagcgcaccgtcgccggcgtgggtggactatctgcgcgaacaggccgcccgggtgcccggcgtgcaacaggcggtggatcgcatcgccgccccggcgggctcggaagacgccaccctgatgatggcccgggtccaggcgcgcggcggcctcgcctcgtacatgattttcggcactgaactcagcgccggtcaccacaacgaaaagtttgacttcgacgagagcgtgatggcggtagcggtcgaaaccctggcgcgcgtcgcgcttaactttccctggcagcggggggtgtaatggaagccatttttcagtttgtggacgaggtggttgaggcacaacgcgacacttactgcgccatcgccgacgacatctgggaccacccggagacccgctttgaggagttctggtcagcccaacgactggccgacgccctggaggcggaaggttttcagctcacccgcgatgccggcgggatcccgaatgcctttatcgccagcgtcggtgagggccaaccggtcattgccctgctcggcgaatttgacgccctggcgggactcagccagcaggcccacagcgcggaaccgacgcccttgacaccgggagccaacggccacggctgtgggcacaatctgctcggcaccgcggcattcgccgcggcggtcgccgccaaaggctggctgcagcagcacggcgacagcggcactctgcgcttctacggttgtcccggcgaggaaggcggttcgggaaaaacctttatggtgcgcgaagggttgtttgatgatgtcgatgcggcgctgacctggcatccggaagcctgggccgggatgttcagcacccgcaccctcgccaacattcaggcggcatggcgatttaccggcaccgcggcccacgccgctaattcgccgcacctgggccggagcgcgctggatgccgtcaccctgatgaccaccggcagcaatttcctcaatgaacatatcatcgagaaggcgcgcgtccattacgccattaccgataccggcggcgtctcgcccaacgtggtgcaggcgcaggcggaagtgctgtatttgatccgcgcgccggagatggccgacgctgagcaaatcttcgcccgcatagagaagattgcccagggggccgcgctgatgaccgagacccaggtcagctgccgctttgaaaaagcctgctccagctatctgcccaaccgcacgcttgaggcggcgatgtatcaggcggtctgtcattacggtacccccgcctggagcgacgaggaacgcgcttttgccgcggcgatccgcgccgctctcagcgccaatgatattaacaacagcctgaacaatattgccggcaccagtggcgaggaaggcaaaacgttcgctcgtcgccaccgcgacaccttgctgattgatgaggtggcgccctgggcggccacggataacgtcctcgccggatccaccgacgtcggcgatgttagctggaaagcgccggtggcccagtgcttcagcccgtgcttcgcggtgggtaccccgctgcacagctggcagctggtgagccagggcagaacctccattgcccataaagggatgttgctggcggggaaagtcctcgcggcgaccgccatccgtttattcagcgacagcgccctgctggaggccagccagcaagagctcaggcaggtactggccgaacgcccctatcgttgcccgatcccggcggaggtgagtccgtccgttttacgataaccacttagaggctactcctggccaacgctgaccggatcgcggcacgcaccgcccataataaccgccggcagtaggggagcaggcctgcccaacacaacaacgacaacagaggaatgcccatgagtatgtcatccataccgtcatcttcccccggcggaaagcgctatggctgggtagagaagatcggtaacaaggtcccgcacccgtttttgctgtttatctatctcatcgccgtgctgatcgctgccacggcaatcctctccgccctcaacgttggggtacaaaacccaactgacggttcgcgggtggtggtcaaaaacctgctcagcgtggaaggattgcactggtttttgccgaacgtgattaaaaacttcagcggtttcgcgccgctgggggcgatcctcgccctggtgctgggcgccggctttgccgagcgggtgggcctgttaccggcgttgatggtcaagatggcctcgcacgtcagcgcccgctatgccagctatatggtgctgtttatcgcctttttcagccatatctcttccgatgcggcgctggtgattatgccgccgctgggagcgctgatgtttcttgccgtcggtcggcatcctgtcgctggtctgctggcggcgatagccggcgtgggctgcggctttaccgccaatctactgattgtcaccaccgacgtgctgctctccgggatcagcaccgaggcggcaaagtccatcgatgcctctttgcacgtcagcgtgatcgacaactggtactttatggcgacctcggtgatcgttctgacgctcgtcggcggactgatcaccgataagctggtcgagccgcggctgggccagtggcaaggcagtcgtgatgaaaagctgcagacgctgacgcccggggagcggttcggcctgcgcatcgccggcgtggcgacgctggtattcgtggcggtcatcgccctgatggtggtccccgaaaacggtattcttcgcgatccggttcagcatacggtcatgccctcgccgtttatcaaaggcatcgtgccgctaattatctttttcttctttgtcgtgtcgctggcatacggcatcgccaccggcaaaattcgccgccaggccgacctgccgcagttgatgattgagccgatgaaagagatggccgggtttatcgtgatggtcttcccgctggcgcagttcgtggcgatgttcaactggagcaacatgggcaagtttatggccgtcgggctgacggacctgctggagagttcaggcatgaacggtgttccggcgtttgtcggccttgcgctgctgtcggcttttctgtgtatgtttatcgccagcggctcggccatctggtcgattctggcgccgatcttcgtgccaatgtttatgctgttgggctttcacccggcgtttgcgcagatcctgtttcgtatcgctgattcatcggtgctgccgctggcgccggtgtcaccgtttgtgccgttgtttctcggctttctacagcgctaccggccggatgcccgcctcggcacctactactcgctggtgctcccttacccgctgatttttctcgccgtctggctgctgttgctggtgggctggtatctggtgggactgccgatcggccctggcatctatccgcggctgtcttaacccaccgatgcgccagggacggccgccttagcttaacgcgatatcttcactttgaacttacgggtcgcttccccggctccggcgaatatgccgaaaagcgcgcgatatcctcgctcaagcaacagcgacataccatgaataaccagaccgctgaagatcagtacgattacgccagtcagtatatattgcatagctccacctctgagttattaaccgcgccgcgccgacgcggtagcactttcccgagcgcgcacagcggcgcggaggaccgacgtcgtcagcttaaaagtagcaaaaaccctgtccggtaacccgccaggatcgatccaaaaataaatcatcgtggcgatcgcagaatgcctccacggcggatagcccgccgtgctatctggcgatgcggttttaccttttgggagtatagttgactgccgtcagcgcgtggtatcgtgtgcctctcatgtacgatggtggatgacagaaacgatgttgaccttgctgcaggataaaatggataccccgctggggccgttgtgggtgctttgcgacgaacagtttaatttgcgcgctgtcgagtgggacgagcaccgcgatcggatggaaacgctgctcgacgtacactatcgccgggaaggctatcagcgcgtcgactgccgcaatcccggcggtctcagcagtaagctgagcgactattttgccggcgatttagccattatcgagactctgcctaccgccaccgccggcaccccttttcagcgccaggtctggcaggcgttacgcgatatcccctgtggccaggtgatgcactacggccaactggccgaggcgctcggtcgtcccggcgccgcgcgcgcggtgggcgccgccaatggcgccaatccggtgagtatcgtggtgccctgccatcgggtcatcgggcgcaacggcaccatgaccggctatgccggcggcgtacagcgtaaagagtggcttttgcgtcatgagggctatctgttgctttgactgaaaatgccttttctggaattttcaggtaattttacaatcaaaagtggcgtaataatctgtttttaatcaaatagatacacagtcgatttgatttaccctgctgatattacgtgtttccgggcctgaagacttacctgctgatcaaaaagatgttaaaattgaccaatatcaattaaggcctgagcagacatatgatccctgagaagcgaattattcgacgcattcagtctggcggttgtgcaatccattgtcaggattgcagcattagccagctctgcatcccctttactctgaacgagcatgagcttgatcagctggataatattatcgagcggaaaaagcctatccagaaaggtcaaaccttgttcaaagccggtgatgagctgaagtcgttgtacgctattcgctccgggaccatcaaaagctataccatcaccgagcaaggtgatgagcagatcactggcttccatctggcgggcgacctggtgggctttgacgccatcggcaccggtctgcacccgagctttgcgcaggcgctggaaacctcaatggtctgcgagatccccttcgaaactcttgacgatctttccggaaaaatgcccaatctgcgtcagcagatgatgcgcctgatgagcggtgagattaaaggcgaccaggatatgatcctgttgctttccaaaaagaatgccgaagagcgcctggccgcgtttatctataacctttctcgtcgtttcgcccagcgcggcttctcaccacgtgagttccggctgaccatgacccgcggcgatattggcaactatctcggcctcaccgtcgaaaccatcagccgtctgctgggccgttttcagaaaagcggcatgctggcggtgaaaggcaaatatatcactattgaaaacagcgatctgctggcccagctggccgggcaggcgcgcaacgtcgcttaatctctgcgcaatccctggtcacgatcggcaattttttcagatttgttgatctgaccaggctcctcccctgtttcaattcatccatataggttatctttttaataactgacggtagctgcagttgtaaggagaccctgtatggcgaagtatcagagcatgctggtagtaatcgatcctaaccaggacgaccagccggcgctaaggcgagcggtgtacctgcaccaacggattggtggacgcatcaaagcctttttgccgatctatgatttttcctatgaaatgaccaccctgctgtcgccggacgagcggacggcaatgcgccagggcgtcattgcccaacgaacggcctggatccgcgagcaggcgaaattctacctggaatcgggcgtgccgattgacgtgaaagtggtgtggcacaaccgccccttcgaagcgattattcaggaggtggtcagtgagaaacacgatctgctgctgaagatggcccaccagcacgacaaactggaggcggtgatctttaccccgacggactggcatctgctgcgtaaatgcccttgcccggtgtggatggtcaaagaccagccgtggccggaaggcggcaaagcgctggtcgccgtcaatctcgccagcgaagagaattatcacaacacccttaacgagaagctggttcgcgagacgctgtcgctggcggaagaagtcaaccacactgaagtgcacctgatcggtgcctacccggtgacgccgatcaatatcgcgatagaactgccggattttgatcccagcgtctacaacgacgcgatccgcggccagcatctgctggcgatgaaagcgctgcggcagaagtttggcatcgatgaaaaattcacccacgtcgaaaaaggactgcctgaagaggtgatcccggacctcgccgagcatctgcaggcggggatcgtggtgctgggaacggtcggacgtaccggcctgtcggcggcgttcctcggcaataccgcggaacaggttgtcgaccacctgcgctgtgacctgctggtgctgaaaccggaggcctaccagacgccggtggaactggacgacgacgacgacgattaaccgccaccgctcatcttcccccgccgcgcgggggatttttttgcttgctgccagccaggcacaaaaaaagggccgttggcggcccctgtcgctgtccagcgagaatggcttagtggatacccagacgccaggccagatcgatctcttctttcagctccagcgaggagagcgccatcaggtcagcaaactccagctccagcagtttaagttttttcagatactgcgctggggtcatgacggtggggtcgcggcgtaagaattcgatggccatctgcgttggggttaactcggtatccataatatcctctgtctgatgtaagaaccggaacattatatcacctcttaccgcttattttatgaacaattccaggcatccccctgcatataaaaaagccgtctcacaggagacggcttataaacaaacgttgtaaaacaattatgttacattacagcgctttcaggatcgcatcgacgctggctttagcatcgccaaacagcatatgagtgttctctttaaagaacagcgggttctgtacgccggcgtaaccggtgttcattgaacgcttaaagaccaccacattctgcgctttccacacctcgagcaccggcatgccggcgatcgggctcttcggatcgtcctgcgccgccgggttgacggtatcgttggcgccgatcaccagcacggtgtcggtgtcgctgaaatcgtcgttgatctcatccatctccagcacgatgtcgtaaggcactttggcttccgccagcaggacgttcatatgccccggcaggcgcccggccaccggatgaataccaaagcgtactttgataccccgcgcccgcagcttctcggtaatttctgctaccggatactgcgcctgagccaccgccataccgtagcccggggtgatgatcaccgagtgcgagtttttcagcatctccgccgtctcttcggcgctaatctcgcgatgctcgcccacttcttcatcgccgccgctggaggaaccatcggtgccgaagcccccggcgatcacgctgataaaggagcggttcatcgccttacacataatgtaagagaggatggcgccggaagagcccaccagcgcgccggtgacgatcagcaggtcattactcagcataaagcccgccgccgctgccgcccagcccgagtaggagttgagcatcgagaccaccaccggcatgtccgcaccgccgatagaggccaccaggtgccagccaaaggccagcgcgatcgcggtcatcaccagcaggcacaggacctgggtgccggtgctgtcagagcgaacaaaaatcaccatcaggatgaaggaaaccaccagcgccgccaggttcagcttatggcgattgggcagcatcagcggcctggaggaaattttgccgcgcagtttaccaaacgccaccaccgaaccggtgaaggtcaccgcgccgatgaagatcccgaggaacacttcggtcaaatgaatattgaccagaatttgctccataccggtttcatgctgcaggtagctgttgaaacccaccagcaccgctgccagccccacgaagctgtgcaggatagccaccagctccggcatctcggtcatctcgaccttcttcgccagacgaataccgatcgccccgccgatcaccatcgcaagaataatccagccgacgttgccggcgtccggccccaggatggtagcgatcagggcaatggccatcccggcgatgccgaaatagttgccctgctgcgacgtttcgtgtttcgacaggcccgccaggctgaaaataaacaggattgcagcaacaatgtatgcagccgttactaatccaccagacatgtgctaccccttatcctttgcgaaacattttcagcatgcgctgagtcacggtaaaaccaccgaaaatattaatgctggcgatcagcaccgcgataaagctcaggaagctgacccagccgccgtggcctatctgcaacaacgcgccaaccacgataatgcccgaaatggcattggtcaccgacatcagcggcgtatgcagcgcatgggagacgttccacaccacgtagtaacccaccacgcaggccagcgcgaagacggtgaaatggccgaggaactcttttggcgccacgttggccagccagccgaagagaataatcgccagcgccatcagcgcatatttgcgccacggcgacgccggtttcaccgcttctttcggcgcttccacttttttcgccgcggcctgcggctgagcggagacctgaatcggcggcgccggccaggtgatttcaccttcgcgaacaacggtcacgccgcgcactaccacgtcatcgaaatcgataacgatattgccgtctttctctttgcacagcagcttcagcaggttcaccaggttggtgccgtagagctgggaggactgggtcggcagacggccaggaagatcggtgtaaccgatgattttcacgccgttggcggtggtcaccacttcgcccggtacggtgtactcacagttgccgccgttttgcgaggccagatcgaccaccacgctgcccgatttcatggagtcgaccatttcgcgggtgatcagcttcggcgccggtttgcccgggattaacgccgtggtgacaatgatatcgacctctttcgcctgcgcggcgaacagcgccatttcagccttaataaaggcctcagacatcaccttggcgtagccatcgccgctgcccgcttcctctttaaagtccagctcgaggaactcggcgcccatactctgcacctgctccttcacttccggacgggtatcgaaggcgcgaacaatagcgcccaggctgttggcggcgccaatcgccgccagaccggctaccccggcgccaatgaccatcaccttggcgggcggaaccttgcctgccgccgtaatctgcccggtaaagaatcgaccaaattcatgcgccgcttcaacgatagcgcggtacccggcgatgttggccattgagctgagcgcatccagcgactgggcgcgggaaatacgcggcacggaatccatcgccattacgttgatattacgggccgccagtttttccatcagctgcgggttttgcgccggccagataaaactaatcagcgtggtccccggattcagcagggcaatttcatcgtcattcggagcattgaccttaaggatgacatcagactgccatacctcgtcgccggtcacgatttcagctcctgcctcggcaaaggcctcatcgtcaaagctggccagcttcccggcgccgctttctaccgcgacgctaaagccgagtttgagcaattgctcaacggtcttcggcgtggcggcggcccgggtctcctgggctagcctttcttgtggtacaccaatacgcatagttttcccttccatcggtttttgatgatggtttacttttctgcccaacaacgccaggacggcaaaatcttcgtcgccatctttcgctgtctacaaaatgaaacagtaacaaactttttataacctactgaaaataccgattgtgatctactgcgataaaacacaaattttgattttattgcttattgtcagctcagatgggtccgggcagcaatatttacctgaatttgccgctcaggcctgataatccgcttatcctgcggtataaaacgccatttatcgccattgagatcattgtgttaacattacattaactaataaaagtggtattgattatcgtttttgctggtcaagcgcctgttttttcaacatatcgaaaaatgttatctttccgtagtatacgattcgggcggcaagcaaaaattgacgcagacagtcacggcgattaaatgcaataatcaaacgttttcagtcaacaacaacaccagtatatggtttgcgcaaggcaaaggattatttttatgaagcttaaaaacaccctcctggcgtctgctctcctgacaaccgccacgttgtctgcccatgcagcgaccgagttgaccccggagcaggcggctgcgctgaagccctacgatcgcgttgtcgtcaccggccggtttaatgccattggcgatgcggtacaggcagtatcgcgcaaagccgacaaagacggcgcggcctcattctatgttgtcgacacgtcggactacggcaatggcggcaactggcgcgtcacggctgacctttataaagaagacgcgccgaaagcggatgcgccgaagaatcgcattatcaatggcgtgatggagttgccgaaagatcaggccgttgagctgatgccttacgacaccgtcaccgttcagggcttctatcgcagccagccggaagtcaacgacgccatcaccaaagcggcgaaagcaaaaggcgcctatgcgttctttatcgtccgccaggttgacgccaaccagggcggcaaccagcgcattaccgcttatatctacaaaaaagatgctgaaaaacgcgtgctgcagagcccggacgctatcccggctgactctgaagctggccgcgcagcgctggccaaaggcggcgaagcggcgaagaacgtggaaattccgggcgttgccaccaccgccgcggtgggttcgggtaccggcgttgggcgtttctttgagactcagtcttcgaaaggtggacgttacactgtcactctgccgaacggcactaaggtcgaagaagtgaacaaagtgactgcggcgcaaatggtgccgttcgataacatccagttcaccggcaactacggcaacatgacggaaatctcctatcagacggcgaaacgcgcggcgaagaaaggggcgaagtactaccacatcacccgccagtggcaggaacgcggcggcaacatcaccatcagcgccgatttgtacaaataatcgctgctggctggctaaaaaggcggcgcattgccgccttttcattttttttcatcccccgccattgcatggcccccggacactccgtaaaatcccgcgccttagcgcaatcctccatttttatgcgatttcgcaaaataaatattctggaacagccattttcacctcgggaatgcaatggaaaagaaactgggcctgagcgccctgaccgccctggtccttagctcaatgctcggcgctggcgtattcagtttgccgcaaaatatggctgccgtggccagcccctccgctctgctcattggctgggccatcaccggcgtcgggatcctgtttctcgctttcgccatgctgctgttgacccgtattcgtcccgacctcgacggcgggatcttcacctacgctcgcgaaggattcggcgaactgatcggcttctgctccgcctggggatactggctgtgcgcggtgatcgccaatgtctcctatcaggttatcgtcttttcggcgctcagttttttcaccgatacccctgagctgcgcctgtttggcgatggtaatacctggcagtctatcgttggcgcgtcggttctgctgtgggtcgtccactttctggtcctgcgcggtgtccagacggcagcggggattaacctggtggccaccctcgccaagcttctgccgctgggcgcctttgtcgcgctcgccgccctggcctttcagctggatacgttccgcctcgattttagcggcctggcgctgggcgtgccggtatgggaacaggtcaaaaacaccatgctgatcaccctgtgggtgtttatcggcgtggagggggcggtagtcgtgtccgcgcgggcgcgacacaagcgcgacgttggccgcgcgacgctgctggcggtgctgtcagccctcgcggtgtatctgctggtcaccctgctgtcgctgggcgttgtgccgcgcagcgaactggccgaaatgcgcaacccgtcgatggcgggactgatggtcaggctgatggggtcgtggggggagatcgtcattgccgccgggctgatcgtgtcggtgtgcggcgcttatctcagctggaccatcatggccgcggaggtgcctttcctcgccgccactcataaagccttcccgcgcctgtttgcccgtcagaatagcaacaacgccccctccgcctcattgtggttgaccaatatcagcgttcaggtatcgctggtgctgatctggctgaccggatcggactacggcacgctgctgaccattgcctccgagatgattctcgtgccctatctgctggtcggcgcctttctgctgaaaatcgccactcgcccgctgcataaagcggtggctatcggcgcctgtatttatggcatatggttattatacgcgtcggggcctgtgcatttgctgttgtcggtggtactttacgctccgggtcttctggtctttttgtacgcccgacgtacgcaccagcacgatcgttcgctcaaacgccgcgaagtggcgctaattggtttattgctggttgccgctttgccggcaacgtggatgctggtggggtaagcggtcgccctgccgcagaacgcataggagatacccatggctgaacaacagccccgcccgattctgatcacaggagcaggccgccgcatcggcctcgctctggcacaccattttctgcagcagcgccagccggttatcgtcagctatcgtacgccctatccggcgattgacggcctgcgcgaagcgggcgcgctctgcctgcaggccgattttagcagcgatgacggcattctgaccttcgctgaagcggtcaaatcacacaccgacggtctgcgcgccatcatccataacgccagcgactggatggcggaaaagccgggcgtcccgctgagcgccgtcatcaaccgcatgatgcagatccacgtccacgccccctatctgctcaaccatgcgctggaggcgttgctgcgcggccacggccatgccgccagcgacattatccatatcaccgattacgtggtggagcgcgggagcgacaaacatatcgcctatgccgccagcaaagccgccctggataacatgacccgctccttcgctcgcaagctggcgccagaggttaaggtcaacgccatcgcgccgtcgctaatcatgtttaatgagggtgacgacgaggcctatcgtcagcaggcgctggataaatcgctgatgaaaatcgcccctggcgaaaaagagattagcgatctcatcgattacctgtttaccagccgctacgttaccggccgctcattcgctgtcgacggcggccgcccgctgcgctagtggaaacggctccagccgaggattaacagccaggcgcacagcccccagcatcccactgcgcctgccagcgccaacggcaggcgcataatcccggtgaaataccacagtgacagcagatagataaaatagggaagaatcgaccacatgccgaatacgatggtcgcgcgcagggcttcgatcccccgctcgctggcgacaatataatgggcgatgagcgcaaaggtgggaaacagcgggaccaggccagcgatagcgtagtttttggttttcgccagcacgccaatcagcaccaccaccagcgctcccaacagccctttgattaacagccccatgcccgtatgccttaacagtgaatcaataagttagggcagcatagcggatttaacgctgtttataaaagagtaatggcgggtaaaataagtgcggtgtatgttacttcttttactgatgtgcaatagacatgaataaaatcgtttttgttgaggatgaccctgaggtaggcacgctgatcgccgcctatctcggcaagcatgatatggatgtggtggtcgagcctcgcggcgaccgcgctgaggaggtgatcgcgcgggagaaaccggatctggtgctgctggacattatgctgcccggcaaggacggaatgacgctctgtcgcgatctgcgcgggcaatggcaagggccgattgtcctgctgacttcgctcgacagcgatatgaaccatatcctctccctggagatgggcgccagcgattatattctgaaaaccaccccgccagcggtactcctcgcgcgactgcgtctgcatttgcgccagcatattgctccggcaggcgccggatccgcctcctcaacgctcacgccacataaaaccatctccttcggctcgctgaccattgacccggtcaaccgccaggtgctgcttggcggagaaaacgtcgccctgtcgaccgccgatttcgatctactgtgggagttggccacccacgccgggcagattatggaccgcgacgcactgctgaaaaatttacgcggcgttacctatgatgggatggatcgcagcgtcgacgtggctatctcccgcctgcgcaaaaaactgctcgacaacgccacggagccctatcgtattaagaccgttcgcaacaaaggctacctgttcgcccctcacgcctgggataactaagcggcccttctgcggccctgcgaggggcccgctcattgcgcgctcgccggcggcaaagttatcacgtttgctgcctgctgcgttcgtccctggcgcgcacattcatcaccggaacttgtcatattgactaaatcaatagaattagccgtacagaaccccatcacataactcctcaatatgattgtgctcaaggacttaccgctgccagagtggcataaagcctgaaaacacaggacttttgcatgatgaaatacgttgtacttttggcactctcactgttcacttctctctctggctgggctttttccctcgacaacgccgatattcgactcctctgtccgcagcgcgggcaaatcgaggtgatccttcatcgctatgaacatacccagcaatcctgggggcagcatcactttgaaaccggcggcggccacgttcgccaggggccgctgctggtgatcccgtttgccaacctcgatcagatgatttaccaccagaccaccggcgagtttgcttactggtatgccgaaacggaaaagctggtgcgctgtcggctgctgagtctgacgaccacctatccggtagacattccttattatcgtgagtagcgtatccatcgacgcacaaaatacgattgcccagctccccccgaggtgaagaaatcaccgcatcgagtgacaccgtcaccttttcaccgttctgtctccaggctggctattgtcagggggcataaaccctgctttgatagcgtatctatgatttccccgcgcctcgcccggggatatcgataacattgactccccgacgcgcagaagatgcccctggggcgccagacaggtttctcttgaatacgcggtaatgtaatgaaaaagctgttcgtgcagttctatcttctgctcttcgtctgctttctggtgatgaccatgctggtcggtctggtctataaatttaccgcggagcgcgccggacggcagtcgcttgacgatttgatgaaaagctcgctgtatctgatgcgcagcgagctgcgggagataccgccgcgcgactggagcaagacccttaaagagctggacctgaatttatcgtttgatctgcacatcgagccgatcagcaaatttaagctgtcggaaagctcgatgcagcacctgcgcgccggcgatatcgtcgccctcgacgatcagtacacctttattcagcgcattccccgcagccattatgtgctgtcggtgggtccggtgccctatctctattttctgcatgagatgcgcctgctggacgtggcgctgatggcgtttattgctatctcgctggcctttccggtgtttatctggatgcgcccgcactggcaggacatgctgcgcattgagacggccgcccagcgctttggcgaaggtcacctcagcgagcgcattcacttcgacagtatgtccagcttcgagcggctcggggtggcctttaaccaaatggccgataacattaatgcgcttattgccagcaaaaagcagctgattgacggcatcgcccatgaactcaggacaccgctggtacgcctgcgctaccgtctggagatgagcgagaatctcagcgaggcggaatcgcaggcgctgaaccgcgatatcggtcagctggaggcgctgattgaagagctcctgacctacgcccgcctcgaccgcccgcagacggagctcagcctgacgactcccgattttcccgcctggatcagcgatcacgtcgaggatatccagatggttaacccacagcgcgaggtcgccctggcgacgctgacccacggtaactacggcgcgctggatatgcgactgatggagcgggtgctggataatttggtcaacaacgccctgcgctacagcagccagcgggtggcggtcagcctgacgctgcagggttcgcgcgcatcgttgctggttgaggatgacggcccgggaatcgcccccgaggagcgcgagcgggtgtttgagccctttgtccgccttgaccccagccgggaccgggcgacaggaggctgcggcctcggcctggcgattgtccacagtatcgcccaggcgatgggcggcgaggtgcgctgcgaggccagccctctcggcggcgcccgcttctgctttagctggccggtctatcatcagctgcctgatttcacctctgcctgaataaaacttgcgcagaagccgcgggctgggtatgctgcaaaaatctaatagtatgttgtaactaaggtggtaataatggccagctacgacctcgttgaacgtctgaataatacctttcgccagatcgagctggagctgcaggcgctccagcaggcattaagtgactgccgtctgctggcgggccgggtatttgaactgccggcgatcggtaaggatgccgagcacgatccgctggccactattccggtggtgcagcacatcggcaagacggccctggcgcacgccctgcgccactacagccatctgtttatccagcagcaatcggaaaaccgcagcagcaaggccgccgtacgcctgccgggggctatctgcctgcaggttaccgccgcggagcagcaggatctgctggcgcgtattcagcatatcaatgccctgaaggccaccttcgagaagatcgtcaccgtcgactccggcctgccccccaccgcccgttttgagtgggtacaccgtcatttgccggggttgatcaccctaagcgcctaccgcacgctgacgcccctcgtcgacccgagcaccatccgcttcggctgggccaataagcacgtcatcaagaatctgacccgcgaccaggtgttgatgatgctggagaaaagcctgcaagcgccgcgggcggtgccgccgtggaccagggagcagtggcagagcaaactggaaagggagtatcaggatatcgccgccctgccgcagcgggcgcggctgaaaataaaacgaccggtgaaagtccagccgatcgcccgcgtctggtacgccggcgagcagaaacaggtacagtacgcctgccccagcccgctgatcgccctgatgtccggcagccggggggtcagcgtaccggatattggcgagctgctgaactatgatgccgacaatgtgcagtatcgctacaaaccggaggcgcagtcgctgagattgcttatcccgcgcctgcacctctggctggctagcgaatagccaggctgccgaccatctcttccgggcgcacccagctgtcgaattcggcttccgtcaggtagcccagcgccagcgccgaggctttgagagtcagcccctcatggtgcgcttttttagcgatttccgccgccttgtcgtagccgatatgggtattcagcgcagtaaccagcatcagcgactcattgagcaactgactgatccgctcgcgattcggttcaatacccaccgcacagtgctcgttaaagctcgccataccgtccgccagcagacgcaccgactgcaggaagttgtggatgaccatcgggcgatagacgttaagctcaaagttgccggaagcaccgccgatattcactgccacgtcgttgcccatcacctggcagcagaccatggtcagagcttcgcactgggttgggttaaccttgcccggcataatcgatgaccctggctcgttttccgggatggcgatttcaccaatgccgcagcgggggccggaggccagccagcggacatcgttagcgattttcatcagcgaggccgccaggcctttcagcgcgccgtgggcatggaccagggcatccacagtggccagcgcttcgaatttgttcggcgcggtgacaaatggctgtccgctgagcgacgccagctcggccgccacccgtacggcatattccggatgggtattcagcccggttcctaccgccgtcccgcccagcgccagctcggcaagatgcggctgactggcttcaatgtgcttcaggctatggtccagcatcgccacccagccggagatctcctggcctaaggtgagcggcgtggcgtcctgcagatgggtgcggccgatcttgacgatatccctgaaggccaccgctttttcattgagcgtcgcccgcagcgcctgcagcgacgggatcactttttcccgcagggcaatcagcgccgcgacgtgcatggcggtggggaatacatcatttgagctttggctcttattcacatcgtcattgggatgaatttttcgcgccatcccccgttctccgccgagcagttcactggcgcggttggccagcacctcgttcatattcatattgctttgggtgccggagccggtctgccagatagccagggggaactcctgcgcgtgctttccggccagcacttcgtcagcggcggcgacgatcgccccggctttctccgccgtcaacagtccgagatcctggttaaccttcgccgccgcccgcttggtcagcgccagggcgtatatcagctccccgggcattttttcggtcgagatgcggaaatgctccagcgagcgctgggtctgggcgccccagagtttatcggccgggacctcgatggcgcccatcgagtctttttcactgcgatgcgttgtcattactttctccttggatgaaaagtgcgtcatagcgacaaagctcacctgcttaaaagactaagtattggccagattgataagttgttttggtggttcgtgccgcgaagcgacataaaaaaagccgccccgaggggcggcccagaccgctgacaaaatgcaatcgtcgggattgcccggcggcgctacgcttgcgcgagcctacagagaactgcataacttattgatattgctgtttttcgtaggccgggtaaggcgaaagccgctacccggcagaaaggcgctcaccctaacgaaatcaggtttgtcatcgaccagcgccgccccgaagggcggcctgggttacttcacgcagcgggcgcactgcgaggtctggatctgctggaagaagtcattgcctttatcatcaacgaggataaaggccgggaaatcctccacttcaattttccagatagcctccatacccagctccggataggccacgcactcgaggctcttgatgctctgctgggccagcactgccgccgggccgccgatgctgccgaggtagaagccgccgtgtttgtggcaggcgtcggtgacctgctggctgcggttgcctttcgccagcatgatcttgctcgccccatgggactgcagcagatcaacgtaagagtccatgcggcctgcggtagtcggccccaaagagccggaggcgtaaccgtccggcgtcttggccggacctgcgtagtagatcgggtgatctttgacgtactgcggcagcgcctcgccgttgtcgataagctccttcagcttagcgtgggcgatatcgcgggcgacgatgatagtcccgctcagcgacaggcgggtggacaccggatactgcgacagctgcgccaggatctcgctcatcggctggttaagatttaccttcaccgcttcgccttccccggcctggcgcagatgctcagggatatatttccccgggttgctctccagcttctcgatccagatgccgtcgcggttaattttggctttgatgttgcggtcggcggaacaggaaacccccatccctaccgggcaggaagcgccgtgacgcggcagacggatcacgcggatatcgtgggcaaagtatttgccgccgaactgcgcgccgagaccaaggttctgcgcctccagcagcagctcctgctccagctgcacgtcgcggaacgcctggccgtgctcgttaccttcggtcggcaggccatcgtagtatttggtggacgccagcttcacggtcttcagcgtcgcttccgccgaggtaccgccgatcacgaaggcgatatggtacggtggacaggcggcagtaccgagggtgcgcatcttctcgacgaggtaatttttcagcttcgccggggtgatcagcgctttggtttcctggtacagataggttttgttcgccgagccgccgcccttggcgatgcagaggaatttgtactcatcgccatcggtagcatagagatcgatctgcgccggcaggttggtgccagtgttaacctctttatacatatccagcggcgcgttctgcgagtagcgcaggttgtcctggatataggtgttgtacaccccctgcgccagggcggcttcatcgccgccgccggtccacacgcgctggccttttttacccatgatgatcgcggtgccggtgtcctggcaggtgggcagaatacctttggcggcgatatccgagttgcgcaggaactgcagcgcgacgtatttatcgttttcgctggcttccggatcgttaaggatatccgccacctgctgctgatgcgcagggcgaagcataaaggaggcgtcgtggaaagcatgctgcgccagaagggtcagcgcctgagggtcaacttttagcacttcctggccggcgaattcggcgacggagacgtaatcactgctgaggagataatactcggtgtcatcctttttgagcggaaaaggatcctggtaaacaaacggtttattcgacattgtactctcacttactgctttggctgattatgtttcaggcagggactccatgtgcctgtagaaaagcgagtcgaacaatcttacacaattttttaacaaaaactgagacaaggacgactttttctttcagcagttgcttctccaccgtttgctggtttaatagggcgataaaatttactttgtttgaaacagggattgagaatgcaaaagctgattaacgccgtgcagaactatgcatggggaagccacaccgccttaaccgaactctatggcatcgccaacccggacaatctgccgatggcagagctgtggatgggggcgcatccgaagagcagttcgcagatcctggcggccgacggccagccgcgttcgctgcgcgaggtgattgacgcggataaagccgctctgctcggcgacaaggttgccgcccgctttggtgaactgccgttcctgtttaaggtactgtgcgccgctcagccgctctcaattcaggtgcatcccaacaagcaggcctcggaagaaggtttcgcccgcgagaacgccgccggtatcccgctctccgccgccgagcgtaactacaaagatccgaaccacaaaccggagctggtttttgccctgacgccgttcctggcgatgaatgcatttcgcgagttcagcgagattgtcaccctgctgcagccggtggctagcgcgcatccggcaatcggcgccttcctgcagcagccggacgcgactcacctgagccagctgtttgccagcctgctaaatatgcagggtgaggaaaaggccaaggcgctgcaggtgctgcgcgacgtactggcccgtgaacaaggcgaaccgtggcagacaatccgcctgatcgcggaattctatccggacgacagcggcctcttctccccgctgctgctgaacgtagtgaagctgaacccaggcgaagcgatgttcctgtttgctgaaacgccgcacgcctatctgcagggggtggcgctggaggtgatggccaactcggataacgtactgcgcgccggcctgacgccgaaatacattgatattcctgagctggttgctaacgtcaagttcgaggctaaaccggcgggtgagctgttgacccagccgcagcgtcacggcgcggaactcgacttcccgatcccggtggaagattttgccttctccctgcatgacctctccgccgaggccagcgatctggcccaggcaagcgcggcgatcgtgttctgcgtcgacggcgaagccgtactgcgcaaaggcgaccagagcctgaccctcaagccgggcgagtcggccttcgtggccgccagtgaatcgccggtgcaggtcagcggccgcggccgcgtggcgcgcgttttcaataagctccagtaagcgactgccccttcaggtcgcgcttactgttggtgataactcagccaggcggtctctccgcctggcttcatttatggataaatgctatgaaaaaatcgctggtcgcagcaggagtcatcgtggcgctgggcgtggtatggacaggcggcgcctggttcactggtaaacagctggaaggccggatcgccgatatggtgcagcaggcaaacgcccagctgcgcagcagcgcgccggagtcaggtctggagctgagctatcaggactaccagcgcgggctgttcagcagccatctgcagctggtggtgaagccgatcgccggtcaggctaacggctggctggccgccgggcagagcgtggtgcttgacgaagtggtcgatcatggccccttcccgctggcctcgttaaaagcctttaatctggcgccggcaatggcttccgtccacaccacgctggtgaaaaacgacgccagccaggcgctgttcgagatagccaaaggcgacaccccctttaccgtcgatacgcgcattgcctacagcggcgacagccagtcggctatcgtccttaacgccctcgactacgctaaaggcgatgagaaagtcaccttcagcggcggtcagttccagctcgacgccgaccgcgacggcaaaaacatcagcctgaagggccaggccggcagcgggcagatcgatgcgctcaacgaatataatcagaaggtacagctgcgcttcgtcaacctgaccaccgacggcgccaccgagctggccagcttcaacgaacgtatcggccagcaaaaaatgaccctcgataaactggccatcagcgtcgaaggcaaagagctggcgctgatcgacggcatggcgctggacggcggctcgacgctgacccaggacggcaaaggcgtgaacagccaggtgaactacaccgtcaacagcctcaagctgcaggggcaggatatgggcagcggcaaactcacgctgaaagtggataacgtcgacggtcaggcgtggcaccagttcagtcagcagtacagcgcgcagtctcaggcgctgctggcgaaaccggagctggcgcagaatccggagctgtatcagcaggccctcaccgaaacgctgttcaatgcgctgccgatcctgctcaaaggcaacccgtcggtgaccatctctccgctgagctggcgcaatgccaaaggcgaaagcaccctcaacctctcggttctgctgaaagatccggcccaggtgaccgctccgccgcagaccctggcggacagcctggatcgcgtggtgcagtccctggacggcaaagtggtgatcccagtggatatggcgacggagtttatgactaagatcgccggtctggaaggctatcagccggccgatgccgccaaactcgccgatcagcaggtcaaaggcctggcggcgatgggccagatgttccgcattaccaccatggaagataacgccatcagcagcagtctgcagtacgcgaacggccaggtgacgctgaacggacagaaaatgccgctgcaagactttgccgcgatgtttggtctggaagcgccttcgctgccggacagcgcgccgcaggaaggccagccgcagcaggatgacgccgctcctcagcaggacgacgccgccccgcagccgtaacttatcggtacaggagacggccagcgcgcgccgtctccctcattttcgcgtcaccagccgcgggggcataatctggtttcgcgtctcgccagtcccctcttccagccgccgcagcatcgaatccgccaggcttttccccatctcccgcgccggggtggtcacccaggtgagaggcaggtcgtcgagggcggcctccggcacgtcggcaaacgccgccagcgccacccgctgctcaaagtagctctcgacgccatcttccccgctctgtcttccagcccgtaacagaccgaaccacgcgccggtggctaccacgttgttgtagcacagcaccgcggtgatggtcggattctggcgcagcaggccggtcatcgcctccgccgcctgcttctggctggactcgcactccagcacccattcgctgtgaaacggcaggccgtatttcagcaaggtggcgcaatagccgccgacccgctcggcgcgcgtcagcgaagcactctgcccgccgagccaggcgatccgctgatggccgcggcggataagatgctccgtcaccagctgcgccgcctgcatgttgtccgggcggatcaggtcgacatcgtcaagatagctggcgcgggaagcaaacaccagcggcacccccgcctccgccgcacgctcgcgcagctcgctcccgcggtcgatcgccccggcgataatcaccccgtccaccccctgcgccgccagcgtatcaaaccgctgggccatcttctcgccgctgcggcctccctgggtgagaaataccattttcccctgcctctccagggcatcggtgaggccggcggttaattcagcataaaacggttttgacaggtcgctgacgataaggccaatcaccccgctctgcccaccgcgcagcgaggccgcctgacgattgcgcacaaatcccagctgttcgatagcctgattaacccgctcgccggtggcgctggagatgcgccctttgccgctcagtaccagtgaaacggtactcacggagacgccggcagccagcgccacatcattgatggtgatcttttttgcgatagccataacctgctggctgactcccttgcctgtcgataaatcgttttatcattgtgcgatctttataaaccttattatcgcttgaatatgtgatttttatcgcactaaaaagtgataaaacgttttatcttgccgtggcattagttctcccgaccacttatgaatcaggaaccgtgctatgacggcgaaaacagcaccaaaaatcaccttatgggaatttttccagcagctgggaaaaaccttcatgctgcccgtagcgttgctctcgttttgcgggatcatgctggggatcggcagctcgctaagcagtcacgatgttttgactctgctgccgtggctggatatgccgctgctgcaggccatctttatctggatgagcaaggtcggctcctttgccttcagcttcctgccggtcatgttttgtatcgccatcccgctgggtctggcgcgagagaacaaaggcgtcgccgccttcgccggcttcgttggctacgcggtcatgaacctggcggtcaacttctggctgaccgcgaagggtattctgcccaccaccgacgccgcgatcctgaaggccaacaatatccagaacattatcggcattccgtcaatcgataccgggatcctcggggcggtgatcgccgggattatcgtctggctgctgcatgaacgcttccataacattcgcctgccggacgccctggccttcttcggcggcacccgcttcgtgccgatcgtcaccaccgtggtgctggggctggtcgggctggcgatcccgctggtgtggccagtcttcgctatggggatcaacgccctcgggaagatgatcaacagcgccggggatttggggccgatgatcttcggcaccggcgagcgactgctgctgccgtttggcctgcaccatattctggtggcgctgatccgctttaccgaagccggcggcactctcgacgtctgcggccacagcgtcagcggcgcgctgaccatcttccaggcgcagctgagctgtccgacgacccacggcttcgccgaaagcgccacccgtttcctgtcgcagggtaaaatgccggcattcctcggcggcctgccgggagccgcgctggcgatgtaccactgcgcccgtccggaaaaccgacataaaattaaaggcctgctgatctccggggtcatcgcctgcgtggtcggcggcaccaccgagccgctggagttcttgttcttgtttgtcgcgccggtcctgtatgtcatccacgcgctgctgaccggtctcggctttaccatcatggcggtgctcggggtaaccatcggcaacaccgacggcaatatcatcgacttcgtggtgtttggcattctgcatggcctggcgaccaagtggtatctggtgccggtagtggcggctatctggttcgcggtctactatgccatcttccgcttcgccatcacccgcttcaatctgaaaacgccgggccgcgacatcgacactgccgccagcgtggagaaagccgtcgccggtaccatcggcaaatccgggtataacgtaccggcgattctggcggcgctcggcggcgcagagaacattgtttcgctggataactgcattacccgtctgcgcctgtcggtgcacgatatgagcaaagtggacgccgccgcgctgaaagcccatcgcgccatcggggtggtacagctcaaccagcataatctgcaggtggttattggcccgcaggtacagtcggtaaaagatgagatggccacgctgatgaataccgtgcaggcctgatcccactagtccccctccgctacggagggggcgctcgctaaggaagctccaatgtttgattttgccacccctatcgatcgccacggcacctggtgcacgcaatgggactatgtcgccgaccggtttggcgccgccgatctgctgccgttcactatttccgatatggatttcgccaccgcgccctgtattctcgacgccgtcagccagcggctggcccacggggtgttcggctacagccgctggcgcaacgaggcgtttctcggggcgattgcccactggtacgccagccgctttaacagcgacatcgatccgcaatctgtggtctacggaccgtcggttatctatatggtggcggaaaccatccgccagtggtcgaaagaaggcgacggcgtcgtggtccacacccctgcctacgatgcgttctataacaccatcaccgctaaccggcggcggattgccccggtgccattgatcctgaaggataatcggtggcgctgcgatatggaccgcctggaggcggcgctggcggagccaaagaataccctgctgctgctgtgcagcccgcacaacccaacggggaaagtctggcgtcgcgaggagctggagaccatggcggccctgtgtcaaaaacatggcgtcagggtgattagcgacgaaattcatatggacatgacctggagcgaacaccgccatatcccgtggagcgaggtcgctcagggaccatgggcgttgttcacctccggttcgaagagcttcaatattccggcctttaccggggcctacggctttatccccgaagagaacgagcgcgacagctacctgcaggcgctaaagggtcgcgacgggctctcttccccttccgtgccggcgctggtcgcccatatcgccgcctaccgcgacggggctccctggctcgatgccctgcgcgactacctgcaggcgaatatgcgctatgtcgccgacacgctcaacaacgccttccccgcgctcggccggcagccgccggaggccacctacctggcatggatcgacctgcgcccgctcaacgttgacgatcgcgcgctacagcaggcgctgatcgccgaacagaaggtggcgattatgccgggttatacctatggtcctgagggcaacggctttctgcgactcaacgtcggctgcccgcgcgagaagctggaacgcggtgtcgaaggactgattgccgccctgcgcagcctcagctgattcgacgcgcaatctacaggtcatcgcgccggcgaaacgccaggtaaccggcgccgagggtaaagacagcgacaatcaccaccagcaggataaacccgtggtggttgcttgccagcgggatcccaccgacgttcatgccgaagaaaccggcgacgatgttaatcggcagcgcgaggacggtgatcaccgtcagggtatagagggtgcgattgctctgctccagctggcgggcgccaatctcctcctgcagcagactgatgcgctcgatcaggcccgacagatcgttaagcaccacgctaaactcttcggtgaactgacgaaacgcctgcaccaccgcgcgatccatccacgccggcggccggttaagcagccggaacatcgccgccggctccggcgccagcagccgctggaagcgtaaaagcatccgccgtagccgcgccagatcggcccggttgcgctgcacgtgattgctcagaagacgctcttcaataaggtcaacatggcggctggcctggcggacgacctgctccagcacctcctcctgctcctccagcagaaaggccagcagctcagtagacgtgttcaccctgagcgtctgcaagcgcggcagcatccattcgataaaccgcaacggtttgaagcgcgccgtcaccaccagcctggggctacagtagagccacagcgtggcggtttccgcgctggtatcctgcggacgaaacagcacatcgttaagcacagcgaacagattttccccctgtcgctcaatgcgggtggtgtgcgagccgctgcggatctcctcgaagaaaaaatcggccaccggaaagtggctggttaaccatttctcggcggtggcgtgattaagattcaggtgtaaccagataaacgccttgtcatcggcgagcgcctgatagcgggcgcatacctcgccagaggcgatcggctgcggggggcgctgttcatgaaacaaatagccatgcaccaggccggaaacttcactatcaaaatcgggctttaacatcttcgcggtgacgtcttgactcatggctccctcaggacaggcactggcaccgttgatgcccgaatattgccatctttcgctattttccgcgggctggcaaggttaataatctggtcataaaacagtaacctggctgacatatgacggccagtatcacgcttcatcccctcgccgcgcaggcgatgcgatggaggcgaacagaaggtcttcttgcctttatgctcaggtggttattaaaataaatttgattatcctcaaaacttttttaggcagaaagcggtattaatttgcgcgcttaatcattgctttcacccaggtttattgaggaggagaccatgaaaacctatgaccgtaatcgtaacgctattgctaccggcagcatggtaatgatcgccggtaacgggacgacgggcgtgattaaagctatccatggcgaggggaaaaccgctgagcagttgcgccgggcggactgcgttgaaatcgacggctgcgagggccgcttctgcccgttggatctgatccgtctcggctttcattaattcctgccgccaggtcgttagtatcaggccacctgtggtggcctgctcttttcccgggaaataaagcgtctagcgaaagctccactgaacactcatcacaaagatcgccggcacaataatgccgccttccacaccgaaataatcggtgaaattatattgcaggccatgatagaggtagggcgaaaaaccgatgccggtgatttttttggcggtgcggtaggtgccggaatccccacagtggctgaaggcatcaaagaaaaattccccggtataggcatacacccctttcagtacccagccggtatcgtttttcagccagtcgcggcgcacgccgagagtcaggcagcgatcgtcaaagctgtttttcatcgttccgaccagcacgctgtattttgaatcctgagaaaacttgcgctccaccgagaaaaagttgttattgaaatgttcgttatattgtccgtggttacccgtcatatgatagacataggaaccggtattcatcgaatagaggtttaattccccggcctgcgccgacggcatggcaaccattagtagcgctgataacaaaatccataatttatttaccattcagtaacctatgccatacccgtaaaaagaacccggcatgctagcaccgcttagctaaaccaaagggcaatcagataaaccgacgctcttcgcggcgggaaaatatgacgctatctgcactatagcagtcgccctctcgcctggtgagcgcctgcggttatactggagaaacatttctctaatcgttaaggaccgctgtgttagccactctcctcgttgcgctggtcgctattattcatctcgccatcctggtgctggagatgtttctctgggaagcccccgccgggcgccgggcctttaacctcagcgccgatttcgcccggcagacccgggtgctggcggccaaccagggcttgtataacggctttctggccgccggcctggcatgggggctgtggctgggggcgccgggggtacaggtggttatctttttcctggcctgcgtgctggccgccgggattttcggcgcgctgaccgccagccgcaaaattctctatattcaggcgctgcccgcgctgctggcgctggttgccgtgctgacgcaagcgtagggccttgatccaaaacagagaaagcaggcgctaaggcgggtactatttgccccctttggtcggtcatcgaccgttaataccttctgagttcagaggcatttttatgacatggcaatccttcaaacaggcctggcttatccggttctggtctcctgtcccggcggtcattgccgcgggcattctctctacctactattttggcatcaccggcaccttctgggcggtgaccggcgaattcacccgctggggtggtcagctgctgcagctgctgggcgtccacagcgaacagtggggctattaccagctgatacatctcgaagggtcgccgctgacccgcatcgatggcaggatgatcatcggcatgttcggcggctgcctggccgccgcgctgtgggcgaataacgtcaaactgcgcctgccacgcagccggatccgcattgcgcaggccgtggcgggcggcatcatcgccgggttcggcgcacggctggcgatgggctgcaacctggcggccttcttcaccggcattccgcagttctccctgcacgcctggctgtttgccatcgccaccgccatcggctcctggtttggcgcccgcttcacgctgctgcccctttttcgcatcccggtaaaaatgcaaaaagtgtccgccgcctcgcccttaacccaaaaaccgcagcaggcgcgccgccgtttccgccaggggatggtggtctttttcgccatgatcggctggggcctgctcaccgccgcagaccacccggcgctcggcctggcgatgctgtttggcattgcctttggcctgcttattgagcgcgcgcagatctgctttacctccgcctttcgcgatatgtggatcaccggccggacggtgatggcgaaggcgattatcttcggcatggcggcgagcgccatcggtatcttcagctatgtgcaattggggatggcgccgaaaattatgtgggccggtcctaatgcggcgattggcgggctactatttggctttggcatcgtgctggccggcggctgtgagaccggctggatgtaccgggcggtggagggccaggttcactactggtgggttgggctgggcaacgtcatcggctcaacgctgctcgcctggtgctgggacgatatcgccgccccgctcgccacccactggcagaaagtcaacctgctgaacgccttcggtccctttggcggactactggccacctatctactgctgctgatcgccctgctgctggtgatcgcctgggagagacattttttccgccgccaggcggcggtccggaccgtgaaggagagcgcatgaaaaacatcatccctgattatcgcctggatatggtcggcgaaccctgcccgtatccggcggtcgctaccctggaggcaatgccttccctgcaaaaaggcgagatcctcgaagtggtcagcgactgtccgcagtcgatcaataacattccgcttgatgcaaggaaccacggctacacggtgctggatattcaacaggatggcccaaccattcgctatttgattcagaagtagcgccgttttcccgccggcggccttccccgccggcgcttgtctcctcgttcccgcctcgccgttcgcttacgcatcgctgaccaggtagccaaacgattgcaatagattgtaacacttgaaaccgtgttccagttacgcaataaccattaatataacgcgcctatattattaaaatgcgaataagttatttagtgaatggtttctgccgctatcggccaaagccgcacacagcgacacgataaggatcgaaatggaactgctggtcaggctgggtcatttttttgagcaagcgcgttctgacgccgactatgccaccttcgccaatgaactgcgtcggcatcaggtctcctactacatctattttgtctccaccggcaatatgaatttcgtaatggcaaacgacgaggtggtctcggtaaaaagcgcccgcgggctgctgcgcgttcgcgctgaggccagccattgtctgaccagggccgccgttatccgccactttgcccgggccattaactttgaacagtactgccgggatctcgccagcgccggggtgtttaagtggatcgtcgatctggaagaggagacccggcactactggtcgaaggataatacgctgttatataaagagtgcctgatgcccccctgagccggtctcagggggaggcggcgagggtcagcctttaatcgcgggtctgcacccaaaaggcgtggatcaggccaggaatatagcccagcagggtcaaaatgatattgagaataaacgcccagccgaagccttttcccagcagcacacccagcggcggcagaatgatagtgaaaacgattctccagaatcccataacctctcccttcgtctaacgtcaattttttactaagctattcaatagttaagcatagacgcttttcgtcgtttcgccagcaggcagccccctcatctctggtaacaaaaatcattccctgccgtcacgggcaaaaaagaccgggaaaacattcacttttcccctctccggcccgcaggccctggcaaagcgcacagattgtcagttgaccaatcagggggacagggctaagcctggaggagtttcatcacatcgagtcgttttaccaaccggagaatatccatgagtaaacttgggattaatggatttggtcgtatcggacgtctggtgttacgtcgtttattagaagtcgacagcagcctggaagtggtggctatcaacgacctcacttcgccaaaggtgctggcctacctgttgaagcatgattcaaactacggccccttcccgtggagcgtcgactttaccgaagatgcgctgatcgtcaacggcaaaaccattacggtgtatgccgaaaaagaggcgcagcatattccatggcaggcggcaggcgccgaggtgattgtggagtgtaccgggttctacacctcggctgagaaatcgcaagcccatctccaggccggcgcgcgcaaagtgctgatttccgcccccgccggcgagatgaaaaccatcgtctacaacgtcaacgatgacaccctgaccccggatgacaccatcatctccgtggcctcctgcaccaccaactgcctggcgccgatggccaaagttctgcaggatgccttcggcatcaccgtaggcaccatgaccaccatccacgcctataccggcacccagtcgctggtggacgggccgcgcggaaaagatctgcgcgcctccagggcggcggcggaaaacgttatcccgcacactaccggcgcggcaaaagccattggcctggtgatccctgccctgagcggtaagctgaaaggccatgcccagcgcgtaccgaccaaaaccggctcagtgacggagctggtatcggtgctggagaaaaaggtgactgcggatgaggtcaatcaggcgatgaggcaggcggctgagggcaatgaatcctttggttacaccgaagaggagatcgtctcttccgatatcatcggcagccatttcggttcgatctacgatgctacccagctggagattgtggaggccggcggcgtacagctggtgaaaaccgtcgcctggtacgataacgaatacggctttgtcacccaactgatccgcgtgctggagaaatttgcccgctaagtgaacggcggacagcctgcgctgtccgccggttctgtgtggagtgcctcaggcctgcagatagaccacctgggtctgcaggtactcattcaggccgtggcggccatctgcgccgccgatccccgacttacgccagccggcgtggaacccctgcatcgcctcaaagttctcacggttgatataggtttcgccaaacttcagtcccttaatcgctttcatcgccacgttcagatcgcgggtatagattgaggaggtcaggccataatcgctgtcattggccatcgccagcgcctcatcgagggtcgaaaaggccaccaccggcagcaccggaccgaaggtttcctcatggataatgtccatctcctgacgtacatccagcagcagggtcggcggataaaaatagcctttgccctccagcggctgaccgcccagcgccacccgcgccccctgcgccaccgccttcgccactttgcccgccacctggtcccgcgccgccgcgttgatcagcggccccatcgcgatgtcatctcgcgtcgccgggtcgccaaactggacggccttcatcgcctcaccgagtcggttgacgaagcggtcgtatattccctgctgaacatagacccgctcgacgcagttacacacctgcccggtgttaatcacccgcgagtccactaccgctttcaccgccagctccagatccgcatcgtccattacaatggcaggcgctttgccgccgagctcgaggcacactttggtgatatttttcgccgcagcggccataattttttctcccgccgccacgctgccggtcatgctgaccatcgccaccttcggattgccggccagctcctggccaacggtttctccgcggccaagcacaaggttaaagacccctttcggcaacccaacctgatggacaatctcggcaaaggcgatggcattattgggcgtaaattcgctgggcttaatgacaatggtatttccagtgatcagggccggcgccagcttgcgggcgataagaaagaacgggaagttccacggcaggatcccggtggtcacccccagcgcgcgtttaaagacaaggatattctcccccgggcgatcgctctgcacgatctcaccttcgtaacggcgcgcccattctgccatatagtcgagatagtccgcggtgaacgcaacctccaccgccgccagctgctggatcttgccgccttcagcgacaatcagcccggcgatctcgtcggcacgctggcggataccggcggcaattttgcacagccagcccgcacgctcaatggccggcagcgcttcccagccgggctgggcgcgctcggcggcgtcaatcgccagccgcgcctcttcggcagtcccgtccgggatccgcgacagcagcgcttcggtcgccgggttaagcacgtcgatccagccgtcgccgcgaccggaaacgaactggccatcaatatacatcgggtgttgaacgggtgctgtcatggctgctcctgtggtgcatttgtatttaacaggtgatttttttgttaaatatcgggcggataagccgctgttcggcagcacattgacgcagttctgtgagctgattcataaaaacgggccaaaaattcccgcttgaggttacattttaataacacaaattgcccgtttgcgacgaatctgccgtaaacgggcatttttcagccgagggtgcgggcctgcagcgccccggcaagctgggcgtcctcccgcagctgtcgccaggcgtcgaggatctccggcgggaaggtgacatggctgatgaagtcttttccccgcggaccgtatccttcaggggtatcctgcaggcgcggcagctcgcccagcagcagccccaggtagcgggtgaccggccagagccccgctccgccgcccgcgaaccccagttggccatcggtctgctccagcaccggcgagcagccgggaaagctcaaccactgcggcggcggcgtcgccccctgccagacgcgggcgaaggtagccatggttcgccgctgcatagtcgggtcctgaatgacgatcccgcgacgatgggcgagcccccggctctccagcgtggtccgggtaaaacgggcgttctcaccgcagttggttgactggtcctccaccaccagccgcgaatgggggatgtgccagtagtcatgagcaatgtcggccagaacatgcgcttccgggcggccatccaccggcaacgtacggtaacggggatcctggcgcaccgcctcgtaaagatagcccgtagaatgtcccacgccgccgctgatcagcagcgggaccgcctgcgccgccgccagacggcaggcggcgtcgatggttgggatcacggcgttgccggccagcactaccacgtccacctgcggcaacgcgggcagcgtcgccagatcgtcctgcgccagccaggcgccgacctggttagccgccgccagcgtcgctgccgacagcggaggaaattgttctgccattctgtctccttaatcctctctcagacgagcggagaggatgctttcgctatcataaacgccgcctgccgggaggcatagcggcgtcgatttgtaaccattttgaaataacaagaaacatctaaaaacaggcgggttgcacctgaacaactcactatgaaaataacaaaaaacagcaaaatcaggtggaaaataaaaaatagcgtcgcggttataccagttctaagcgcgccataatgcccagtttgccagccataaacttgccaattgtaaccttcaaccctaagttgcttaacaattacacaaccttttcacatcaggttgcaccctgctcgtacagagtgacacctgacctatctaccgtggcgggagaacgtttcgtaatgagcaatccacaagacaacactgcatccattctgcagaaaaacaagaaggtactgatcgcgagcctgacaggcagcgccatcgaatggttcgattattttctctatggcaccgccgccgcgctggtgttcaacaaaatcttctttccgatggtcgacccggttatcggcctgatcctctcctggctctccttctcgctgacgttttttatccgccccatcggcggcgtgattttcgcccatatcggcgatcgcatcggccgcaagaagacgctggtgctgaccctgtcgctgatggggagcgccacggtggcgatcggcctgctgcccacctacgagatggtgggcctctgggcgccggccctgctgattactctgcgcattattcagggcatgggtatcggcggcgaatggggcggcgcgctgctgctggcctatgaatacgcgccggaaaagcggaaaggctttttcggcagcattccccaggccggggtgaccatcggcatgttgatggcaacatttatcgtctcgctgatgacgctgttcgatgaggcgcagtttctcgcctggggctggcgcataccgttcctgctcagctccgtcctcgtttttctcggcctgtggatccgcaaagatatcgacgaaacgcccgcctttaagcaggtgaaaaaatccggccaggtggcgaaggccccgctgcgcgatacgctcaagcaccactggcgggaagtgctgatcgccgccggcctgaaagtggtggagaccgcccccttctatatcttctccacctttgtagtcagctacgccaccaccaccctgagctatcagaagtcgcaggcgctggaatccgtgaccctgggcgcgctggtggccaccgtgatgatcccgctgatggggctgctgtcagacaaggtgggtcggcaaaagatgtacaccctgagcgtggtgctgctggggctgtttatcgtcccgtggttcctgctgctcgacaccggcaccggctggggcatcatgctggcgacgatcgttgccttcggcatcctgtgggcgccggtaaccgcggtgctcggcaccctgtgctctgagattttcagcgccaatgtgcgctataccgggatcaccctcggctaccagctgggcgccgcgctggccgggggcaccgcgccgcttatcgccaccggtctgctggcaaaatatgacggtgactggcggccggtggccatttatctgggcgttacggtggcgatttcgctcctggcgatattctgcgccagccggatgaagtccgcgctgggcacggccccctcccgggcggaaagcgcctgaccgccgcccgccagggctactacggcgccgactatcccgcccggtggcgctgcgcttgcgcgggcctggggggagatcgcgccgcgggggataccgcttatccctggcccggtaagacagtaggcccggtaaggcgccagccgccaccgggcacaaacaggcgtcaagtcttcccccctgcttagccagccgccagggccggcgggtgtcaggcgctctggttgtccagctgaagctgcccctcgcgccgctgcttcagcttccagaagccccacagcgcgataaaccacagcggagaagccaacagcgccagcagcgtgtccgggtcaaagatcatgatgaagatagcgaacgcgaagaacagcaggctcacccagctcatcaccaccccggcgggcatcttaaagatcgacccggcgtgcaggtccggacgctgacggcggtaaaccagataggccacgaggatcatcccccagctgaacaccaccataatcgccgccagggtcgagacgatggtgaacagggtcatcacgttcggcaccagaaacagcaacagcgtgccgatcagcatgcagaagcaggagaacagcaggctgcgcaccggaatgcgggtactgcgcgacaggatacgaaactgccagtgcgcatgcttctccaccgacaggccgtacagcatgcgggtgctggagaagaccccgctgttggccgaggacatcgccgaggtcagcgccacaaagttaatcaccgccgcggcggcaggcagcccggccttggcgaacagcgtcacgaaggggctggtctccgccgacacccccggccacgaggcgacagcgatgatcaccaccatcgacagcagatagaagatgataatccgcagcggcagagcattgatcgccttgggcaaaatgcgctgcggatcgcgggtctccgccgtcatggtgcccagcagctcaatgccggtaaaggagaagatcgctatctggaaaccggcgaaaaagccggtgatgccgtggggcataaaggccgtcgggtcggtgagatggctgagggaggccgtcacgccgtccggggaggtccagccggtggcaatcatccagccgccggtgccgatcagggcgataatggtgatcaccttgatcagggcgaaccagaactccgcctcgccgaacattttcaccgacagcaggttaagcaggaacagaatcgccagcatgctgagggccggcatccacgccgacagttccgggaaccagtactgcatatagctcccgcagaccaccacgtcggcgatacaggtcaccacccagcttagccagtaggtccagccgaggtaaaagctggcctgcggcccgagatactcgccgacaaagtcggcaaacgagcggtagtcatggcgggtgagcagcagctcgcccatcgcccgcatcaccatataggtaaagaacccgaccagcacatagataaccaggatcgaggtgccggcgacggcgatgttgcgccccgcccccataaacagcccggtgccgatggcgccgccgagggcaatcatctggatatggcgggcgctgagcccgcgcttaagctgtgacgcgccttcacctccggcggcaggtgacgcctgaggttgatgttcagtcatggtgtttcctcaggctggttgcgggagacgaagggcagcggcgcggagcaacagcccggcgcgctggccggtggcgaccccggcgttgggaaagaggatatagggggcccgggcctgcaccacccaacgtttctctgcctggcgggcgatctcataccctgccgggagcgcggtgaagttttcaacgtctgccgcgagattaagcgtaaattccccctcgcgcttgatgatgctctcctcgaccaggaagtagtccaccggcgctttgtcgcgcggcggcagcggcgcatcagcgatccaggcccggatcgccgcgtcggcggcggcgaacaggctgagatcgttggcgccgaacggcatcactttccccagctccagggtggcgctttgcgcggcgaacttttcgcaggtgaaatgggtgaaggtgccgcccgcttcggtatggcgcacgacggcgtccatcccgctggcctgcagcagctgatagaaatcgggcgaaaaatccccggcgtgggccgggagcagcgcaaactggcgatacagcgatccgcgaatggcggtgtgcatatcgagatgaccacggttgaccggccccgccgcatcggcggcgcgataaaaagcctgcaccgcctgctccagcgcaaaagcccgccgcgactcatttcccggggtgaccgccagatggcggccgccgaacaggcgattcaggtcgttatgcagatagcggcgcgcggcgcggatcgccggcagattaccaaagacgatcagcagcgcctgcgtgagcggctgccgcccctggctcagatcgtgggttagctgcagcagcagttctatcggcgcggtctcattgccatgcacgccggcggagaggatcgtcgcctggcgccacggcgccgtcggcagcagctgtaaaatgccctcgcccagccagcgggcctcgatgcccgccggaaaggtccacgcctgcaggcggcagtgcagtaaatcgttaaccaggtgctccatctgccgctccttaacgctgaaaatcatagaccgcgcccaggcgcaggatctgcgtcagctcatccagcgcctgataaacctcgcgcagcagctgcgggtccgccagatcgcgggcatgcagccggtcgcgatagtgtttttccacccatgccgtcagctgctgataacgttcgtcgttcatcaggctatgggcgttgaccgcctggcgctccgcctcgttgagcaccacccgcagccgcagacaggccgggccgccgccgttgcgcatgctttcccgcaggtcaaagaccgccacttcatcgatcggcgatgcgctatcggcggcgagatcgctgagatagcgccagacgttttcccgctggcggcactcctccggcaccacgatcagcatcttgccgtctggtttgctcagcagctggctgttgaacaggtaagaggccacggcgtcgtcgagcgaaacccgctcgtccggcacttccacgctggtgaacgggatatccagactgtcgcttttagcccgcagcgtggtcagcaccgccgcctgatcgacaaacgcctgctgatggtggaacagcacatggcgattgctgaccgcgatgacgtcgttatgaaacacgccgcgatcgatagcctgcggcgcctgctgggcaaacaccgtgtagcgcggatccagctgatgcaggcgggccaccgcttcgctggcctcgagggtctgccgcgccggatacttcaccggggcgataccgccgctggcgcgtcgaccatagacgaaaaactgcaccccctgccggtcatattcccggcagaagcggttatggttggccgccccttcatcgccgaggtcgccatgctgcggcagcgccgcatggtgggcaaagtagcgcggatcggcgaacgtggcgccaaggatcgccgaggtggtgggtgcctcctgcatacggtgcagcttattgttcaggttggcgacggtgaaatggactttgccatcggcgctgtccgccgacggtgagacggtcgccgcgttggcggtccacatcgacgaggcggagctgaaggcggagagcagctgcggcgccgcgtgggccgcctgccggataacctgctcatcgctgccctggaaacccacttcgcgcagcagacgcagattcggccgcggctgcggcggcagaatgccctgcacgaagccgcggtcggccagggctttcattttatacagcccctgcagcgccgcctttttagggttagagagaccatcgcggttattttgcgaggcttcattgccgacggagagtccggcgtagtggtgcgtcgggccgaccaggccatcaaagtttgcttcaaaaccagacatatgtcctcacaggatccgttatcagaatggcaggcccggcgataccgtcgccggaagcgtcagcgtatcgctgaccagagaggccatcggccaggcacagtaatcggcggcgtaccacgctgccgcgcgatggttgccggaggcgcccaccccgccaaacggcgctttactcgatgcgccggtcagcggcttgttccagttgacgatcccggctcgcgcctcgtccgccagctgatcaaactgcgccgcatcgctggagatcagcccgacggccaggccatagcgggtctgattggcgaggcgaatcgcctccgggaagccgtcgtaacggataatcgtcagcagcgggccaaagtactcttcatccggcacctcaataccggtgacgtcgacgatccccggggtcagcaccgtggagcgcgggtcaggctggcgcatgcgcagcagcaccttgccgccgagcccctccagtttttgctgcgccgccagcatgttctgcgcagcgtcgagagagatcaccccgcccataaacggcgccggctgatcatcccacttgccggcgcggatctgcgcgctggcctctaccagccgctgcagcagcgcatccccctgctcgccgcgcggcacgatcagccggcgcgcgcaggtgcagcgctgcccggcagagataaacgccgactggataatcacatgcagcgccgcatcgatatcggccacgtcggcgacgatcagtgcgttgttgccgcccatctcgagggccagcatcttctccggctggccgccgaagtagcgatggaagtggaaaccggccgccgcgctgccggtgaacagcacgccgtcgatatcacgattttccagcagcgcctggccggtggcttttccgccctgcagcaggttgatcgccccgtcggggatgcccgcctgctgccacagctggacggtcatttcagcggtagccggcgtcagctcgctgggtttaaacacaatggtgttcccggcgatcagcgccggaatgatatgtccgttgggcaggtggcccgggaagttgtaggggccaaagaccgccatcacgccgtgcggtttgtggcgcagcagcgctttaccgtccggcagcgtcgactcatgaaagcccgtccgctggtgataggcttcgatggagatcgcggccttgccgatcatcgcctgcacttcggtgcgggtctcccacagcggcttgctggtctcgcgggaaatcagggtcgccagcgcctctttatgcgtctccagcagcgcggcaaaacgctgtacgacgtcaatacgctcggccagcggccggtgcgaccagggataaaacgccgcgcgcgccgcggcgcaggccgcctggacgtcgtcagcccccgcgctggccgcctgccacagcagcgactgatcctccggggccagtttgctcatcgttgcgccgctgcctggcagccactgcccggctataaactgtgcttttaccgccatgatctgttgtcctctggattcagggttaccgtataaacgcggtcggtttcactgacctgcagcgcgtccagcgcggcgctgtcaagcgagacctgctcttcgtgggccaccagcagcgcccgaaagttgtcgaattgaccgttggcgacgagggtcggcgccggcaggtcgcccatcagctgccggacaggcaggcgctggctgtcgcgcacggcgcggatctgatcggtgtccgcctccagcaccggaccggcatcgaaaatatccaccgagccgcgccagctgaaaccctctttctcgaggatcgcccgcgccggggcggtattgggatgcacctgaccgatgaccccgcgggccgcttccggcagcagtgagatatagatcgggtacgccggcatcagttcggcaataaaggttttcatgccggtgccggtcagccggtcggcatcggcgaacgggatgtcgaagaaatgatggcccagcgcatcccagaacggcgactgtccctgctcatcgctgcagccgcgcagttcggcaaacaggtgcggggagaaccactcgcgaaaggcggcgataaataaaaagcgcgccttggagagcagcagaccattgcggttgcgctgatacgccgggtcgagaaacagcgtacacagctcactatgcccggtgtggtcatagctgagattaagcagctcctggggcttatagactcccagcgctttcgaggcgcgcaccgttttctgaatgcgaaaattgtaaaacggctcatccaggcccactgcgacctcaatggcgctcacccccaccacccgcgccagcgcggtgtcctccagcacaaacaggaaaccctgctgactgcgcggcagttcgccggcgaaggtctcgatactgcgccgaatcctggccgccaggcgcccgacgtcatgcggtaaagaggtcatgccaacccccgcccgcgcggcgaggcggacgatgtcgtcgagatcgttttcccgtacgggacgaaatagcatcacaggccgtcctcccggttagcgggttaagcgggcaacggcgcgatcaaggcgcacgaaggcttccgcaatatccgccagcgggatattgagcgccggcgcgaagcgcagcacgtcggggccggcaatcagggcgatcagcccctcttccgccgccaggttggtcaacgttttggccttgccgcgcagcggccccgccagctcagcgccgatcagcagaccggtgccgcgcacggcgctgaacgcatcgtaacgggcagagatcgcattcaactggtcaacgatcagcgcatggcgctcgccaacgcccgccagcagcggcgcatcgagatgggccagcacggcgttagcgacggttgccgccagcgggttgccgccgaaggtggtgccatgagtgcctggctggaagacctgcgcccaggcctctttcgccagcatcgcgccgatcgggaagccgccccccagccctttggcgctggtgagaatgtccgggacgacgttgtaatgctggtaggcgtagagatggccggtacgcccggcgccggtctgcacctcatcgaatatcagagtggcatgatggcgatcgcagagggtacgcagcgcctgcaggaacgccgggtccgccgggatcaccccgccttcgccgataatcggctcgacgatcaccgcgcaggtgcgcgaggagatcgccgcggtgaccgcctcgatatcgttatagggcagatgggtaatgccctgcggcagcggagcataatcgctggaatatttcggctggccgccaacggagacggtgaacagcgtgcggccatggaaggcgtggttgaaggcgatgatttcgcttttttcaccgccaaatttatcgtgggcatatttccgcgccagcttaagggccgcctcgttggcttcggcgccggagttgcagaaaaacaccttgtcggcaaaggtcgactgcacgagggtttttgccagctgcagcaccggctcgttggtatagccattgccgatatgccacagtttcgccagttgatcctgcagggcctgagccagcgccgggtgagcatggcccagggcgttcactgcgatgccgcccgccatatcgatatactctttcccctgctggtcccagacgcgggagcccgccgctctgaccggaataaacggcgcgggggcaaaacagggaaccaggtaagcgtcaaaatcttcgcgagtcatactgcctgacataatttatctccggaacgtaagacgacggaaaacgctcccgtcgcgttggacaatcgacattaaccctgcccctcggcttattttgggcacgagcacacccgctgcgatggtaaaaatattcaccacagaaaaataaagccctattctttttacgggtaattgttaattcatggttaatgccatgttgttgtgtgggctaatgctggcctgtgaacaacaagattgtcaatacggacaaaagcaatttattcactttttgaagatcatcaagataatgaaaaacatagaaaaaatattttcttatgcacttaagtgaataaaaagtgaattaaaatgcacagcttgcgggtggttgacgtgcgtagttattcacttaaaaaataaaaaatctaacaaaaatttaaaaatcggaattgccgtcaaataccgctttataaaattggtgataccattcattgcacagagtttactgctgtagctattccacggttttacacgacataaataacactgagaaacaggactcttatggaaaagttatcttacgcatctgaaagtagtacatctccatggaccacctacctgcgccagatcgaccgcgtcgcgccttatctcggcgatcttgcctactgggtggaaaccctgcgccatccgaagcgcgcgctgatcgtcgacattcctgtgcaaatggacgacggcaccatccgccacttcgagggctatcgcgttcagcacaatctgtcgcgcggaccgggtaaaggtggtgttcgctaccatccggatgtcgatcttaacgaagtcatggcactttctgcctggatgaccattaagtgcgccgcggtcaatattccttacggcggggccaaaggcggcatccgcgtcgaccccttctccttgtcggaaggtgaactggagcgtctgacccgccgctacaccagcgaaatcggcattattatcgggccgcagaaagatatcccggcgccggacgtcggcaccaatggcaaagtgatggcatggatgatggacacctactccatgaaccatggcaccaccatcaccggcgtggtcaccggcaaaccgatccacctcggcggctccctcggtcgtgaaaaagccaccggacgcggcgtgtttgtcaccggccgggaagttgcccgtcgcgccggtatcgaaattgaaggcgccaaagtggcgctgcagggctttggtaacgtcggtagcgaagcggcccgcctgttcgccggcgtcggcgctcgtatcgtggttattcaggatcataccgcgaccctgtataacgaaggcggaatcgatatggccgccctcaccgcctggcaggcggagaaaaagcagattgccggtttccccggcgcccaggagatcgataaagacgccttctggaccactccgatggacatcctgatcccggcggcgctggaagggcaaatcacccgcgagcgcgctgagaagctgacctgcaaactggtgctggaaggggccaacggcccaacctatccggaagcggacgacgtgctggccgagcgcggcgtgatcgtggtgccggacgttatctgcaacgccggcggggtgaccgtcagctactttgagtgggtacaggacatggccagcttcttctggagcgaagaggagatcaacgccaagatggaccgcattatgaccgacgctatcgtgcacgtctgggataaagccgccgagaaagagtgtacgctgcgcaccgccgcctatatcgtggcctgcgagcgcatcctgatggcgcgtaaagaccgcggcatctacccgggctgatccccatcagcaaccgcatcaggggtggccttgcgccgccccttttttctttgccgcgccgttaaccgccgaggatgtgcgctatctgacaaggagttgttcggcaaaggtgacaacgtcacgcaagtaataaccatccgctgcccgtaggggattatttttcgattaaatcaaaatcgccctgggtatagcgtaagccagtgacgttgtcggcagtgaaaatatgttcgatggtgaggatgtcctccggcgcgagagtaatattcgcggcgccggcattgtcgcgcaggtgagcaattttcctcgcccccgggataggcacgatatcctcgcctttgctcatcacccaggcaagggcaatctgcgcaagggtcgcgtcatagcgggtggccacctgctgcaggcgctcaagcagcagctggtttttgcgcatggtttcggcctggaagcgcggcagatggcggcggaaatcatccgctgacaaaacgccgggatcggtaattgtccccgtcaggaagccgcggccaagcgggctgtatggcacaaagccgacccccagctcgcggcaggtgtggagaataccggcctccggctcgcggctccatagcgaatattccgtctgcacggcagcgatcggatgtaccttgcaggcccggcgcagcgtctgagcagatacttccgacagaccgatatggcgaattttaccctctttaaccagatcggccatagtgcccaccacctcttccaccggtaccgcgggatcgacgcggtgctgatagagcagatcgatggtctcgacattcagtcgcttcagcgacccttccactgattcgcgaatatgtgccggacggctgtcaacgccggccatccgctccagaccctggccggtcggcaaaatacgaaatccaaatttggtggcaatctgcaccttatcgcgaaaacctttaatcgcttttccgaccagaacttcattatcgaaaggaccatatacttcggcggtatccaggaaggtcacgcccatgtccatggcggtatggatcgtatttatcgcctgcgacgtttcagcgccgccataggcaaaactcatccccatacatccgagacctaatgcggaaacctgaaacttctcttttccaagataacgtgttttcatcttattttccttaattgctgaatggcattaaatatatacttccctttcatattgataacaattaatctattccgaacgcggtgttagctggaaattaacaatgaaaaccttgcccgatctgcaacaaatagaaatattaatactcatagtgaaacatggcagttttcgtcaggccgctaaagcgttaaacctttccccaccggcccttactgtcgctattaatcatctggaagaaaagttaggcgtgcgcctgctaaatcgctcaacgcgcagtttgtcattaaccgcagtgggtgaggaatttcttaataatataacgccggtggtcaatgattatcgccgggtggtggacagtctgaattatcaccgtctgactccggaaggcgtggtgaaagttaatttaccgcgcattgttattgacctgttttttcaagactattttatcgcctttaaaaacgcctgtcccaatgtgacgctcgaactgtatgccaccgatcggaaagtcaatattatcgagtccggttttgacgccggcattcgctattcgcaggatgtgcccaaagagatgattgccatcccctttggcgagaaactatcgctgatcccggtggccagcccggactatatacgcgaagccggagagcccgacaccccgcagtctttagttaatttccgctgcattaaccgctgttttcctggtggggagaagtaccgctgggagtttattggccccagcggcgagcttagcgaggtcgcggttaaaggcgatctggtcgtcgatgccgatagcgcaatgatccaggccgcggagagcggattaggcatcgcctttgtctatcagtcgctggtgacgcagcagctgagcgcgggcagcctggtccatttgttacccgactaccgctatcctgccgaccatttctgcgtctactacccaagccggaaacatattcccgcccccctgcgggcctttatcgcctgggtgatggcgcagaataaaaatatccttggtcagcagaccgcacgacacggatcgcggccggaagattaactacaattaacgtacataccgttaaccaatttctatctttcatcttgaactccggcggttatccggcataaaatcgttagagctctaacgatattgacagacgacctatggacaatcgacagcttaccttctctcatcttttatacctcaccgcgcaccactggcggctggcggtcaatcgtcggctgaaaaatctcggtctcagccaggccagctgggtggcggtagcgtccatcgcccgccaccagcagccgctgtcgcaaagcgaactggcgcaggagctgggggtggagagcccgaccattgtgccgttgatccatcgtctggtcgccctcggactggttgagcgcgtcaccaccgccagcgacaaacgtaagcgactgctggtggtcaccgacaaagggaaggccctctatgaacaggtcaaaacggtggctgacgatctgcgcgaagagatcctgacggcgattaccccacaggagcaggagcaaacccagcgggtgctggaaaagctattgcgcgaagtggagaagaaataatgccccgtcgccaggataacccctacgccccgcatgactgggcgccgcatgaaaaaccggctctgctcggttcgccgtcgacgccgctgcacagtccggcgaaacgcctcgcctacggcgtggtcggtctgctggtatgtctcaccggcgcgctgggcaacgcagtggtcaccgccaacctgcagctgctgcagggtaccttcgccgcctggtcgacagaaatcgcctggctgccggcggtatacgtgatgaccaacgtctccatcaacctgctgctggtgaaattccgccagcagtttggcctgcgcgctttcaccgaaggctttctggtgctctatgtgctggtcacctttttccacctcttcgtcaacgatctcagctcagcgatgatggttcgcgccgcccatggcatggtggccgcggcgctcagctcgctggggatctactaccaggtacaggcctggcctgcgcgccatcgcctgaaagggctgactatcggcatcaccggctcgtcgctggccattcccctggcgcgcctcttttccaccgaactgctgcagaccgatgaatggcgcggtctctacttctttgagctgggcctggcgctggtgtcgctggcctgcgtcatcgcgctaaaactgccgccaagcgatcgtaaaaaagtgttcgaaaaaaaagatttcattaccttctttctgctggcgcccggcatggcgctggtgtgcgccgtgctgtcgctggggcggctcgagtggtggtttgaagcgccgtggatcggctgggcgctggcggcggcggtaatactgatcgtcgctgcgattaccttcgagcataaccgcagcaaccccctgctcaataccaaatggctctccagcggcagcatcgtgcgtctgggcctgattatgctgttgatccgcatcgtgttggcggagcagaacaccggggtcatcggctggctgcagtacgttggcctgcaaaacgaacagatgactaacctcgcgtggtcgattttcgccggtattctgtgcgggatcattgccagctgtctgacgctcaacccgcagaagctctactggccgaccgccaccgcgctggcgctgatcatgatagcctcgctgctcgacagccagtccaacgccctcacccgtccggaacaattaatgttcagccagtttttactcggcttcggcagcgccttctttctggccccggcgatgctcgccgggattggcggcgtgtttgccgacccgcgcaacctggtcagcttctcggtgctgttcggcatgagccagaacattggcgggctgctcggctcggcgatcctcggcaccttccagacctggcgtgagaaattccactccagccagctggcggaccagataaccaccctgaacccgctgatcgtcgagcggctgcagcagtacagccagatgtatcagagccagattggcgacagtacgctactcaacgttcaggccaccaccctgctgcaaaacgccgcgacgctgcaggccaatattctcgcctggaatgatacctatctgctgacggcggcgatctccgccgggacactagtgtgggttttctggcgcttaattcgcttacgactgactgcccgtatcgcgttgcaacgcgctaccggcagcaaataattatcatcatttcatctctggagtcgttatgagtcagcaggatgcggccaaacaacaggccaacacccggaataatattcgcgtggtttccatttttaccgccgcggcgataggcctcgtcggcgtgctggtgatcctctacgcctggcaactgccgccgttcactcgccatagccagtttaccgacaacgcctatgtgcgcgggcagaccacctttattagcccgcaggtcaacggctatatcaccgccgtcaacgtcaaagatttcgcgattgtccagccgggcgaggtgctgttccagatagacgatcgcatctataaacagcgggtgcatcaggcccaggctaccctggcgatgaaagaggccgcgctgcgcaataacctgcaacagcgcaaaagcgccgaggcgacgatcgccaagaatgaagccgcgctgcaaaacgcccgcgcgcagaatctgaaaatccaggccgatttaaaacgcatccagcagttaaccgccgacggttcgctgtcgatccgcgaacgtgattcggcgcgggccagcgcggcgcaaggggcggcggatattgagcaggcgaaagcggcgctggagatgtcgcgccaggaccgtgaatcgaccatcgtcaatcgcgattcgctggaggccgacgtggccagcgccaaagcggcgcttgagctggcgcagatcgacctgcagaatacccagattatcgcccccaccggcggccagctggggcagatctcggtgcgtcttggcgcctatgtcagcgccggaacccatctgacctcgctggttccgccgcagcactgggtgattgccaacctcaaagagacccagttggccgaagtacgcgttggccagccggtcaccttcaccgtagacgcgctcaacggcgagaccttccacggcaaggtgcagagtatctccccggcgaccggggtggagttcagcgccatctctccggacaacgccaccggcaatttcgtcaagatcgcccagcgcatcccggtgcgtattacggtcaacgacgggcaaaacaacagcgaacgcctgcggccggggatgtcggtgcaggtgactattgatacccgtgcggagaaacaaccatgatccgcccggtcgcccttgctatcgttctggcgctggtcggctgtcaatccgccgatgtgcaacgcgcgcagccgaccctgaccattcctgccgcctggcgggccgacgttggcccggccagcccggtggagggtgtatggtggcgcaattttcatgacagtaccctcaatcagtatgtcgaccaggcgctgcgctataacagcgatgtgctgatcgcccgcgagcgggtgaatgagtatcaggcgcgcgcttacgccgccgacagcagcctgtttccgtcactggacgccagcctcaccggcacccgcgcccggacgcagtccgccgccaccggcctgccgatccacagcacactgtataagggtggcctgaccgccagctatgatgtcgatatctggggagcgaaccgcagcgcggccaacgccgccggcgccagccttgaggcgcagaaagccgccgccgccgccgccaatttgagcgtcgccagctcggtggccgttggctacgtcacgctgctgtcgctggatgagcagctgcgggtgacccagcagacgctaacatcaagggaagacgcgtggcgcctggccaaacgtcagtttgaaaccgggtatacttcacgccttgagctaatgcaggcggattcggagctgcggtcaacgcgggcgcagatcccgccgctacagcaccagattgcgcagcaggaaaatgcgctcagcgtgctgctcggcgataaccctggcgcggtaaaacgcggcgagttcgcccagcttaccccgctgcgtctgccgtcgcagctgccgtccaccttgctcaaccgccgtccggacatcgctcaggccgagcgccagctggtggccgccgacgccacgctggcctcgtcgcaggcgcagctgctgccctctattaacctgaccgctaccggcagcctgcaggaccggacgctgccggatctgctggacaacccgctgcggctgtggagtcttggcggcagtattctggcgccgctgctaaaccgccaggcgttaaatgcccaggtggacctctccatggcccagcgcaaccaggcgctctatagctatgagaaaacggtgcgcagcgcgttcaaagaggtcaatgacagcctggacgccatcagtcgctatggcgaacagttatccgagcttcaggaacaagagaccgttgcccaggaaaccttacgtattgcacaaaaccgctaccgtaacggctactcttcttatctggatgtgcttgatgcccagcgaacgctgttctccacccagcttagcgtggtgcaggtgaagaacaacctgctgctggcgcagatcgatctgtaccgggcgctgggaggcggctggtctgactcatcagggagctaaatggggaagcgtcatatgcaacaacagtggtcggcagtagacaattatttaattaaggccttaattcccggcgatcctgtactcgatcgggtactggaaaacaaccatcgtgccgggctcccggcacacgatgtcgccgccaatcagggtcagtttctcgccctgctggtacggctaacccaggctaagcggatactggagatcggcaccctcggcggctatagcaccatctggatggcgcgcgagcttcctgcagacggccaactcctcaccctggaggccgacgcgcatcatgcccaggtggcgcgggagaatctgcagctggcgggcgttgaccagcgggtcacgctacgggagggacccgcgctacagtccctggaggcgcttggcgcatgtcccgctttcgacctgatcttcatcgatgccgataagccgaataatccccattatctgcgctgggcgctacgttattcccgcccaggaaccctaattattggcgataacgtggtacgcgacggcgaagtggtcaacccacagagcgccgacgagcgcgttcagggcgtgcgtcagttcattgagatgatgggcgccgagccgcggttgacggcaacggcgctgcaaaccgtgggcactaaaggctgggacggctttactctggcgtgggtaaacgcttaagcgtggacgcctgaccagtagccccggtaagcgcagcgccaccggggacaaccagccaggctatggggtaatttgctccatcgcctgcaacactcgcttgtccgagataggatacggggtgcccagctgctgggcgaagaagctgacccgcagctcctcgatcatccagcggatctcccggacatcgtcgtcctcacggcggttcggcggtagcttattcagccactgctgccacgcctgctgcacgctctccaccttaagcatctgcgcccgatcgcggtgcggatcgatagccatcttctccagacgcttttcaatcgcctgcagatagcgcagcgtatcgccaagacggcggaaaccgttgccggtgacaaagccgcgatacaccaggcccgccatctgcgctttgatatccgacagccccagcgccatggtcatatccacccggcctttcagccgtttgttgatattgaacaccgcggtgaggatctgctcgacctgtttagcgatctccaccaccgtgtcgttgagctcggctcgcactttatcgtgcagctgactaaagccctcttccgtccacaccggaccgcccgcctcgtcgataagcttatcaacgccgcaggagatgcaatcgtcaatcagatccagcactttgccgtacgggttaaagtagagcccaagcttggctttattcggtagtttctcgtgcagatacttaatcggcgacgggatgttgagcagcagcaggcgacgcagaccgcgccacatggcctgctgctgttcctgtggattatcaaacagcttgatggccacgctgtcgcgctcgtccaccagcgccggccaggctttcaccttatagttaccgcgcttctgttcgtaactttccgccagggtgccaaagctccagatatgcagcccgctctgctcaataccgtcatcagcgaccgccgacagcgtctcctgcactttgcccttcagggcgtctttcaacgcctgcagcgagcgcccttcctgcagcttcttgtttttatcatccaccacccggaaggtgattttcaggtgatcgggcacctgatcccactgccaggcttcgcggtcgatggtcacgccggtcatcttacgcagctcgcgctccagcgaatcgagcagcggcagctcaagcggcgtcgcccggccaagaaacgcttccgcatagttgggagccgggacgaaattgcgccgtaccggcttcggcagcgattttatcagcgcgataatgagctcgcgacgcagaccagggatctgccattcaaacccggcttcctctacctggttgagcagcggcagcggaatatgaaccgttacgccatcggcatcggcgccaggttcaaactgatagctaagccgcagcttgaggttgccctgatgccagaaattcgggtagtccagtttactgacctgctccgccccctctttaatcagcatgctcttttcaaaattgagcaagtctggcgtttcacggctggcccgcttccaccagctatcgaagtggcgggcggagatgacgtcgtggctgatgcgctggtcgtagaactcgaacagcgtctcgtcatccaccaggatgtcgcggcggcgcgacttatgctccagctcttcgatttccgcgcgcagcttcaggttatcgcggaagaaggcgtgccgcgtctgccagtcgccctctaccagcgcgtggcggataaatagctcacgacacagcgccggatcaatctggctgtagttgaccttacgcgcggcgacgatcggcaggccgtaaacggtaaccttttccgtcgccattaccgcgccctgcgaccgctcccagtgcggctcactgtatgagcgcttgatcaggtgctgcgctaccggctccacccactccggctcaatgcgggcggcaatacgcccccacaggcggctggtctcgaccagctcggccaccatcgtccacttcggcggcttcttgaatagaccggagccggggaagatagagaaccgcgcattacgggcgccggtatactcctgtttatcggcatccttcatgccgatgtgcgacagcagaccggtcagcaacgcagtatggatctcgcgatattccgccggctcactgttgatcggcaggccgagctctttcaccacctggcgcagctgggtgtagatgtcctgccactcgcgcacacgcagatagttaagaaaatcgacccggcactggcggcggaactgattcgacgacagcgccttctgctgctcgccgaggtagttccacagattgacgaaggcgagaaaatcggactctttatcgtggaagcggcgatgtttttcgtcagaggcctgctgtttgtccatcggccgctcgcgcgggtcctggatcgacagcgcggaggtgatgatcatcgcttcccgcacgcagccgtgcttctgcgcctccagcaccatgcgcgccagacgcggatccaccggtagctggctgagctggcggcccagcggggttagcttataagccgttgcctgcgcatcggtggtgatggcgcccagctcttccagcaggcgtacgccgtcctggatattgcgcttatccggcgcttcgacaaacgggaaggcggcgatatcgcctaagcccagggcggtcatctgcaggatgaccgacgccaggttggtgcgcagaatctccgggtcggtaaattccgggcgcgacaggaaatcgtcttctgaataaagacgaatacagatcccttccgaaacgcggccgcagcggcccttacgctggttggcggacgcctgggaaaccggctcgatcggcaggcgctgcaccttggtgcggtagctgtaacggctgatacgcgcagtaccgggatcgataacgtacttaatgcccggcacggtcagcgaggtttccgccacgttggtcgccagcacgatgcgccgtccgctgtgcggctggaagacgcggttctgctcgctgttggacaggcgggcgtacagcggcagcacttcggtatggcgcagatccagcttattcagcgcatcggcggtatcgcgaatttcccgctcaccgctcataaagatcagaatatcgccgggcccttcgcgccccagttcgtcaaccgcatcaaagatcgcctgtaactgatcgcgctcggtatcgtccgcctcttccactatcggccgatagcgcacttccaccgggtaagtccgcccggagacttcgataatcggcgcattattgaaatgctttgagaaacgttccgggtcgatggtcgccgaggtaatgatgattttcaggtccgggcggcgcggcaggagctctttcagatagccgagcagaaagtcaatattcagactgcgctcgtgcgcctcatcgataatgatggtgtcgtactgcatcaacagacgatcctgctggatctccgccagcaggataccgtcggtcattagcttaaccatggtgttttcgctgacatggtcgctgaagcggactttatagccgatgcagccgcccggctcgctctgcagctcttcggcaatacgattggcgacggtccgcgccgccaggcgacgcggctgggtatggccgatgagtcctttcagcccgcgccccagctccatgcagattttgggcaactgggtggttttacccgaaccggtctccccggcgacgatcaccacctggtggtcgcgcaccgcctcgagaatctcttgttttttctggctaaccggcaggttttccggataggtgatggccggacgcgccgcttcgcgcagcaggactttaccggctgcctggcttatctccagcgccatctcctgcagaatggcctgttgcgattcaggatttttaaccttcttcacgccgtgcagacggcgggcaaagcgcgttttgtcgcgcagcatcaggccgtcgagctgttgataaagctgggggaaggtgattttttgttgttctgtcatagcgttatcgggcagagctctgccgggaaaatctcttttgaagtattgccttagagtaccacatctgtgtcattcgtgccttgttcaaaaaatctgaacataggattcgatatattgcgctatctctgtggcgcgattgtgaatacagtgtcaacaagcaccagggcattgacccgtcaatcacattaaaaaaaggaaacacccatgagcaaagtattagttctgaaatccagtattctggcagggtactcacaatctggtcagctttccgactattttgttgaacaatggcaggaaaaacaccctggcgatgagatcaccgtgcgtgacctggccgccaatccgatcccggttctggatggcgaactggttggcgccctgcgtccgagcgacgcgccgctgactccgcgtcagcaggaagcgctggccctttccgacgagctgatcgccgaactgaaaggcaacgatgtgattgttatcgctgcgccgatgtacaacttcaacatcccgacgcagttgaaaaactatttcgacctggtggctcgcgccggcgtcaccttccgctacaccgagaaagggccggaaggtctggtaaccggtaaacgcgcggtcgtcgttaccagccgcggcggtatccataaagatactccgaccgacctggtcaccccgtacctgtccaccttcctcggcttcatcggcatcaccgacgtgaactttgtgttcgccgaaggtatcgcttacggcccggaagtcgcggccaaagcgcagtctgacgcgaaagcggccatcgacagcgtggttgcagcctaatatttcactcctctcgcttcctgcgggaggagagttttactttttctcgtagcgtaaataccccaccacgcctccgccgccatcctttggatgattcacgccgtcgttgacctccacgcaagggaaatcgaaaggcgaaatgccgtcaatgcaggccacattcaccccatactgctgtgggtttgatcgccgttgatgaaaggtgtagatcccgcataccgagcagaaaaagtgcacggcttcccctgtattaaagcgatactctgtgagcttatcccctccgcgtaccacctctattcctgaacgcggcgaagagaccgcgaccgccccacgcatgcgacaatatgagcagttacagcgccgaacggtgttgaagccgtcgctgagttccacggtaaacgccaccgcaccgcagtgacagtgagcggataatttctctgccataattttacccctcaggtggcggcttttggccgcaggttttcatcaaacgccagccgcttacgccctgcttcgacttcccgtaatggctccacctggtgcagcgtctgcttacagcgttccaccagcgcctggtattcacgggtaccttgttttttccacaccagctcctgttcgctcagggtgcgaatcgcttttgccgggctgccgataatcagatggttggcgggcatctcggcgttggctttgacaaaggccgaagcgccgacaatgctgttttcgccaatgaccgccccgtcgataatcaccgcgctcatgcccaccagcgcgttgcggccaatcacgcagccgtgcagaatagcgccgtggccgatatggccctcctcttccaccaccgtatcctggccggggaagccatgcatcacgcagttatcctgaatattggcgccgtctttgaccacgatgcgcccgaagtcgccgcgcaggctggcgttgggcccaacatagacccctttgccgaggatcacgtcgccaatcaacaccgcggtcgggtgaacgtaactctcctccggcaccaccggcgtcagtccatcaatctgatatatcggcatgcaacctccttatgcgcccggcaaaccgccaaagcgctgataatagagcggacccggcgccgggagctcgcccaccgagctctcacctttctcgctgacgaacgccagcgcgccgggactcacgcgttgataaatattgatacacagctggcgggcggtttgccctgcccaatgcgccggcaggagctcttccggcagcagcgggtctttgagcaccacccggcgatagaaatggataaggagcagttggatctggaaacagcgatccggcgtcaactctgacgggtcgcaatcgcgcagcagcggcagtagaggtcggaacaaggcgataaacgcctcgtacatctcattttgttcggtgagatgccagcactcctccacccggctgcgcagggccgctctggagagcgccagcggcgaatgggcttcaaaacagatgacgttttcggcgacgcccgcttcgtggagcagagactggacatcggccagcttttgcgacggcgaggccagcaggctcggcgccagcgcgccaaacccctgccacagcagctgctttttaacgtcggcgagcacatttttctccaggccttccgaaagcagcagcagccaggtaccgtcccattccggggcactggcgcgataaattttatgctccgcgcgccgggtcaggcgcaaccctttatcactcaggcgatagaagctgcgccggccgatgcggacaacatcaagccactcttctttattgaggcgaaacagcgcggtgcgtacgaagcgctcgccgaagcctaatccttccagcagcgccgcgacgctgcccagccacacttccccaccgcgttgtaataaagcgtcgccatacagcgaggcaattaatgacgtgccgctgatgggcatcgccgtcaccgcttgttgaataaaggcgtcgagtttactcatctgattcattctgttgttatatttttcctttatgaatcatagcacaggaaactccccggctgacggcgcaaacgcttcagccgggtgcctgccgcgcagccggagagaggattaaccgctgaccaccgcttttcgcaggtcgaatacccgacaggctttcccttccgagcgcggaatgctgccgcagttgacgatagtaatatcggtggagatcccgaccatcgacttaatgcggtgacgcaactgatggcaaatctggcagcgttgttcatgactcagcgccagcccgctctctttcagctcaacgcgcaccgccagcgaatccagatgaccgcggcgattgacctctaactgatagtgcggcgccaggtgttcaaacttgaggatctcctcttccagctgcgaggggaagacgttaaccccgcggataatcagcatatcgtcgctgcgtccgctgatgcgatccatgcggcgcatggtccgcgcggttcccggcagcaggcgcgtcagatcgcgggtacgatagcggatcaccggcagcgcttctttggtcagggtggtaaacagcagctcaccatgctcgccatcttccagcggcgtaccgtcgtccgggttgacgatttccgggaagaagtggtcttcccagatagtcgggccgtcaacggtttccagacactccatcgctacgcccggtcccatgacttccgacaaaccgtaaatatccagggcggtgatccccagccggcgctcgatttccgcgcgcatcgccagcgtccacggctcagcgccaaagacgccgactcgcaatgaacagctgcgggcatcgccgcccatctggcgctccagctcttcaatcagattcagacagtaggacggcgtcaccatgatcatatccggctggaaatcgcggatcagctgcgcctgtttttcggtctgtccgccggacatcgggatcaccgtcgcgcccaaacgttccgcgccgtagtgcgcgccaaggccgccggtaaacaggccgtagccgtaggcgacgtgaattttatcttttgctgaaccaccggccgcgcgcagcgaacgggcgacaatattggcccagttatcaatatcgttttgcgtatatcccaccaccgtcggtttgccggtggtgccggaagaggcgtgaatgcgcaccacctgctccatcggcaccgcgaaggtatcgaagggatagttgtcgcgcagatcctgtttggtggtacaggggaatttttgcagatcgtttaattcccgaaagtcgtcagggtgcacgccggcggcgtcgaacttgcggcgatacatcggcacattttcgtacgcatgcttcagcgtccatttcaggcgctgggtttgcagggcctgcagttcgtcacgcgatgcggtttcaatcggatctaattttgtagtagttatcattgtagggtactcgcaggtaaattagctcacactcgctcgaggatcatggcaatgccctgacccacgccaatacacatcgtacacagcgcatagcgcccgccccggcgttgcagctcaaggctggcgctcagcgctaaccgcgcgccgctcatgcccagcggatggcctaacgcgatggcgccgccgttgggattcacgtgcgccgcatcgtccggcacgccgagctgtctgagcacccccagcgcctgggcggcgaaggcctcattcagctcaatcagatccatatcgttaatattgagtcccgcccgctccagcactttacgcaccgccggtaccggccccagtcccatcaggcgcggttcgacacccgccgtcgccatcgccacgatacgcgcccgcggcgtgagcccctggatagcggcctgctgttcgctggcgatgatcagcgccgcggcgccatcgttgacgcctgaagcattgcccgcagtaatgacgccgccctggcggaacggcgctttcagtttcgccagctgctcaagcgtggtttccgggcgcggatgctcgtcctcgcgcacgtcgctaaccgcccctttccggccgacaatctgcaccggcacaatctcctgcgccagaatgccgtcgcgctgggcctgcgccgtgcgctgctggctgcgccaggcgaaagcgtcctgatcggcccggctgatatttaacaattcagctacattctcggccgtttccggcatgctgtcagttccgaagtgttgcgccatgagcgggttcacaaaacgccagccaatcgtggtatcaaagagttccgcctgacgctggtacggcgtgctggcttttcccatcacgaaaggcgcacgcgacatcgattccacgccgccggcaatcagcagctcgacatcgccggctttgatcgccctggcggcaaagccgatggcatccagacccgatccgcacaggcggttaatcgtggtgcccggcacggtatgcgggtaaccggccaacaacgtcgccatgtgcgccacgttgcggttatcttccccggcctgattcgcacagccgaaaatcacatcatcaattgctgccgggtcgagcccgggattacgactcaggagctcacgcagcgggattgccgccaggtcgtcggcgcgcacactggccagcgcgccgccgtagcggccaatcggcgtacggatcccgtcacaaataaaggcgtcgcgcattacacgtctcccgtgattgtgccgccgatgcggtgcgatttgccgcggaacagggccacaatcttttgctgttgattaacaatttcgatgtcgtagacgccggtcagcttgccctgctgtttgactctggcggtggcgaccagccggtcgccggcaaacgccggacgaagaaaatcaatgcttgccgccgaggccaccgccgccagcccctggctgttacaggcgtaggcgaaagcggtatcggcaagtgtaaatagctgaccaccgtgacaggtttgatggccgttaagcatgtccgccgagacggtcatactcatctgcgcaaaaccgtcgtccatttcgataagttcgatccccatctttctggcgcaggtatctttttcgtacatcacgcgcgcgttgcgccacggatcattgctcatggtgcttctccatcagcgccttctggcgcagcagggaactggggcgatagcgctcctcgccataatggtgttgcaggttctccagcagttgcagcacccgccgccagccaaggcgttctccccatgccagcgggccatgcggatagttcacgccaaggcgcatcgcggtatcgacatcctgcgggctggcgacgcctttttgtaccgcatccagcgcttcgttaatcagcatcgccaccgtgcgccacaccagcaggccgggataatcggcaatacgcagcactttcttgccctgctgctggaagtaatgcacggccttatcagtggccgcaggcgcgttggttgccgctgcggccagcaccaccgtatcgctggcgcacaggtcatacaccaccaccgggcggtgatgcttaatactcagcgccagggcggtctcgccttcagtctccagcagcaagatatcgtctaattcagtgacgttgtcacttctgacggtaacggattcagcacctatcattaccggcggcagcgccgcgtccggcagtgtctcagcgggccagcgatagacgccgtggccgctctttttacctagccgcccggccagcgccagctcttgctggaggagcgatggcaggtagcggcggtcctgccagaaggcgttaaacaccgaacaggtcacggcgaagttgacgtcctggccaatcaggtcagtcagcgccagcggtcccatcgggaagccgccgccgtcacgcaaagcggcatcgataacctccggggcggcgacctgctcttccagcgcgcgccaggcctcagcgtagaacggacgcgctacgcggttaacgataaaaccgggcgttgagcggcagcgcaccggctgtttcccccagccgcttacgcactggcacagctgctccaccacttctgtggaggtcgcaagaccactcaccacctcgaccagcttcatcaccggcgccggattaaaaaagtgcagtccggccacccgctccgggtttttgaccccggcggcgatagcggtaatcgaaatagacgaggtattactggtcaacagcgttgacggcgcgcagatcgccgccagctgcgcgaacagcgccgttttgacctccagccgttcagaggccgcttcgatcactaaatctgcatcggcaagtgcggctaaatcgtgggccggatgcaggcgcgccagcagcgcgtcggcctgctctgacgccagtttgccccgcgcaacgcgtgacgccagacgcccggcgataccctctatcgccaggtctacagccttagggttaatatcaaaaatacgcaccggatgcccggcggcggcagccacttcggcgatgccggcccccatggtgccgctgccgatcaccgccacggtggctaaggatgtcgtcatcatctatttcccgctgaactgtggtggccgtttggccagaaacgcgctgaccccttcgcggtaatcatcgctgcgcccggccagacgctgataatcgcgctccaggtccagctgcgcatcgagactgttggtttcagaggccagcagcgcctttttaatcagcccaagaccaaacgtcggttgcgccgccagatggcgcgccagttgcagactggtatccgccagttctgaatcgtccaccagttgccagatcattccccactgcgcggcctgttccgcgctaaggctgtcgcccagcagcgccagccccatcgcgcgcgcacggccggccacccgcggcaggaaccagctgccgccgcagtccggcaccaggccgagcttgctgaacgccatcacaaatttggccgaacgcgcggccagcacgatatcgcagcccagcgccagggtagcgcccgcgccggcggccacgccgttaaccgcgcagatgaccggtttcggcagcgccgccagacggcgcactaacgggttgtaaaagcgttctaccgacatgccgagatccggcggcgggccgctggggtcgacattgcggtcgttcaaatcctggccggcgcaaaaaccgcggccggcgccggtgatcagcaggcagcgcacgccatcatcgcgctcggcctgcttcagacattccgccagctggtgatgcatcagatcgttaaaactgttgaggcggtccgggcgattgagggtaatggtcatgacgccctgttccactgcgctgagaatgaaagcttccacgattagcgtcctttaaattccggggtacgtttttgtaagaaggcgtcgatgccttcgcggcggtcctcggtggcgctcagcaggctaaacagctggcgctcctgttgtagaccggcctgcaggctgacttcctgcgccaggcgtagcgactgttttgccgcccgtagcgccagcggcgaatggcgggcaatggtggttgccagtttcagggcatactcatcggttaacgccgccggatggatatcactgaccagcccggcctgctgcgcctggcgggcgtcaatactctcgccgctcagcaccatccggctggccagcgccttgccaacgctgcggatcagccgctgggtgccgcccgcgcccggcattatgccgagggtaatttccggcaggccaaagcgggcattgtccccggcgacaatcaggtcgcacagcagggccagctcgcagccggcgccgagcgcgtagccgttgaccgaggcgatgagcggcttagtaaaagcatcgattcgcgcccataaccgtgggcgaatatcatccagggtggcaggaagatctttttccgccatttcattgaggtcagccccggcggcgaaaaaacgcgcgttaccgcgaataacgcagacgccgacgctgtcatcaactgccgccgcctccagcgcctcggcaatctgggttaataaggcattgttcagcgcgttgcgggcctgcgggcggttcagcgtcaactgaagcacccggccatgacggtggatcagcaggtcactcatgccatcccccgcgcgtcaaagtcgaccaccacatcgccgctggtcggcagcgactggcagctcagcacgtagcctgccgccagctcatccgcttccaggctgtaattggcggccatcgccacttcgccgcgcagcactttacatttacaggtggcgcataccccgcccttacaggcgaacggcagatcggcgccctgacgcaatgcggcatccaggatgctgtcgtcttcggcgctgagggcgataagccgatcgcgcccgtcctggcggatggtcaccgtgcgcccttccgcctgcactccagcggcccgcttcacattgccgcctggggtattaaagcgttcgagatgaatcgatttctccgctatgccaagttcacgtaacgtcgcttccgcctcgtccatcatcgccgccggaccgcagataaaggcctcgtcgaaacggctgaaatccagcagatggtcagcgagctggcgcagtttgtcgccgtcaatgcgcccctgtagcagatcgctgtccatcgactcctggctaaacaggtggatcacctgcaggcgctgcggatagcggtcttttaaatcggccagcgcctggcggaacatcatgctatggctgctgcggttgccgtagatcagcgtaaagcggctttgcggctcggtcgccagcgtcgcgctaatgatcgccatcatcggcgtgatcccggagccggcggcaatcgccagatattctccctgccgttcggcctgcggttgataaccgaaatgcccctgcggcaccatcacctccagctccataccctgctggatatcgtgctgggcgtagcgcgagaagcgtccgccgtcgatggctttgaccgcgacgctaatttcgcctggcgtgcggctgtgacaaatggagtaacagcggcgcagttcttcgccgcccagacgggcttttagcgtcagatgctggcccgggcgaaaacagtattccgcctgcagggcttgcggaatcgcaaaagtgatggtcaccgcatcgcgggtttccggctcgactctcgccaccttaagcgaatggaacgtcgtcatggcaacctcaaatacatttaaagtaatcaaaaggttcccggcagctgtcgcagcgatagagcgctttgcaggccgtggaaccgaattcgctaatcagcgaggtatgggcgctgccgcagcgcggacagctcacctcaacgggcatgtccgcatggcaggcgtgcccctggggcgggctgatgccgtactggcgcaggcgctcgcgggcatcctgactcatccagtcggtggtccacggcggatccagctgcaggacgatatgtaccggctgaaagccatgctcgctcatgaccgtgcggatctcccccagcagatgctccgtcgccggacagcccgaataggtcggggtaaagccaatcacccagccgtcgccatggcgcgcgacgctgcgcaccataccaaggtcggtgatggtgagtactggcacttccggatccgggatcgcgcttaataatccccagatggtgcgaacctctgcaggagcgatatcggcaagacgttgcatagtcacctcacttaccactgcagtccgggatgcgaacgctgcagatactgcatctccgccagcagcgggccgagatgttcactgtgcagcccctgtttgccgccgctgcggaaggccgcttcctgcgggatctgtaagccggagtcgagaagcgccgtgtgtaccgcgctttgccattcggcctgcagttcacgcggatcaaccgcaatgccctgctcaaccaggctgagctccacttcatcagccaggaacagttcgccggtgaagcgccacagattgtcgaccgcctgctgcattttgcgatttgataattcggtgccgttacccagacgctccagccagccgcggctaaagcgctggtggtaacgcacctctttcagccctttagcggcaatggccgccagctgcgcgtcgcggctgttcaccagccggctgaacagggcgacatgccagacgtcgataaagaactggcgggcgatagtgtcggcaaaattgccgtttggctgctccaccagcagcaggttgctgtactggcgctcatcgcggccaaaagccagcgtatcttcgtcgccgcagccgttaagctcggcggcatagcttaaaaaattgcgcgcctggccgagcaggtcgaggccgatattggccagcgcaagatcgatctcgagctcgggagcatggccgcaccaggcgcctaaacgctgggccagaaccagaccattgtcgccaagccgcagggcgtaggtggctacggggttagggttattcatcgccgcctcacatatgttccatgccgtccggcacggtatagaaagtcggatgacggtagactttgctttccgccgggtcgaagaattcgccgcgatcttccggctgcgaagcaacgatttcgctggccttcaccacccaaattgagcagccttcgctgcggcgggtgtaggcatcgcgggcattctccagcgccatttgatcatcggcagcgtgcagactgccgacgtgacgatgggataacccctgtttgctgcgaacgaacacttcatataacggccagtaaactttactcatgttgtctctcctcctgccgcgctgcgggcctgctgtttttgcgcatgggccagcgcggcttcgcgcacccattcgccctcttcccaggccttacgcttggcggccaaccgctcgtgattgcaaatgccacggccgctaatcacctcgttaaattcctgccagtcgatttcgccgaagcggtagtggccgctggcttcatcaaactgcaaatccgggtccgggacggtcataccgaggatctctacctgcggcacggtattgttgacgaagcgctgacgtagctcgtcgttggagtgcagtttgattttccacgccatgctgcgggcgctgttcggcgagttgtcatcgttggggccaaacatcatcagcgccggccaccagaagcggttaatggcgtcctgcagcatctgccgctgcgcgtcattgccctgcgccagcgccatgcaggcttcaaatccctgacgctggtgaaagctctcttctttgcagattttgaccatcgcccgggcataggggccgtaggaggtccggcacagcgccacctggttgacgatggccgcgccatcgaccagccagccgatcacgccgatatccgcccagctgagggtcgggtagttaaaaatggaggagtatttcatctgcccgtcgagcatcttctgatacaggtcttcccgggcgcagccaagggtttccgcggcgctatagagatacagcccgtgtccagcctcatcctgtaccttagccaacaggatcgctttgcggcgcagcgtcggcgcgcgggtgatccagttgccttccggcagcatgccgacgatctccgagtgcgcgtgctggcctatctgccgaatcaaggtcttacggtaggcatccggcatccagtcctgcggttcgatggccgtttcctgcgcgatgcgctggtcaaagcgttgttcttctgtcacgtcatcacctttatgattccgatattcacaacaaaaaaatttatgtgaatcactttatttattgaaggttacatattggttaaataaaaccacaaattttgtttgctctttttgtgataatctccgcaaaaccttttgtaaaccacaataaatacagtaaattaagcataatgcgtaacgccatcgcgatcacaatgttaataatttattaaatacgggcttgcattttatgattcataaaagaactatttatagatatcacacgtaacacatttggagatttgcgatgcagcagttagccagctacttatccggcgcctggcagaccggccggggccgcgcccgtactatccatcacgccatcaccggcgcggcgctttgggaggtgaccagtgaaggcctggatatggcgcaggcgcgccgcttcgcgattgagcgcggtggcaaagccctgcaggcgatgacctttattgaacgcagcgcgatgctgaaagcggtggcgaaacacctgctggagcagaaagaccagttctacgccatctccgcgcaaaccggcgccactcgcgccgacagttgggtggatattgaaggcggtatcggtacccttttcacctatgccgggctcggtagtcgagaattaccggacgatatcctgtggccggaagacgagctcatcccgctctccaaacagggcggttttgccgcgcgtcatgtgctgacatcaaaatcaggcgtcgccgtccatatcaacgccttcaacttcccctgctggggaatgctggaaaaactggcgcccacgtggcttgccggtatgccggctatcattaaaccggcaaccgctaccgcccagctcacccaggcaatggtgaaagcgattgtcgacagcggcctggtgccggagggcgccatcagcctgatttgcggcggcgcgggcgatctgctcgaccacctcgatagccaggacgtggtgacctttaccgggtcagccgccaccggccagcagctacgggcgcaccctaacctggtagccaaatccattccctttaccatggaagcagattcactcaactgctgcgtgttaggcgaagacgtcactccggagcaaccggaattcgcgctgtttattcgggaagtggtccgcgagatgacggcgaaagccgggcaaaaatgtaccgctatccgcagaatcattgtgccactggctcagattaatgcggttagcgatgcactgatctcccgcctgcataaagtaaccgtcggtgaccctgcgcaggagggcgttaagatgggggccctggttaatagcgaacagcgtcaggacgtacaggagagcgtcaataagctgatagccgctggctgcgaagtactgctcggtggagaggcggatctcagcgcggccggcgcatttttcccgccgaccctgttgtactgctcacagccggatgaaacgccggcggttcacgccattgaagcttttggtccggtggcgacgctgatgccgtatcgcgaccgccagcatgcgctgacgctggcgcgcgccggcggcggcagtctggcggggacgttggtcaccgctagcggcgagctggcgcgcgagtttatcctcggcgccgcccgcgcccatggccgtattcagatactgaacgaggcgtcctcggttgagtcaaccggccacggctcgccgctgccgcagctggtgcacggcggccccggccgcgctggcggcggagaagagcttggcgggctgcgctcggtgaaacactatatgcagcgtaccgcggtccagggcagcccaacgatgctggcgaccatcggtcaacagtgggtgcgcggcgcccaggtgaacgaagaccgtattcacccgttccgcaaatatttcgaagagattcagcctggcgacagcttattaaccccgcgccgaaccctgaccgaagcggatatcgttaacttcgcctgcctgagcggcgatcatttctacgcgcatatggacaaaatcgccgccgccgagtcgatttttggcgagcgggtggtccacggctatttcctgatctccgccgcggccgggctgttcgtcgatgccggcgtcgggccggttatcgccaactacgggatggaaaacctgcgctttattgagccggtcaaaccgggcgacaccattcaggttcgcctcacctgtaagcggaaaacggtcaaacgtcagcgcagcgccgatgagaaagccaccggcgtggtggaatgggcggtggagattttcaaccagcaccagcaggcggtggcgctgtattccattctaaccctggtggcgcgtcaacagggagatttcccggcgtgatagcgaaaaatagatcgctggcgctctgttggccgaccctttagccattgatacagcaatcggtttgcaacggtttcgccccgggaagtcctttatgttatccgtggcttcagcgcacattgcgctcccggttaatcgtctgcgttatgcctggcatagcgcagggagcgcacagggggcggccagtcgccgccgccccctgtacccccgggctcgggccagcaagaatggtgaataaattaacggcaggccgcacagaccgtaggccgggtaaggcgtcagccgccacccggcaaaaaaatcagcgcacgttctcaatgcctctgcggaggcattttttacgcccgtctggcaaaactgacaaacaagctggcaaaagcaaacaaacgccccggcgccgctggctggtagcttaaggatgacaaagccgacattcgcagcggcaagagacaacacaacaataagatgaggtcacaatggcaaacggcttgaaattttctcctcgtaaaaccgcgctggcgctggccgtggcggtggtttgcgcctggcaatcaccggtcttcgctcacggtagcgaagcccacatggtaccgctggataaaacgctgcaggaattcggcgccgatgtgcagtgggatgactacgcgcaaatgttcaccctgataaaagacggcgcttacgtcaaagtaaagcccggcgccaaaacggcgatcgtcaacggtaaatcccttgacctaccggtgcctgtggtaatgaaggaaggtaaagcctgggtttccgatacctttatcaacgatgtgttccagtccggtctcgatcagaccttccaggtggaaaagcgcccgcacccgttaaactcgctctcggcggcggaaatcagtgaagcagtgaccattgtcaaagccgcgccggagtttcagccgaatacccgctttactgagatttccttacacgagccggacaaggcggcggtatgggcctttgccctgcagggaacgccggtcgatgctccccgcactgccgatgtggtgatgctcgatggcaaacacgtcattgaagccgtggtcgatctgcaaaacaaaaaaatcctctcctggacgccgatcaaaggcgcccacgggatggtgctgctcgatgacttcgttagcgtgcagaacatcatcaatgccagcagcgaattcgctgaggtgctgaaaaagcacggtattaccgatcctggcaaagtggtcaccaccccgctcaccgttggcttttttgatggcaaagatggcctgcagcaggatgcgcgtctgctgaaggtggtcagttatctggataccggcgacggcaactactgggcgcacccgattgaaaacctggtggcggtggtcgaccttgaagcgaagaaaatcatcaaaatcgaagaaggtccggtgatcccggtcccaatggagccccgtccgtatgatggtcgcgaccgcaacgccccggcggtgaaaccgctggatattactgaaccggaaggcaaaaactacaccattaccggcgataccattcactggcagaactgggatttccacctgcgtcttaactcgcgcgtcggaccaattctgtcaacggtgacctacaacgataacggcacaaaacgccaagtgatgtatgaaggttccctcggcgggatgatcgttccctacggcgacccggacgtcggctggtatttcaaagcctacctcgactcgggcgattacggcatgggcaccctgacgtcgccgattgttcgcggtaaagatgcgccgtcaaatgcggtactgctggacgaaactatcgccgattacaccggcaaaccgaccacgattccaggcgcggtggccatattcgaacgctatgccgggccggaatataagcacctggagatgggcaagcccaacgtcagtaccgagcgccgggagctggtggtgcgctggatcagcaccgtcggcaactacgactatatctttgactgggtgttccacgacaacggcaccatcggtatcgatgccggcgccaccggcattgaagcggtgaaaggcgtgctggcgaagactatgcatgaccccagcgccaaagaggatacccgctacggaacgctgatcgaccataatattgtcggcaccactcaccagcacatctataacttccgcctcgacctcgatgtggacggcgagaacaacaccctggtggcgatggacccggaagtgaagcccaacaccgccggcggcccgcgcaccagtactatgcaggtgaatcagtacacgattgacagcgagcaaaaagcggcgcagaaattcgacccgggcactatccgcctgctgagcaacaccagcaaagagaaccgcatgggcaacccggtctcataccagattatcccttacgccggcggcacgcacccggcggcgaccggtgccaaattcgccccggacgagtggatatatcatcgcctgagctttatggataaacagctgtgggtgacgcgctaccacccgacagagcgatatccggaagggaaatacccgaaccgttccgcccacgataccggcctgggccagtacgcgaaggatgatgagtcgctgactaaccacgatgacgtcgtgtggatcaccaccggcaccacccacgtggcgcgcgccgaagagtggccgatcatgccgaccgagtgggcgcacgcgctgctcaagccgtggaacttctttgacgaaacccctactctgggcgaaaagaaaaagtaatcttaaccggcggtgaaatccagcaggatcttaccgcctcttcccggctggccggcggcggcaatcgccgcccgcaggtcgttcaacgctatacgctgggccggcggctgggaggtcgtcggcaggcgctgccagatttcgtcgaacgctgcccgccacgccgccacgctgagtgtcggcagcgcctcccgcagatgaaacttgcgcaccgtcgcgctaccgcgcgtctgggtcagcggccgcccggataacagcccataggagatcagggtcgacgacccgggcagcaccgacagcagcgtattcgccagttcgccgcccaccgcgtcaaacaccagatcgctgtgctggctgaccttctccatcagcgcccggtcggtatcgaggatcggatagatcccggcctgttccaggcgcgcccggtgctgcggcgagcgaataatcccgctcaccgagcgggcgcccatcgccagcgcccactgccccagcagactggcgcaggaggacgatgccgcggtcagcacgaggtgttttccggcaaccggccagcgcttgagcatcagcatcgccgtcagcggattgatatacccgcgggcggccagcagatcgtcaactgccggcggcaccggcaccagccaggtctcatccagatcgataaaccgctgccaggtgccgcccccgcgcaggggcagcacccgctggcccgcggccagccggctgccgtatggcgcggcgaccacctcgccaaggccttcatagccggcgacggccggcagtcgggtgcggtggcgataggcgccggtcacggggatcagatccgaaggattcaccggggcaaagcgcatcctgacccgcacccgtccgcccgccagcggcgccagcggcaggcgtttcagggtcagcacggcggccggcggcccgtagcggtcataaacaatggcgtcgttgaacatcgactggctccagacaacgaaagtcgggatcatagcagatcccgcttccagtggctcgcacccgcgccagcccgggtcagcccgggccgtcgctggccgccgccagcaacggcacgatgatatcgctgagcggcgtcggaatgccgtgctggcgcccgcgacgctgcaccacgccgttacgaatatcccactccagcggtcggccattgaggcgatcgatcagaatagaggtgcttaagtcggcaggcgcccgatgaaagccggcgataatctcctccggcacgttgtcgctcagggcggccccttccgcccgcgccacctgcaggcattcgcgcagataagccagcccgagggcagtgatgtcctcccgggcgaacatcccggcgcgtcgtccggtcagcaccatcagcccggcaaccgcgttctgcaacagtttgcgccaggccacggtggtaaaatcagccgccaggtccaccgcgcagcgggttcccgccagcgcctgctgcacccgctctgcccccggcagatccggcagcgtcaggcgcgtcgtggcgcgcaaccagacagaggcatcggcatcgcgctgcgccgggaaccagaccaccgacggcagcaccgtcgcgccgacggtcaagggggcaaactgctggcgctgctcaacgccgttttgcagcacgcacaccacggtgtcaggggaacacagggccgtcagccagggggcgatggcctccgtctgggtggttttcaccgcgacaaagaccaggtcgaagggggcggctatcgccatcgggtcggtgtgcaccgggccgggcaccacgatctcaccctcgtcagtgcgcagcaccagcgccgaatgggcggtacgcccgcagaccatcggcgccctccccctctcaaacagggcggcggcaatcgtggtgccgatggcgccgggaccaattagcgcaaccttaggaaatgctgtcatgccgaagacctcctgatgattcaccgcccagattaggcaaagattgccctccacagtagcgagaaagaccggaggtcggcaaggggcgcgtcgggaaaagcctttcgccttccccgacggagggctagtagcgcacgcagacggatttggtttcgcaccagccgtcgagccagtcagggccgaaatcgcggccggtaccagactgcttcatgccgccgaaaggcaggttggcgtcaatcagggtatggctgttgacccataccgttcccgcctgcagacggtcggtgtagttcagggcctgggtcagatcgcgggtccagacgctggcggtcagaccaaaatcgctgtcgttggccaggcgcagcgcctcctcgccatcggccactcgcaccaggttcaccaccgggccaaaaacctcctcacggctgagacgcagtccggcgtcggggtttaccaccagcgttggcggaatatagtaccctcccgcatctggtccggcgctgccgctgatgagctctgccttctgctggcgagcctcttcgaggtaggccgccaccttgtcgcagtgggcccgggagaccaccgggttgatctgcgccgtctcctgcatacccggccccacctgcagcgatttcaccgcctgctcgaagccgctgaccagggtgtcaaacagcggcgcttcgatgtagatccgcgagctggcggcgcagacctgcccctgattgaggaagcttccggtcatcagcccctcaataacccactgggggtcggcgtctttgagcacaatcgccggattcttgccacccagctccagcgtcacgcgggtcaggcggtcggcagccacgcgggcaatctgtttcccggtcgccgtcgagccggtaaagctaaccttcgccacctgcggatgggcggtcagcgccgcgccgcagccggcgccgctgccggtgaccacgttgaacaccccgtcaggaatgcccgcctgggtcgccagctccgccacccgcagcagggtcagcggggtggtttccgagggtttgatgacgatcgaacagcccgccgccagggccggcatgaccttccacatgccgatcatcagcgggaaattccacgggacgatgcccgccaccaccccgaccggctcttttttggtccacgcctggtaacgcgccccttgcgggaacgggatcgaaacgtccagcgtccggccgctgatcttggtggtcagccccgcggtgtagcgcatccagttcagggtgcagccgacctcaaaggcgcgggagatggcaatggatttcccctgctcgagggtttccagttgcgccagctcttcgccgtgctgctccaccagatcggcaaaacgcagcaggatgcgttcacggtcagccggggtgcgcccggcccagcggcgatcgacaaaagcgcgccaggcggacatcaccgcccggtcgacatccgccgggctggcgtcggcggtggtggcaatcgcctgcccggtggccggatcccagacggttaaccggttttcgctctgcgcggcgcagggggcgccgtcgatatacaggccatgctgacggtctaaaaactgctggacgctggcaagcagcgctatctgtgaggtggacataccctttccttattcatcgcggatagtgctttcagtctatgtctggttggcggttggcgcttttttctctgtgacattcgtttgcgccgctgtgacagtcgccgcaattccgtcgtctgccctcgcagaaatgtgccgcgggtaatagttctttcatatacccgccatcgcgcccttgcctgaggcgacacaaatgcaacaatgcggaaacattgttattacaggagaagggcgaatgatgaccacggcagagggggggctggcatatcagcgctggctggcgacgatcaatcaggtctgcggccatttcgccgcccggccgctgaaggagagtttccacggcgagattgacgcccgctacgccggcagcctcaaggtcagtaccgtcaccgccgccggcgtcaatctctaccgcacgcgcaatgagataaaacgcgataacgacgcctggttctataccgtgtttcagctcgccggcgaagccatcatcgaacaggacgatcgccaggtgacgctggcggcaggcgatatcacgttaatcgacgccgcccgcccctgctcgattgtctggcagcagacctcgcgtcaggcctcgctgctgctgccgcgccagcgggtggcgcccacaggggacatcactaccgcctgccggctggacaaatctctgccaatggtccagctcagccagcgactgctgctggaaagcatgggcggcacgacgctctccgccagcgagagcgaagccgcgctggaggcgatcgcctgcctgttgcgcccggtgctgcatcagcgcgatcctgccccttcccggcgggaaaagcagtttcagaagattattgcgttaatcgatgcgtccattcagtcggagcatctgcgtccggagtggctggccagcgagacgggcatgtcggtacgcagcctgtaccggctgtttgccgaccaggggctggtggtggcgcagtatattaagaaccggcggttggatctgtgtgcccaggcgttacagaatgtccatgacgatgaaaagctggcggggatcggctaccgctggggcttcagcgaccacagccatttctccaccgcctttaagcagcgctttggcgtcaccccgggggaataccgcaagcgctgtcgctaattatttgcgcagccactggccgttcaatccctggacgtactccccgggctgcgcgcgggccaccagcttctgcccagccattttcgccacttcatccaccggcagattgttgtcatccgccagctgctggtagctttcgctgcgcgcggcgttaatctgctttaccagcgccagcgtctctttatcctgacgcagcggcgcgagatagccgttcagcgtctcccccactcgtccctgctggcgcgcttcgctcagggtcaacgccagcgcgggcgcgcagagtaaagccagcgtcagcgccgcggttaacagtcgttttctcatcgtcgcctcagaacaaatcgctgcgggatttgagcaggttttccacatccttatcgaccttgatatggatctcatgctcaattttgacattcatattgatggtgatgggctctttcgacgccgcgatttcgatgcgcggcgtacagccggcgagcagcatcgacgccaccatggccagtaacagcttcttcatttaggttccttacatgtcttaccgtccgtacagcgccgtacgggcagcgtagcattctgctcgagccacgcctgtaaattgtcgccgaagcgcaaactgcgccacaggtcgaaaatattctcttcatgagcgtagtttaaatgcacggtactacttttcccttccacccggctggtgccgttgatgctggccttaagcgtcaacacgcccagattatcgaggttaatctgcgtccacgagcgggagatttccatatagcgcagccagttaatcgccgccccggcggagacgttatccgccaccagcgcatcggcggtgtctttatccagccgcagggtcatcggtccgtcattgcgcagccagccgtcgtggatgatccattgattattctccagccacagcggcagcgcgccgctcaccgcgccggacatggcgaactgtttcaccttgacggcgctggtcagttcgctgctggagatatgctgcaggcggatcaacgccgggtcgcgctgcggcatacgcagctgcagcaacgtcagtttcccgcctaacagatcgacgctgacgtcgctgagctgcagcggattggcctcgctccacggccaggtgccctgcaggtccgccgtcagattacgcgcggtgacctggttgacgatttcgccaatgcgcagggagaccgggcggcggatgcccagctgccagtgaccgtcgctgaagcggaacggcaggacgaaatcgacgccgttgatctggttatccggcatccaggcgctgccgcccttcaggacgccatggccgcccgcctcaaatccctgcccggctgccgccgagaaggccacctgcgcgtagagactgccttcgcgcaggttcatcttccagtccggcggcaccagcggctggaacaccgttagcgactgttttggccaccacgcctggccgcgcagccgttcgccatcccagcgcccggacagacgcaccggaccgatagcctcggcatgcagggcgccggtgaactggaaccacgttgggtcccgaccgtcgagagcgaatttcagcgttgaggccgggagatagctgccgccggagaaggtggttttggcggcgtccagcgacagcgcgccggtcaaccgcggatgctcagcatcgcgcagccagcggatcggctgctcgagggtcagacgcggggtgctgacccgcattgtgccgtactcaagcttatcgaagccggtggagaggctgctcagggtaatagcattgtcgcgccactccccgctgcccttcacatcccagcgcgcctgcatcggggtaaaatgtccctcgccccagtagcgccactgccagcggccgctgtcgggcagaaaatcgctcgcctgaccgtccagatgcagcgtaaagtcgcccatctgctgctcatgggcgcgaaggatcgcctgcaggcggccatcgacgccctgctgagtgaccttaaccccggccagcggccagcggatttcgtcaatattcagcgcgtcgatcacccgcccgcgcgagcgcagcaacgcaccggggtgaaaagccagctgcgggctgatcagcggcccgctgagctgagccggcagcgccgcgtatagtatcatctcccccagcttggcctcgccggtgagccgcagcggcagatcgctgttatccatgctcagcttgcccggaccaatattcagtaccgcattgcccttcccggcatgcccctcggtgagaacattcaggcgaccgctgacgatcatctgttcggtgccctgctgccagttacccaccgacagcgccacccgcccgcgcagcggatacgcctcgtaacgggtgcgccagcggccgtcgctgatggtgatccgctccggagtgatctcccacggcaggtccagaataggctctacctcaccccgcggggtgaccagcagctggccgcgattgtgctgccactcgagctcagcatcgatccattccgcagtctgcgggaattcgaaggtgccctgcatctggccgtcgaccggcagaccatccggcaccagcggcagatggaaggtccccaccagcttcaccggcggctgatcgtcagtcagccgggcgctgaactggctgacggtgagcgcctggccgcgcaggcgcgcctgcagactcagttccttcccggcaaagccgatatcctgctgcgcaggcgttaatgacattaccagccgcccctgccatttctcccacggcgagagccgcagattgtcaacggttaaccagctatagggcaacatcgattgccattcggcaagcgtgcgcggtgaaccgggagagggatcgctggcaggcagtttgctcaggcaggcgctgttgatctccagctggccaatatgcagccgccagcggctgggacgcgagagacgggcatcggtcacccgggcgatttcacagtcgcccaccagataacgcagatcggggatcagcagggccgaccgcgtcaggcgcgggctctcctgcaaagagatacgcgtgcccacgggcagccagatgcccgccagcgtcggcacccagtgggttagcgtcaacagcagggttagcggcaataacaccagaactaacaccagcgcgatggcggctttatatttacccttcatgggcagttaatatcctgattcaacataagtaaaagctgaaaggcgtccattgtgacacgttcgaccagtgagtgaaagtttacggcctgttaaagcatagttgccagccggactcgcggcgcgacgttcggccattatcatttaactgttgtttaagtcgcccctgccacactccagccagacgggaatagcttgcgggagaggcggtgtcgttaattatctcgctcatagagagcgcacaggaccactatccatgggtattgctgattgtttttctgcttaccttcactaaatcctgcgcattggtctcgctggcaatccccggcacctccggcctgctgctgctggggacattcgcttccgccagcctcggacatttcctgttaatgtggtccagcgccagcctcggcgccatcggcggattctggctatcgtggcggctgggcattcgctaccgtcatcgcctcacccatctacgctggctgaccgccgagcgtctggcccgcagccgcctcttctttcagcgctatggctcgtgggctatctttttcagccgctttctctctcccctgagggctacgctgcccttcgttagcggcgccagcagtctgccgctgtggtcgtttcagctggctaacgtcagctccggtctgctgtggccgcttctgctgctcgcccccggcgctttcagcctcagtttgtggtgaaaaacactgtctttcaaagagattccgcaagtccgcgatatgctctagaattaggattagcaccctctcattaaactattttttaataattgtacgattattttaaatatgctaccgtgacggtataatcactggagaaaagtcttatgaaaatcgcggtttatagtacgaagcagtacgataaaaagtacctgcagcacgttaatgatgcatacggctttgaactggaattcttcgatttcctgctgacagcgaagactgccaaaaccgccaacggttgcgaagcggtatgtatcttcgtcaatgacgacggcagccgcccggtgctggaagagctgaaggcccacggggtgaaatatatcgccctgcgctgcgccgggtttaacaacgtcgaccttgaggcggcaaaggagcttggcctgcgcgtcgtgcgcgttccagcttactctccggaagcggtcgctgagcatgcgatcggtatgatgatgtcgctcaaccgccgcatccaccgcgcttaccagcgtacccgcgatgccaatttctccctcgaaggcctcaccggcttcaccatgtacggcaaaaccgccggggtgatcggcaccgggaaaattggcgtagcgatgttgcggatccttaaaggcttcggcatgcgcctgctggcgttcgacccgtacccaagcgccgccgcgctggagctgggggtagaatatgttgacctcgccacgctgtacaaggaatcgaacgtgatctccctgcactgtccgctgaccgacgaaaactaccacctgctcaatcgcgaagccttcgatcagatgaaagacggggtgatggtgatcaacaccagccgcggcgccctgatcgactcccaggcggccatcgacgccctgaagcaccagaaaattggcgcgctggggctggacgtttatgagaacgaacgcgatctgttctttgaagacaaatccaacgacgtgatccaggacgatgtcttccgccgcctctccgcctgccataacgtgctgtttaccggccaccaggcgttcctcaccgccgaggcgctgatcagcatttcggagaccactctgggtaacctgcagcaggtcgccaacggcgaaacctgtccgaacgccatcgtctgacgcctttcccttttgtgctcctctcccggggggagcacattcagataacccccacagatccctgctgcgataccgttacactggcttggttttattagttatgtgaatgttttggagtgaaaatgaacaaatttgcggcgcttctggcggcaggtatgctgctgtccggctgtgtctataacagtaaagtgtccaccggtgcggaacagctgcagcatcatcgtttcgtgctgaccagcgtcaacggccaggcggtcaacgccagcgaccggccgctggagctgagcttcggtgagaagatggctattaccggcaagatgtatgtatccggcaatatgtgcaacggctttagcggggaaggtaaagtgtcggacggcgagctgaaggtcaaatcgctggcgatgacccggatgctgtgccacgacgcccagctcaataccctggatgcgacgatcgacaagatgctgcgcgagggtgcgcaggtcgatctgacggaaaaccagttgacgctggcgaccgccgaccagacgctggtctataagctcgccgacctgatgcactagccggcgttgatgtgccgctgacgctgccccgcgacggggccgctgttagtagccgcagctgccgcccgccagcgcctgctcgctgcagcgtttgccgttcggcagcgcgcacatgccaatcgccgaaccatcgagctgacgagccaccgataacgagccgcctatcatggcgcagttggcctgaccggcgtcgctcatcgccgcccgcattcccggcgtgacgtgcgccgccgtggcctgctgaacgggttcactactgcacgcggacagcaacagcgccgcacatcctactaacatcgcagctcgcattctctctcccctcagaaacgtcttaaaaaagcaaaccccagaataataggcagcgtggcgggcggcgtcgagaggggaagtacgtatttatgcgcctcattaacattttctagcaaattttcgccgaaagcttgatctgcctcggccatgtcgcccggcgcaggtggttcctctcccggcaggcagccattttctccgcgaaccacgcaaaatattgatctggtcacgggtacccggcgcattgaggacacaaatgcaaaaatggcggggtcagcggtttgctaaactaccccttatataattacagggcgcgtcgcggtttcacgcgtccattcttttgcgcaatgtaagggtgtcttcatatgattacgattgatggtaatggcgcggtcgcttccgtcgcgtttcgcaccagtgaagttatcgccatctacccgatcacgcccagttcaacgatggcggaacaggctgacgcctgggccggcaatgggctgaaaaacgtctggggcgatgttccccgcgtggtcgaaatgcagtcggaggcgggcgccattggcgccgtacatggcgcgctgcagaccggcgccctctccacctcctttacctcatcgcagggcctgctgctgatgatccccacgctgtacaaactggccggccagctgatgccgtttgtgctgcacgtcgccgcccgcactgtcgctacccatgcgttgtcgatcttcggcgaccattccgatgtcatggccgtccgccagaccgggtgcgccatgctgtgcgccagcagcgtccaggaagcgcaggatttcgcgctgatctcgcatatcgccaccctgcaaagccgggtgccgtttattcatttctttgatggtttccgtacttcgcacgaaatcaacaaaatcgccccgctggcggatgacaccattcgcgccctgctgccgcaggataagatcgctgagcatcgccagcgcgcgctcaatccggaacacccggtgatccgcggaacctcggccaaccccgacacttacttccagtcccgggaggccaccaatccgtggtacgacgcggtgtatgaccatgtcgagaaagcgatggacgatttcgctgccgccaccggccgtcagtacaaaccgtttgagttttacggccacccgcaggcagagcgcgtgatcgtcattatgggctcggccatcggcacctgcgaagaggtggtcgatgagttgctgagtcgcggcgagaaagtcggcgtgctaaaagtccgcctctatcgcccgttctccgccgcccacctgctggcggcgctgccggaaagcgcccgcgcggttgccgtactggatcgcaccaaagaacccggcgcgcttgccgaaccgctttacctcgacgtgatgaccgccctggcggaagcctttaaccgcggcgagcgcgagacgctaccgcgcactatcggcggccgctacggtctctcctccaaggagtttggtccggaatgcgtgctggcgatattcagtgaactgcaggccgcccagccgaagccgcgctttaccgtcgggatctatgatgacgtgaccaacctgtcgctgccgttgggcgaaaataccctgccggcagaggccaagctcgaggccctgttctacggcctcggcagcgacggcagcgtgtcagccaccaaaaacaacatcaaaatcatcggcaactcgaccccatggttctcccagggctattttgtctatgactcgaagaaagcgggcggcctcaccgtctcgcatctgcgggtcagcgaaaaaccgattcgttcatcgtatctgatttcgcaggctgatttcgtcggctgccaccagctgcagtttatcgataaataccagatggccgagcggctgaagcccggcggcattttcctgctcaacacgccgtacagcgccgatgaggtctggtcccgcctgccccaggaagtccaggccaccctgaatcagaaaaaagcgcgtttttacgtggtcaacgcggcaaagatcgcccgcgaatgcagcctcggggcgcgcattaataccgtgatgcagatggcctttttccatttaacccagatcctgccgggtgatagcgcgctggcggaactgcaggcagccatcgccaaaagctacagcagtaaaggtcaggagctggtggagcgcaactggcaggcgctggccctggcccgtgaatcactggcggaagtaccgctccagccggtgaacgccagcagtccgaaccgcccgccggtggtctccgacgccgcgccggatttcgtcaaaacggtcaccgccgcgatgctggccgggctcggcgatgcgctgccggtctctgccctgccgccggacggcacctggcccatgggcaccacccgctgggagaaacgcaacatcgccgaagagatccccatctggaaggaagcgctgtgtactcagtgcaaccactgcgtcgccgcctgcccgcactcggcgatccgcgccaaagtggtcgccccggaagagatggagaacgcccctgccagcctgcattcgctggatgtgaaatcccgcgatatgcgcgggcagaaatacgttctgcaggtcgccccggaagactgcaccggctgcaacctgtgcgtcgaagtgtgcccggcaaaagaccgccagaacccggagatcaaggccatcaatatgatgtcccgcctggagcatgtggaagaggagaaggtcaattacgagtacttcctcaacctgccggaaatcgaccgcagcaaacttgagcgcattgatattcgcacctcgcagctgattagcccgctgtttgaatactccggcgcctgctcgggctgtggcgaaacgccgtatatcaaactgctgacccagctctacggcgaccgaatgctgattgccaatgccaccggctgctcctccatttacggcggcaacctgccctcgacaccgtacactaccgacgccaacggccgcggcccggcgtgggccaactcgctgtttgaggataacgccgaattcgggctcggcttccgcttgaccgtcgaccagcatcgccagcgcgtgatgcgcctgctgagcgaattcgccgacaaactgccggcagagctgaacgcggcgctgcacgccgaggcgacgccggaagttcgccgcgaacaggtggcggccctgcgtcaggcgctggccggcgtggcgggagctgaagagctgctgaccgatgccgacgcgctggtggagaaatccgtctggctgatcggcggcgacggctgggcttacgatatcggcttcggcggcctggaccatgtactgagcctgacggaaaacgtcaatattctggtgctggacacccagtgttactccaacaccggcgggcaggcgtcaaaagccaccccgctgggagcagtgactaagtttggcgagcatggcaaacgcaaggcgcgtaaagatctgggcgtcagcatgatgatgtacggtcatgtttatgtggcgcaaatttcgctgggcgcgcagctgaaccagacggtcaaagcgattcaggaagcggaagcctatccggggccatcgctgatcatcgcctatagcccttgcgaagagcatggctacgatctggcgctcagccacgaccagatgcgtcagctgaccgccaccggcttctggccgctctaccgcttcgacccgcgtcgggcagacgaaggcaagatcccgctggcgctagattcccgtccgccatcagacgcgctggccgagacgctgcttaatgagcaacgtttccgccgcctgaacgcccagcagcctgaagtggcggagcagctatggaaagacgccgccgccgatctgcagaagcgctatgacttcctcgcccagctggctggcaaagcggagaaatcgccaagcgaaggttaaccgccccgtcacctctgtccataaaaaaagcccgaacacaacgttcgggcttgtcgttttaccgataaacaacatcattccgcagaatgagacggcaacaataaattattggcatgacaataaaggcatataacgcgcaaataatacgtgattagcccgggcatgtataatttttattttgtatattatctataaatgcattcagcataattatcaccatttcattggtattatttattttagattttacttatatcgtaacaattgagtcttaccggatctcagaccgctcctttagcatgagttcacttcccacccggaagttaaaacataaaaacagttaaaggaatttcttcatgaaaagaaaagtactggccctcgttattccggctttattagccgccggtgccgcgcatgcggcggaaatttataataaagacgggaataaattagatctctatggcaaggtagatggtctgcattatttctccagcgactcgaaaaaagacggcgatcaaacttatttacgttttggctttaaaggcgaaacccagatcaacgatatgcttaccggctatggccagtgggaatataacgttcaggccaacaacaccgagacctccagcgatcaggcgtggacccgtctggcattcgccggtatcaaagtgggcgattacggctccttcgactacggtcgtaactacggcgtgctgtacgacgttgaaggctggaccgatatgctgccggagttcggcggcgactcctacacctatgcggataactttatggcaggccgcgccaacggcgtcgcaacctaccgcaacagcgatttcttcggtctggtggagggtctgaacttcgccctgcagtatcagggcaaaaacgaaggccagaacgcgcaggatatgaacgtcggcaccaataaccgcagcagcgacagcgatgttcgcttcgacaatggcgatggtttcggcctctctacttcctacgacttcggcatgggcatcagcgcggcggcagcttacacctcgtctgaccgtactaacgatcagatgacccagaccaacgcgcgcggcgataaagcggaagcctggaccgccggcctgaagtacgacgccaacgatatctacctggcgaccatgtactctgaaacccgcaatatgaccccgtacggcaatgacggcgtggccaataaaacgcaaaacttcgaagtcaccgcgcagtatcagttcgacttcggcctgcgtccggccatctcctacctgcagtccaaaggcaaagatctgtacaataacggccgctatgccgataaagatctggtcaaatatatggacgttggcgcgacctattacttcaaccgtaatatgtccacctatgttgattacaaaatcaacctgctggatggtaacgacaaattctacgaagacaacggtatctctaccgataacatcgtcgccctgggcctggtttaccagttctgatgcgcctgcccgccggttccggcgggctttcccccacccgcctcgctgcagataaaacaaaacgctatatctcgcggactaaaatagccgtccgtttaatgatatagtcatggccagtcagtgcttgcccgaggacgtccatcatgcaccaccatccggttaaatcttcccgaattatctccgtcgcctacgatgacgcctccgccacactggaaatctatttctatcaccagccgccattacaatataccggggtcccaccgcgtatttttcatgattttttacaggtggtgtcaaaaggccggtattatgacggggtgatcaaaggaaaatttcccgaacgcaagctacgttaatgtcaaagtgtgactgcggtcatgatacaaaacgtgccctaataccgtacaatatgaagggatacttaaacaggaggttttatgagcagaatgattcttgtccctatcgatatctctgataaagaatttactgaacgcattatcagtcacgttgaatcggaagcgcggattgacgacgccgaggtgcatttcctcaccgtgatcccttctctgccctattatgcctcactgggaatggcctataccgctgagcttcccggcatggacgagctgcgtgagggttctgaaacgcaattgaaagagatcgcgaagcagttctccatcccggaagaccggatgcattttcacgtcgcggaaggatcgccaaaagataaaatccttgcgctggccaagtcgctgccagccgacctggtgatcatcgcttcgcaccgaccggatattacaacttatctgctgggctccaacgccgccgcggtggttcgtcacgccgagtgctcggtactggtggtccgctaacgccgcagcccgccgcccggcgggctttttatttccgcatcagccgcccccgcctggctgctcgctgccgaaagtgccggaaagatgctgacattccgcccctgaatccgtaccatacacgccacggttgcctgtcaaacctcaataattgctacgcgccagcgccacgttgttcagcggctggcagaatgcgtgctcttctgatgccacactatgaattgagccactattacatgctgcaaaaccaagaaatcagtaaaaaagaaaagtacaacatcgataagctgcagaaacgtctgcgccgcaacgtcggtgaggcgattgccgacttcaatatgattgaagagggcgaccgcattatggtttgtctttcaggcggcaaggacagctataccatgctggagatcctgcgcaatctgcagaaaagcgcgcccatctccttctcgctggtggcggtgaacctcgatcagaagcagccagggttcccggagcatattctgccggcgtatctggagcagctgggggttgaatacaagattgtcgaagagaacacctacggcatcgtcaaagagaagatcccggaaggaaaaaccacctgctcgctgtgctctcgcctgcgtcgcggcatcctctatcgtaccgccaccgagctcggggcgaccaagatcgccctcggccatcatcgcgacgatatcctgcagacgctgtttttgaatatgttctacggcggcaaaatgaaagggatgccgccgaagctgatgagcgacgacggcaaacacatcgtcatccgcccgctggcctactgccgcgaaaaggacatcgagcgcttctcccaggccaaaggcttcccgattattccgtgcaacctgtgcggttcgcagccaaacctgcagcgccaggtgatcgccgatatgctccgcgactgggacaagcgttatcctgggcgcattgaaaccatgttcagcgcgatgcagaacgtggtgccttcgcacctgagcgacgtcaatctgtttgattttaaaggcatcacccacggctcagaggtggtggatggtggcgatctggcgtttgaccgggaagatattcccctgcagcccgccggctggcagccggaagaagaagacgcccgtctcgatgagctgcgtctgaacgtagtggaagtgaaataaccctcacgcgtctcaggcagccgcctgagacgcactctcctgcccttacttcagcagtcgtacgcggcaggatttacctttgatcttgccattttgtaactgcttatacgccttctgcgccatattctggcggatcgccacatagacgtgggcagggtggacggtaattttgccgatatcggcaccatcaaagcccatatccccggtcagggctcccagcacatctcccgggcgcattttcgcctttttcccgccgtcgatacacagcgtcgccatctccgccgtcagcggcgcgatggtgttgcccgtcggcgccggcagccagttcagggaaagctgcagcatgtcggccagaatagtggcgcgctgcgcctcttccggcgcacagaagctgatggccagcccttgttcaccggcgcgggcggtacggccgatgcggtgaacatgcacctccggatcccaggccagctcgaaattcaccaccagcgccagggatttgatgtccagaccgcgggcagcgacgtcggtcgccaccagaacccggacgctgccgttagcgaagcgcaccagcgtctgatcgcgatcgcgctgctcaaggtcaccatgcagcgacaaggcgctctgcccggcggcgttgagcgcatcgcagaccgcctggcaatcgcgtttggtattgcagaacaccacgcaggatgcgggctgatgctggctgagcaggcgctgcagcagggcaatcttaccgtggcgggaaacttcaaagaactgctgctcaatcgccgggagcgcgtcgacagtgtcgatctcaattgtctgcggattgcgctgcacccggccgctgatcgccgcgattgccgccggccaggtagcagaaaacagcagcgtctgccggtcagccggtgcgaagcggatcacctcatcaatggcatcgctaaagcccatatcgagcatgcggtccgcttcgtccatcaccagggtctgcagcgcgtcaagggagaccgttcccttctgcagatgatcgagcagacggcccggggtggcgacgataatatgcggggcatgctgcagggaatctcgctgggcgccaaagggctgcccgccgcagagcatcagaatcttgatgttcggcaggcagcgcgccaggcggcgcagctcgccggcgacctgatcggccagctcgcgggtcgggcataacaccagcgactgggtctcgaagcgcgccggatcgatatgctgcagcagacccagcccaaatgcggccgtttttccgctgccggtttttgcctgcacgcgcacatctttccccgcgaggatcgccggcagggcggcggcctgaaccggggtcatcgacagataacccagctcgttaaggttggctaattgggcggcaggtaaaacagtcagggtagaaaaagcggtcacaatgtattctcgtattaaaaggcagacaatctgcaggcgcgtatcctcgcagatctccgcgcctgatgcgacaatttaatcggctcttcgtcaggcggcggatcgggctggggctgcggacgcggtcgtgggtcgggtaaaggagccggatcgttcggctcgggcgagatagggatagactgggctgtcagccctgaagcgtaatacatagaggcctcccggagagtgatacgggcgtacccgcaagcgtcaacggccagaaaccgtcgggtgtcctagtaagggtagaagctggtccggagagcgcaaaaaaaaagccgactcaacaaagccggcgtcgtacgaatcaattgtgctatgcagtaattcaaaaaaggaagtaagacaatatggagcgcaacgcccatcgcttgacgttgcattcacctgcgagagagatattgccctgaatgggtagatggtttattgatttcgctcaaacattgccgggttttcccggcactacagccgctaaaaggcgattctttacagccatttactgcgatgtaaccaccacgcaacaccaccgatgacaacgactaacatcaagcagaaaaggctaaaccccagatgccagctgttgccagggatcccgccgaggttgacaccgaacaggccggttaaaaaggtgctgggtagaaacaccatcgccatcaatgacatggtataggtccgccgcgccagcgactcctgcataatctgggcgatctcgtcgctcatgatcgccgtccgcgcgatacagctgtcgatctcatccagaccgcgccccagccgctcggcgatatcctgcattcgccgccgctgatcgtcactcatccacggcagccgctcgctggccagccgggcataaacgtcgcgctgcggcgccatatagcggcgcatcacaatcagctgcttacgcagcagcgcgagaaatccgcgcggcggcacctgctgatcgagcaggtcgtcttccaggtcgataatgcgatcgtgcagttgttcgataaactcgctggcatgatcggtcaacgcatcgcagacctccaccagccagctgccgccgtccgtcgggccattaccttccttcaggtcgcccagcacatcgtccagcgccaggactttgcgctgacgagtggagacgatcagccgctcatccatatacaggcgcatcgccaccagctggtcgggccgctcatcggtactgccgttgatacagcgcagggtgatcagcgccccgtcaccgatccgcgtcacccgcggccgggtgctctctcccgccagggcatcgcgtacgttattgggcagcaacggggtggccgccagccagtcggcgctgtcgctatgggtatagttgagatgcagccagcaaggcttgtctttgtcgataatatcgtcatcggcgagcggcttaacgcccccctgcccgtcgagcacccacgcgaagatcgcgtccggtatctgcaactccgagcctttaatcgcgtccactcaacctccgttaatccatatctgctaaattacgcgccttctctataaggtacgcgaaagcgcgcattcttgcttttaatgacccggaaatacaggcctagtcgcttcattgaaaagcgctttcgccccggtcgcggcgctcccctcatttaacgttaaaacttagtgaaatcaagttcttcacgattcaacacatacagagcgacgttttgccgtttattttgcaacttcttgctgtattatgctgtttattgcgttaatttgcggagtcaatggccatgcataagctcgccaggcaaaaacatattctcgacaggcttagcgaaaccggtcagctgagcatcagcgaactggttgcagatctgcaggtgtcggccgataccattcgccgcgatctgagcgacctggaacaacagggcgtgctgcagaaaagccacggcggggccatcgcccttaacgtcccggccatgacgcgccagggcagaaacgctcttctcacccagaccaagcagcgcctgggtcagcaggtggccgcgcgcattccctctggctcgacgctgtttctcgacgccggaagcacgctgctggcggtggcagcccagctgaaagggccgttgaccgtgatcacggcttctctggatatcgctcagctgttcagcgaccgtgccgatatccagctgatcctgcttggcggccagtgggatagtaaacaacggctgttcgccggcagcgccaccctgtcgctggtcacccgctaccgggccgatatcgccattctcggcacctgcgcgctccatgccgggctggggctgagcgccagccaggaagctgatgccgacgttaaacgcgccatgctggccgccagcgccgagcactggctggtggcggaccataccaaactcaaccgctgcgaaccgtggcgggtggccggactcagcgacattcaccatctttttcttgatcgtccctgggctgagctgggggatgaccccgccctctctgtacatattgctgacgcttaacaacgtggagaacctgatgagtaacaacacgataaatatcgccctgattggctacggattcgtcggtaagaccttccacgcgccgcttatccgttcggtgccggggctgaacctggcgttcgtcgcttcccgcgatgaagagaaggtcaaacgcgacctgccggacgtcacggtgatcgcctccccggaagctgcggtccagcatccggacgttgacctggtggtcatcgcctcccctaacgccacgcacgccccgctggcccgcctggcgctgaacgccggcaaacatgtggtggtggataagccctttaccctcgatatgcaggaggcccgggagctgatcgccctggcggaggagaaacagcgtctgctttccgtcttccataaccgccgctgggacagcgactatctcgggatccgtcaggtgattgagcaaggcaccctcggcgcggtgaaacacttcgagtcgcatttcgaccgcttccgcccggaagtccgcgtccgctggcgcgagcagaacgtcccgggcagcggcttgtggttcgacctggggccgcacctgatcgaccaggcgctgcagctatttggtttgccgcagtcggtgcaaggtaacatagccaccctgcgcgacggcgcggagatcaacgactgggcgcatgtggtattaaactacccggcgcataaagtgatcctgcactgcagcatgctggtcgcgggcggctcgtcgcgcttcaccgtgcacggcgataaaggtagcgttatcaaagcgcgggccgaccaacaggagagccagctgctggcgggcgtggtaccgggcagcgccggctggggccaggatgacgacccgctggttatctatgatgcctcgctgcaggcccacgcgcaggctaccccgcagggcgatcagcgccagtactatatgctgatccgcgatgcgctgaagggccagctcgccaatccggtgccgccggtggaagcgctggcggtgatggccgttctggaagcggcggtgcgctctgctgaaagtggtatggtgcagaccctggacctgtccgacgacgagcgcaacacgctgcgctaatccgccctgttctccggttacctgcgcggcccgcaggtaaccgctacttttgctccacattagaaaaaatcactatctatccgcagattaacattgctttatcctgctccatggcgcaaagcaccgctggaaatttcagccaattgggaggaggatagaatgcagatcgatcgtaatgagaaagaggttgctgacgctgtggacgcggcaaccgtactaccggacaggagaagcgcatgtattacacgttaggagataccactctccatttttatcgctatcagtgcaaattttacgtcgcccactgggaagggggtaacgtgatgagcgaaaaatttaaatcgtttatcgaacagatcactgagaagaccgggctggatgcgaaacgcgtcgagaccgccgcgcgcgattattttactaacgtggattaacaggcagtgctgttcgtaagagacaagctggtgcggtagccgcgcaggctaactccacctttcaccgccaggacgcctcgcgccgcctggcggcttctctattctgccagcattaaacggtagtcagttttgccagaatggcggcgaaggcgtcattaaccttatcgccggcgagcagttttttacgcaacgtgaagcttctgccgctggaacggatcagcagtcggactttcgcatcattattgctgcgttcaactacggcaacatcccgcaagggaataacgtaggtatcggcatagagccccggcgtaaatatcatcgactcgccgctcacgccaatcaccacccgattttgcagacgatagccattgcacagcgcaacaataccggcggcaataaatactccgcctatacccatgccaatcattaaaataatgatcccggcgatgagcgccagcgccccttggggataaaagcctgaggcattaaaggttaatagctgctggttatcagcctcgcccactgccgtggttgatcgccagggcgtaaatccggcgttaatccgcgtttgcaagctgaacagactacccaccagaaagatcacgctggcgggcaccatcacgatgccgccaataaacgccaggacgatggccagataagggtagcggcctgacagcattatgctgatcgcctgaaccaccacggcaataaacagggccagcaccagccaggaccatacgccgtccgcccgactatggaagttcagctgtccttcatcaagtaataaatttcgcgcgacaaaacagataataatattgacgaacaggcctatccaggccagcttgtgaacatgcttcatttcatactccattatgtattttgctattccattatcagacattattaaataaaatcgaatgccgcccggatagtaacaaagccgttggcaagatcaatcaaaaagcgtgtcaccccctctcctttagttattttcagattgatataagcaattagcatacatcgtgattatataatccattatatatattctcagaatttctttacgccgcattaatatcgccctgccattctggagagcgttggagatcgccttacctttattgcgcggatcccggtgcgaattggcagttattcacggcgcagccggcgagccaggcgggtccccagcgtctggataagctggacaatcacaatcagcaccagggcggtagtgagggtggcgaaagcgtcgaagcgctgatagccataggtaatagccagatccccgatccccccgccgcccactgtacccgccatggcggtggcgccgagcagaccgatggtcgccgtggtgagggccagaatcagcgatgccgccgcctccggcagcataaagtgccagacagtctgcagcggggttgcgcccatggcgtccgcggcctcgaggatcccctcatccacctccagcaacgagctctccactaatcgggcaatgtagggggcgacaaagacgatcagcggcacgatggctcccgcggtgccgatagtggtgcccaccagcagtctggtaaagggcaggatcacaatcagcaaaatgataaacggcagcgagcgcagcacgttaatcagcggattcagcgcctgatgcaccaccgggttggccacgatgccgccgggacggcaaaccaccagcacaatccccagcgggacgccgatcagcgcgccaaagcccagcgagacggcgaccataatcagcgtgtcatgcagcgccagcagaaactgatcgccggtgatggcggtatcaataagatcaaacatgggtgattttcactcctgcatcgaccagatgggtgatggcgcgttcggtttcgtcaggctcgccgagaagctgcacaatcataaatcccagaatccggccctgaacttcagacatgctggcaaacaggatattcacctcgacagcatactcgcggatcaggtggttaataatcggctgctgcgccgtcgcgccgacaaattcgaggcgtaaagcccgggcgccgttatcgcgctgcaggaacgacgccacccgctgcggcaggcggtcgtgcaccaccgactgcacgaaactggcagtgaccggatgctgcggctgagcaaagagatcaaaaaccgccccctgttcaacgatacggcccgcctgcatcaccgccaccttgtgacagattttctggatcaccgacatctcatgggtgatcaatacgatggtgatgccataccgacgattaatctcctgcaaaagcagtaagatctgcaccgtagtgtgggggtcgagcgccgaggtggcttcatcgcacagaaggaccgacgggttggtggccagcgcccgggcaataccgacccgctgcttttgtccgcccgacagctcattagggtagctgtggattttgtcgctcagatcgacgaacgccagcagttccgccacccgcgcctggataaaggccttgtcgcgcccctgtaaaatcagcgggatggcgatgttatggaaaacggttttcgaattcagcagattaaaattctgaaagatcatgccgatatcttttttgatggcctgcaggcgctggccgctgcaggcctgtagcggctcgccgtttaacagtacctcgccctcgccaggcgtttccagacgattaatcagccgtaataaggtgctttttcctgccccgctgtagccaataatgccaaaaatatcgcctcgctcaatgctgagattaatatcctgcaaggccagaaccggatgtcctttcctggaaaagcttttactgacgtggcgaaattctatcatcgcgttattcattttaaatagtcaggcagcaggtaaccatcatactgcggatggctgagaatatattttttgaactcggccgagtggtagccatcgataatatctttggcaaactgcgccttctgatttttaccggcgacggtcacgacattaataaaatggctggtggctgcttccagctttaatgccgaggtcagggacataccgctggagacggcaaaattgccctgaatcaggccatagtcgacgtccggcagagcgcgaacctgctgggcattatccatctcttttaggacaattttgtaaggattatctacgatgttacgctgcgaaaaagtggccggatcgctgtctggtttaattttcacccagccaaggctctccagcaccagtaccgcgcgatattcatttgacggctggtttggtaccgacacgacggtgcccgccgccggggtccccagggtggtcagtttcccaccatacagccccatcggcggcgtggggacctgcacaatgcccacgttatcgatccccagccgctcattaattgctttcagatataccggatgctgcataatattcgcttcgatatcgccgcgggctaccgcgtcattcacctgaataccgtcgctgaaatccttatattcgattttataccctttactcaataaatagggcgcgacgcctttctcaaattgttctttatacggcccggggttaaagccgacgcggataagatgagcgtcggcggcggcataaaaagaggtggccgacaacagggcgagagcgatcccgcgcgcaactgacttgttcataaggtattttcctggagggttggcgatattgaacgattaaatcacagccgactgtgggttgtaagccagaacgccgaatttccttttgctaattcctcattaacttttgctataccgacatatcttaaaaacaagaatcttttgcgtatattgttatttagccagccgctataaatcccttaaagatggttaattattcgtgatttaaaccgggaatgttatgcctgattttactgcttcgccgctggtggacgccctggaagagaatctgttcagcctgctggaaaaactggccgcggaggtcaacaccgaagcgctgccgctgatcgatctttccagcggcagtccggatcaacccaccccgccggaagtgattgactcgctgcagagcgctattcatcgtcgtgaaaaccatggctacccgtcgttctggggcaaaccacaggtccgcgaggcgatcgcccggttctatcgccggcagtatgatgtggaactcgatccgcacagcgaagtcgccgtgtttcaggggtcgcatatcggtataggcggcatcccgcgggcgctgctcagccccgggcaatacctcatctccaccgatccctgctatccgatttaccgctcggcggcgctgcagtcccaggcggcgttttatggcctgccgctcagggcggagaaccatttcctgccgaattttaacgatcttccccgggaagtcgctgacaaggccgggctggtggtgcttaactatccgcataatccaaccggcgccctcgccacgccggcgctgttcgccagcgcgctgcagtttgctcgtcgtcaccaggtgccgatcctccatgattttgcctatgcggccatcggcagcgcggccagcgatgcgccgctgagcctcttctcccagcccgacgccaaagcatggggagtggaaacctatactttttccaagacctttaatatggccggctggcgcttcggcttcgcggtcggcaacgcctcgattatccgggcgtttaaaaagctgcacacccatagctacagtacggtgtttggcgcgattcaggatgcggcgatcgccgcgctcaacctgccggccgaacggattgcgcagctgacggcggtctatcatcaacgtcgggagtgggttctgcgtcgactggctgcgctgcgctggccggcgcgtgacgcacaaggcactttcttcctctggctcggcgtgccgcccggctaccgttcgcaggagtttgcccgcctgctgctgcaggaagcgcatattctggtggcgccgggcacgggttttggcgcagggggagaaggatttattcgcatcagcctgaccgcaggggacgaggcgctgagcaacgcgctggaccgtcttgcccggctggcgctgttttagtccgccgcagggagaagcaaaaacgcaaccctggccgtcggggattacccggctgacgagtccatcaccgacagcacgattttgccctcaagatgcccctgcgctgctcgctcatgcgccatctgcgcctgcgcaatggggaaaacgctgtcaattgcaacctggatgaccccgacgtccagcaggtcggcaagccgggcgagctgcgcgccgctggagcgtacctgggtggtggagaccgtcactccgcgctgtcgcgcctcttccgccccggcaaagccgagcggaaagatcgggtacagcgcgccgccgggttgcagggtacgcaaaaaacggccgctggccggcccgcccggcgcatcaataaccaggtccaggtcacgcaccgtctcttccactgcggtggttgtatagtcgataacgctatcggcgccgagctgacgtaaaaaggcttcatggcggcccgcggcgacggcaatcacctcggcgccctgccactttgccagctgcacggcgaaatgaccgactccccctgccgcaccgttgaccaggacgcgtttacccgccagcggcaccggccgatgcggccccggctgcagcggattcgccacctcatgcccgggatcgatcatgaactgccaggcggtgaggagcgacatcggcaccgcggcggcctgctgatggctcagggttaggggtttgcgagcgaggtcgctgaccggcacgctaacgtactcggcgtaagcgcggctgccccctgccgccccttcgggaaaacgcgccatagcatacacttcgtcgccgaccgccacctcccggacgtcatccgcccgcgccaccaccaccccggagagatcggtcccgaggatcaagggaaagcggacctcgggccgccactccgggggcagctgttgatagccatcgcgcagatagctgtccggcgggttcacgcccaccgcgtgcacctgtaccagtacttcaccggcctgcaggaccggcatgggcgcatcctcatagctcaggacttccggcccgccaaaggagtgctgttgaacagccttcatcatctgcgtcgacatcgctttctcctcatatggaaatgcgttatatttaacggagcactgttccgaatatatggagcagtgctccgattgtcaaggaacgccaatgagagctgatgccagaaaaaattatgacctgttgatcgaggtggcccgggacgtctttgtggagcagggcgccgaggcgtcgctgcgcgatatcgcccgccgggcgggcgtcggaatgggaaccctctatcgccactttcccaaccgcgacagcctgctggaagccctgctccgcagccgctttgcggcgctaaccgcccgggctgagtcgcttctgctcgccgccgatcctgccgcggcgctgctggagtggctggccgagagcgtggcgtttacccatcagcatcgcgggatcatcgccccgctgatgagcgccatcgacaatcctgagtccgccctgcacagcgcctgcgttgccctgcgcgccgccggtacgtcgctgcttacccgcgcgcagcaggccgggctggcacggccagatctcagcggagaggagctgttcgatctgatcgccgcgcttgcctggctgcgggagcaaccgtcccatgccccgcgcgcagagcggattttagcggtgctggccgacgcgatcctgactgccggctagcggcggccggtcaccgacgagacagcgcgcctggcgggtaaccagaacaccagcctttaacgatcaaacgcccagcgagccccgctggtcagcgcccgctcgaaggcgggacggccggggcctgccagccagccggcgaaggtgtacagctgcgggtgcagctggcgcagggcgtcgaggtcggcgtgcccggccagccgcccgtcgtccaccagcccggtcagcttgtgcagaaaaggactggcggccagcacctcgtcggaaaatcgcgaataggggatcggccgtcccgccgccgcggagaataacacctccagctgacgaccggtcacgctgtcgctggcgatctcgaacgtcttgccggcaaaccgcgccggcgcggcaaaaaccgccgcgacaagatggccgatatcctccaccgccagcacctgcattctcccctccggcaacataaaaaattgaaaacgaccttcatcaaggccaaaaccaggcatcaccagcagctccataaaggtggcgggccgcacgatggtcgccgccagcggcaggcggcgaatatgccgttcaatttccgctttggtgtcataatgcgctacgccggtcggcgtctcccccgtcgcgctgccggagctgtacaccagatgcttcaccccgcactcgacggcgagatcggcgatggttatcccgtagcgtacctcctgctcatcggtcaccgtccctcccggcgaactgggctggacgctgaagacgccgtcgaccccggccatcgccgaccgcattgccgcccggtcttcaaaggttcccacgaccagctcggctccccgcgccgccagcgcagcggccccggcggagaaaggatccctgaccagcgcccgaacccgccagccgcggtgcagcagcgcccgcgccaccgagccgccctgctgaccggtggcgccaaagaccaacacgctttgcgcattattcatcactcttctcccttatctgcagcctgtttcccggcctctcgccagcgatagtcaccttgcttatccttctccagccagccgcaggaaggcccggcaaaatgcccggtgaaccattgagcatgatggcttgccccccacgccatcatctcccgtcgcgagacttccgcctgccggggatcgccgcagaacgctgaattccactgcggatgggcaaactggatcggggaatgcagaagatcgccggagaaacaggcgtagtcatctccggcggcgaggaccagcgcggcatggtccggactgtggccgggggtgggaataaagtcgatccgtccgccgacccgcggccgggtcgccacatcgacggtctccagctggccggcctcaatcaccggcagcaggctgtcaagccacagcgcccggtagcgttcgctgtttttcacccgcgacagctcttttgccgagcacagatagcgggcgttgggaaacagcggcacccagcgatcgtcctgccagacggtattccatccgacatggtcggtatgcaggtgagtcagtagcaccagggtcacgtcctccgggttcacccccgcggcgcggagattctccagatacggcgtgttaagttgatgatagagcggattgccgccgcgctcccgaccattgccggtggcggtatcgataacaatcagatcgtggggggtctgcaccacccagctgtggattgacagcgcaatcggctgaataacggcctccgcctccgctaccgggaacgcctctggatagagcgctgccggctgcagggaaatctcgcgctccggcactttgaaaatcaggctatcgcctgtctggtaagtttgcatcactccctccgcgcgcattgcgctggttgatttatcggggtgatattcactatgctgccgggataacccacattcaaattgattatcataatgaacaaaatcattgaaaatgattttagtcgtatcgatctgaatctgttgacagtcttgatggtgctgtaccgcgaagggagcgtcacccgcaccgcagaggtactgcatcttggccagccggctatcagcggggcgctgaaacggctgcgcgagatgtttgacgacccgctgttcgtgcgcagcgccagaggcatgctgccgacgccgcgggcgcaagcgctgatgaccgacctgcagccgctgatggaaaaccttcattcggcgatgtttggcgccggagagttcgtcccggcgcgcgcgcagcagctttttcgcatcggcctcagcgactggagcgaacactggctgatgcccccgctgttacccgggctgatgcaggaggcgcccggagtgtcactgcagtcgatagccgccgaccccttccaggttcgccagttgctggaggaggagcgcattgatgtcgcggtgtctgtcaacaaacagagccgcggggaggtggtcagcgagccagtgatgaccatgggagtcaccaccctgtggtcgccgcagcagatcccctgccgcgggccgctgtcggtgagcgactttgtcgcctgggaacacgtgatggtggcctatcgcgaaaccggccacggtgaaattgaccgccagctcgccagccagggactcgcgcggcgcgtgcgctttgccacgcagaatttctccacctttcccctgctgctgaccaccctgccgctgttcgccaccgtcccgcaggggctggcgcagcgctggcaggcgcagtatgcgctgcgcgcggacgctccgccggtagcgtatccggaatttacgctgtgcattttgcggcacaaacggcgggcgcaggatccggcgctgaactggctggtgacgaagttaaaacaggccatgcgcggccaataaccgggccgatgccccggcatcaggcctcgctgtgcgggggttgcagcacgcgcctgctccagtcataaaacgcgcgcaccgccggcggcagatagcggttttgcggatagaccagcgacaagggaagatcagaagcggcctgctccagacaggcgaccagcgccccgctctgcagataaggttgcgccagatagctggcgacgcggatcaggcccagcccctgaatgccggcctgaatgtaggcatcggtatcgtcgaccaccagcgtctcccgcatgcggatcgcgtagtcgccttcatcgagggagaaaagccagtcgatggtccgcccggtacggtgattcaggtagcccaccgcccgatgctggtgcagttcgtcgatgctctgcggccggccgtgggccgcgagccaggccggcgaggcgaggaccatccagcggtagcgggccagaggacgcgccaccagggtggtggaatcttcgatccgcccggtacggatcacgcagtcgaatccctcctgaataatatcttccacgttgtcgcttgagcagaggatcagctccaggtcgggatactgctgcaaaaactcgccgatcctcggcagaatgcagtggcgggcaagggattgcggcatccctaccttgaaccgcccggcgggctgagccgagcgcccgggaaaggaggcttccatcgccgccatctcggccagcagccttttacactcctcataataccggcgaccctccgccgtcacgctgagcttgcgggtggtgcgctggagaagctgcgccccgagccaggcttccagctccttcaccacccgcgataccgtggagcgcggctgcccgagcacctccgccgcgcgggcgaagctgtgggcatccacgaccgcaacatagacctgcatggcatccagtttatccatttcgttaccccccccggcgctcattatcccaatattacgaacagtctaacccgaaacgctgtacttatcgaatgtcgaccgtccccctacactgagcctgtagcccgtcaacacaaggcttaactgagcaaggagttaaaatgaaaactgataattttaatcatgcggaaaaggtattggtgctgggagcgggacaactgggcgccgccgttctcgatgcgctggtgcctgcggtaatcgagcgccagggcacggtctcggtcatcgtctcgccggcggcctgggatgaagccggccagctgcggtcggcaaaccatcaggcgctggccgacgccggagccaccttcctcgccgtcgacatcgccggtagcgccatggagacgctggccgatcagtttcgcggattcaccaccgtgattaactgcatggggtttgtcgccggtccggggacacagctgaaaattacccgcgcggtgctggcggccggggtaccccgctattttccctggcagtttggcgtcaattacgatgtggtaggcaaaggcagcggtcagccggtctgggacgagcagtacgatgtccggcccctgctgcgcgcgcagcgggccacggagtgggtcattgtctccaccgggatgtttaccagctttctcttcgaaccagacttcgatgtagtgaatttatccaaccgaacccttcacgcccttggcagctgggatacccaggtgaccgtcacctcaccggcggatattggccgcctgaccacggcgatttatctgcatcagccgcggatcgtcaacgaggtggtgtttgttgccggcgaaacgacctcttaccgacagttggcggataccgtggagcgcgtaacgcagcagacgttcagcaaagccgtccacaccctgcccgccctgctggagcagctgcggacaaacccggatgacgccatgctgcgctatcgcgccgccttcgcccggggggatggcgtgtggtggccgatgggcgacacctggaatgcccgccaccagctgccgacccaggacattgccggctggctgcagaccgcgcgctgattttctctcacaggacagaatgacgatgaacaagttaattccactgatcgtattgagttgtctgctgcccctggcggcaaatgccagaaccatcaccgccaccggcgataccctggaccacgcggagagcaaaatccgccagcatgccgcccgcgagggcgtgactacctatcgcatcactgaagcgcgaatgggcaacaaagcgcatatcacggcgaaaatcgcggactaaaccaccggcgtcaggctcagggatgagctgccggcagcccgcgcgccaggtcaggcgctcattttttcccgtcgacgatcgcggcccggcggcgcgccatacaggcgagcgtattcccgggtgaactgcgacacgctgatatagcccacctccccggcagcctgtgcaatactcatcccttccgccagcatcaggcggcgggcgtggatcaggcgtaactgcttctgaaactgcagcggcgacagcgtggtcatggcgcggaaatgacggtgaaagacagagacgctcatcccggcggcgtcggccagcgcgtcgacgctgactggctgcataaaatcccggcgcagcatcgccaccgcccggcggatccgcgccgaatggctgtctacggcgcccagcgcccggatggccggcccatggacactctgcaacagccagtaatgcagctcccgccgcagaccttcccccagcaccgccagcgcccccggttgatcaaacagccttgccagccggtaagcggcatccgtcacatcggcgttcatcggttcgataccaacgcggggcgcctcatccggccctgacggcccggcctcctgcagctcgcgcaggatagccaggtccagctccagcaccagcgcgtaatagggaaaacgctgactggcctcggtgatctggctggtagtgggaacatccgcggcgatcaccatcgcctcgcccggaccatagtcaaagcttgccaggccggtggtcacgctcttacgcccctggagcagcatggccaccagcggcctggcgatagccgcctgcaggtcaccaggatgcagggcccgcaccagagtaataccgggaaccggggtaactgccaccccgctgctatcgacatgagcatcggcaaaccggcggcagagatcgaacagagcgtcgcgcataagatcctttcaggcaagttttaaagcctgagtatgcgctatttcccggcaaaagggagtgaacggagagaaatgggcaaaaaataacaaggattgggcaacccggcccggtgagcctctcctattgtaaggactccacataccagagaggaccgaacatgactaagattgcacttattaccggcgccaaccgcggccttggccgtcagaccgcactggatatcgcccgccagggtggggatgtcatcgtcacctaccgcggcagtctcgaacaggcggaagcggtgggcgccgacatccgcgccctgggccgcaaggccatcgccctgccgctggatatggcgcaaaccgccagcttcccggccttcgccgacagcctcggcagcgcgctggccagcgtctgggggcgggccactttcgaccacctgatcaataacgcagggcacggcgaattcgccccgctggccgaaacgcgcgaagcgcagttcgacgggctgtttaacgtccacgttaagggggtatttttcctcgtacaaaccctgctgccgctgctggcagacggcgggcggatcgttaacttttcctccgggctgacccgcgtctcctatcctggcttctccgcctacgccgccgccaaagcggctgtggagatgctgagcgtgtacatggcccgcgagctgggcgggcgcggcatcaccgtcaataccatcgcccccggcgctatcgccaccgattttggcggtgggctggtgcgggacgacgcagaggtaaacgcgcagtttgccgccatgacggcgctgggacgggtgggcgttcccgaggatattgggccgatgatcgccagcctgctacgcgacgataaccgctgggtgaccgcccagcggatcgaggtgtcgggcggacaaaccatctgacgactcaggctggcaggatgcgctccagcgccaggcctgccagccgcacggtctccagaagacgcggcagactatccccttcccgcgctttcgccgacaggccaagcatcaacgtatccatatagtcagtcacccgcagcgcgtcctgcgggcgatggcgggcgatatactgctggattttggctcttgccgcagcatgccattcgcctgccgccacccgggcatcagcatcctgacaatgtaccccctccagcaccaggcagccggcggcggccggatcggccacatagcggcgagccgcctcctgcagtacggcgatgagcgacgccgccaccggctggtcgtctcgcagcagggcatcgatgggaatggccccggtctggctgtagcgctgcaggacgcgggtatacagcccgagcttactgccaaaagcggcataaaagctcggggggttgatgccgaaagcctgggtcagatcggccacgctcaccgcgtcgtagcctcgcgcgtggaagaggcgttgcgccgtttcaatggcctgttccgcatcaaactggcggggacgtcccggagtacgcccttgttttgtagtggtcactatattaatccttgacagcttgtttagccgcagcatattgtaatcatcactacaatatcatgaggtgcgggatatgacagcgtttcacaacaaatcagtgctggttttaggcgggagtcggggaattggcgcggcgatcgtcaggcgttttgtcgccgatggcgcgtcggtggtgtttagctattccggttcgccgcaagcggccgagcggctggcggcagagaccggcagcacggcggtgcaggcggacagcgccgatcgcgatgcggtgataagcctggtccgcgacagcggcccgctggacgtgttagtggtcaatgccgggatcgcgcttttcggtgacgctctcgagcaggacagcgatgccatcgatcgcctgttccgcatcaatattcatgccccctaccatgcctccgtcgaagcggcgcgccgcatgccggaaggcgggcgtattattgtcatcggctcggtcaatggcgatcgcatgccagtgccgggaatggcggcctatgcgctcagcaaatcggccctgcaggggctggcgcgcggcctggcgcgggattttggcccgcgcggcatcacggtcaacgtcgtccagcccggcccaattgataccgacgccaacccggagaacggcccgatgaaagagctgatgcacagctttatggccattaagcgccatggccgtccggaagaggtggcgggaatggtggcgtggctggccggtccggaggcatcgtttgtcactggcgccatgcacaccatcgacggagcgtttggcgcctgatacctcagggcggcgatgcgcgctttgcaccgccgccgcggggacgtcatcgcctgtcagggatcttcaggccaggctgtcgaccgccataaaaaagcgatcttcggtaagcataagccgcgcttccggggactggtgcgccttgcggatcatccagccctcctccggggccaggctcagataaaacacctcccgggatcccgcgccgtcgggcgcctcaagactcagggtcacgatccccttttccacgccatccaacagctgctgcggcacgatattgacgctgcgctcgccgttttgcagacgaatggccgggatatcgtagcggcagatgccgctgttgaggctgtagccaagggtactcaggtcgtggagatggcgggtcgaaatcaccacctcaataccggttccatcaaaccactgacttatctgctgagccagctccgccatctgctgacgaaacctggcgatatccgcggcggccgacccgtcgagggccgctgtccgccgcggattttgctgttgctgcagtttcttaaaaaaacgttccctcgctgtcacgttatctccctgtgctgtggtgaagccgctggggctggatcaagatggttatcgcccgttcgctggttacgaagattgagggcgaactggcgcgatggccccgccgcaaatgtttgtttttttttacgttacttcgccgcttcaggcctgagccgtagctggttgtgttcggcggtgaaaatgcgcggcttgtccggatccaattcctcacgcgccagcacctgcttccaggtatttctttgtgtgtccggatggcggaacaggccgacaaccgccacgaacgtcgcctccgcttccagcggcatattgagactggcgtcccctccgggaccgatcaccacatcgcgactggcgaggagatcggcggcgagcagaatatccccctcctccagcagctgctggtaaaccagccggtcaaaggtctggcgatctttaagctgatagatgcgcaccaccaccggttcagagagcgagtgattctctctggcatcggtgttgagcgcttcgcgcgcggtaaagtccagatgcagcgtattaattttcttataaaaaacggcgttgaaggcagactttgttccctccgagacgcgctgggtgagtccgcatccgctcaggcaaagcgcaagcaggggcagcagacaggcggttttagtcaaacttatacgtaacacgtcggtttccttgtagaaaggtggcaggctgcaggcccgtataggtacccagctcggtggtaaaggtctgaggaatatcgtcctcactctcgccctcacccacgcccagcacgccgttcataccgagccagaacggctcgtccccaagcggcgggacagccagcagtcgggtcggcgcggtcagggtgatgttggcccggaatcgccagccgaggtatacccgcagcaggatgagaaagtcccgaaacagcgggccgtcaggcttccagccctgcgcctccgcgggattgtcggtggtaagggcaacgaggagctggctgctggcatccatcgcttcgtcacccagcggcgtattgccgtccaggaagaagtcgtcatcgccgtaaaaccccagcggctggctgatcgccaccggacgcaggctgtacgggctcaccctgacggtggtctccggggccagcagggtgaccagcgcctggatcccctgctgggttttgcccggctgacgcagcacgccggttagcgccagaaagcgcgacgccggcgaggcgatatgctgcgtcgtgccggggatgcccagccccgccaggcccagtagcgactgcgagagacgatcggtgccgccgggctcaaaggtggcgggccaggagtatttccgccagatgcggtaaaactgcgtcatgatccgatggctgaagatatccagtaagccctgcagcgcttcatgcccttccctgtgctgggcgatatcatcgagatatgccgtcgggagcggcgaatcgacaccgtacaaccccataaaggtggtgcggatgaccggcggcctgctgtcatcggcctcatcgtattccacggctttcagttcgctggcgggaaatcccattcccggatgcgggtaaaaacgcaccggatcgtcagccggatggctggttccccccatcagcggttggccgggacgccgtttttccagaagctggcagaagcggtaaaaattgatccgcggcaggtcggcctccagccgcggggtcagccgggaatgcggcggctgtgcttctcttcccattccagtcgttctccggttggttgcagaatgataatcaggcggttgaacaagtagatgtcggtgtagagcgcgaagaagcggctaagcatctcgccaaacaggcatatatcgccacgtccggcaaagccgtgactgtcgagggtgacttcaatctgcacgccgcgcaccagatggccctgtgcaaagcgctctgttgcgcggtgcttcacgtcgaggatggcttccagacgccgacgattcatctcgctgtcggtccattcatacagcgccagggtgccgcgcaggacctccgcgttatccatcagggaaagaaaactgctgcccagatggctcagcacccgccagtgaaaacggtcctgggcggggggatagcacggcagcgtcggcgcgcagaggttccgcactgcaatactggcggaagtggttttcatcaccgtatcgagcacggtgctctgcagcgcgcgacgcggcagctggccgttggttccggtgagggtcagcgacaggctttcatcttccggtacggtatgattatcaaaggcttctccgccgacgataagccaggtgttgtacagcccggaggggccacggcgcacccgggtatgatagtaatagtccgccgcgtcatgacgcatcatgccgcctttgtggcgaaaacttgagaacggcgcgtaaacctgctggtgtgaggagatcacggaatcgacggtgtaaatttcggtgtggccgtcctgcacgcgcatcgggcgcagcgggtattcggtctgcagggaattgatggtcagcggatcggactccagcggaaacaggttgatcactggcacgcagtgcaggcgcaggtgcttttcgctgaagcggaagtcatgttcccagcgttccgccagcacgacgtcgatttcaaaccacgccagtccggccggaaaaaccaccgtctccagcccgcgcagatcgatgaacatgaacttttcgcggaaggtaaaatactccagcagcagctggtaaccgcgaaaactgcggccatcttcaggccagaggccgtcatcctcgccaaatcccagcgcgctgaaatacccgtccagcggccttctgtccacctcatcggggatgcgcagccacatccgggccacattgagggtaaaggcctcgtgcatggcgcaggccagcggcgcatcggcgttgcagtacagcgggatatgactgagatcgacccggcgccagtccgtcagctggctgcaggtaaagcgcagcgtgatcaccgaacggccatccgtatcggtggccagctggacgcgttccagggataacggctgcagagcgatcgctttggtggtggtgtaccggcagcgcgtgcccttttcaccgatcggccgggaaagcacttcaaagcctttggccatcggcatcggctctttcatttccgaccagtcgggggtgaactccacgaccgacatcgagggaatggtacgtaaataatgtggccacagcagactgaccacgccttcggtcagctcaggcagatcgtcatcgagtttctcgcgcatgcggcccatcaggaaggcaaaaccttcaaacagacgctcgacaaaggggtcgcgagcgcccgctttgtcgagattgagcattgccgcctgctcaggatgagcgcgggcaaactcttcacccgcttccagcaggtagcgcatttcagcgtcgtaataacgcaaggttaaatcgtccataaatcaccagtatgagtaatagctttcagatatgcagagaaccgcaggtgcagggagtgcaatgtgaatgatgcgtgaattatgcgcacagcaccgcggcgcgagcaggatccagagcgatgagcccggcaagcaatgactccatttctggcagcaagcgatttttttctgcctcactgcgcccggccttgcctctgagcagccggagtcggcgggctttgacctcaaagataagctccggcttccattgttcgagcgtcatttcccgggcgcggctgtcgagttccgccagcagatgcagcgccatttcattttttccgtactgctcgctgacccgcgccatcagtaagcgcatcagccaccgattgcggctggtggtatagcccggctgcgcctgtaaccagttcagcgccgactcaataccttcatcgtccgcgcgggtgagcacttctggctccagcgacagcacctcatcagcgctggtcgccgccattaccggctcatcttgccatccggccatctcatccaggacacgttcgttaagccagttgagcgtcacttcatcggcgaatggcgtaccatcgttaaacgccagggtttccagccccggcagacgagccagcagccctttcatatcccggcacaggatatcggcccgtacactgtcagcatccagtttcagcaacgcctgccaggcgtaccactgcacatccagccacagatggttgacgccttgcgccaacagcgtgtccgtatgctccagcagttccgaccagcttttctgtaaatacaaacgcttaagatgggctttactctcaggcttgggaggcaatagccgtgtccggccggaggcatccagcggcggtaactccgttaacgtatcccaacgcacactcttcatcagatgatgacctgccagccatccgccgggacactcacgcagatatttcgccagcaccttagcctgatcgagcaaatcacgacctgacgtgacggtatgcattaccggtgcggtgtccgtatgttggggtagcagatcgtgttcttcgcggctggtctgcggcaccagactgtgggctccgccgctttgcaccaggcggttctccagtatctgatatagcccggaaagatcggggcgagatgcttcagccaagccggaaaaagtggcttccgccagcaataacgccccgataatgacctgcatagtggtcatgtcgacttccggataaagagacaggctgtccgacatccggcgactgccaagccattccagcgctgatttacagctacgttcacgctgtggatggagcatagccccaaaccgctcaagcattgccgccagcagcgtaacgccctccgccagaccggtttcaccatcccgctgcagacgcgcccacacgtaaaaggtgatcacgcgcagatccttgcaggtctgagtcagcagtttttctgccagctggcaaatcagttcggtatcgacgccggagatcttattgacctcatcgcggatacgctgaaaatcatcgtcatagcccggatcgtccccggttggttgggcgtcactgattggcgcaagccaggactgccactgcgcctgacgtgaccgggcctgctggcgcagtacgctttcatccaactgactggcggcaaccaaattttgtaaaatactcataattccatctcatccatgtcactattccctacccccgtcgtcaggacctgtgcgctctcagccgcatcgacagtaaaaatctgatccggcagggtcaatccgcgcagcgccagaagcgccagcgggccgctcccaagctgggagcgcaatacccactgcagagtgcggccatccggggcggagaagctcatcatccactggctgcgatccagcggatggcgtttaccctgctccagccagcgaataaaaccccaggtaccgctgtagtcaccgaacaggcgcgtgcccgcattgacggtggtccaggtaagcagagtgccgggtttatacgtctcccccggccagcggaaagtctgccagtcggccatttgattgaaatagcgcagcttttggccgtctatcgtcagctgtgtctcgacaacctccggggcaggcctggcctgtaactcaaagctgatcccctggctgccgtcggtgaaaagaatgtcggacagctggcttagctggttgatcgcgcgcagaaaggccggattaaagaccaggccgtgactgttgaccttatccggcacccattgactgccttctttatgcaggacaccgttcagctccgtcgtgagaaaacgttcgattcgcccgctgtctttgcgcacaaactcagccagcatcggcagggaggcatcgcttttgctggcggcaaacggaaagcgtccgtcaaaggcggtgtgccagttggcgaccaccgagcggcgccatttatcattcagactggccgccgacggcagaagcacggtttcccaggcctgagtcagcggctgcacaaacagagtattaccgaagccactccactcttcgccaaggcttgccgaaatcaggctaccgtactgttgcgtgtcggtcaggtcgacgcttttcccctggaagacggtctgcgccaggacctgcatcatttcctgcggatcggaggcattcgcaacctgctgcaggcgcaggcgcacgcgggtgatacgggtcagataggtttgcaggctcagggtgctatcggccgacatgacgttgctgcccgtgtttttccccatcagctggagcagtgggccgaacgtgtcatccagaggcccctgcgggccggctgccgactggtcgatgaccggcttgtctttcccgcccaccagatctttggccgatttaataaggctgtccgacagcccctccctttgttgccccgcctgcccctgccaggcaagggtattcatcagggcaatcagcggcgactggcggacatcgcttatcagcgtgagctggtcggtaacatcggcaatggtggtcgccgggttgagtcgcaggctgttgagaaaattcagccagctgccggcgaaatcggtgaagtagcgtcgggtcagacgcgctttcagcgcctccggcgacaggtctgtcgacaccgttttgcgcgaatcgctcagcacccagtcgatttcctcccggcgcgagctggctgccttatcaatggcctgctgaatgccgccttcccatgccgggcgggtaaacatccccgggaccacttcatcggtggtaaacaggcggcgcgcgtcggtgccactggtcatgtcttccagcgacacatcggcaaaattacgacgcacggatttgagcatgttctcatataaggtgctttcggcattgcggcgacctagctgctgcaacagaacctgacggctctgactcacccgttgcgcatccgggatgatcttccactctggccgctcgggcagcagggagagataaaaggcccacaaatccggcgccagactttgccacagaccggtcgagatccccattcgcgtcggctggaccgttttcatggtctgcgcaaaaaatgcgccatcggctttatccggacgagccatcatcagccaggctttcagctggtcatagcccggtttcgccagcctggctcgttggtcgctattgggggcggagttgaccagcgcgctgagcgcctgctgcaacgcggcattggccgggtcacgtatcaggcgatgatttgccacaccgtaccagggtaggacggcgtttaatagttgctgatgatggtccagaccaaagcgccgataccagggcgctcccttctgcccatcgtgcacgagacggccggcctcattgcgcagggcatggagggccgtcagttgatagtcaaaaacggaggggtgggccaccaggtcgcgggcttttcccgctaccgaagcaatctgactgtaattgagggcaaaggagagcagcagtcccgccgcccacaggccgaggatggccagcagaccgcacgccaggccccgctcccacgccattcccacgtgatgcccgcgtaaacggcggcagtcatcgacgatccccagccaggtggcgggcagcgtcaggagatgaggctggcccgcaggcgaggtatccgcctcctgatacggatctacggtacgaggctctggcaggctaaacatcaggcctcgcagcgcaagccgctgccgcgaggcggtcagccacggcgccagctgccagcgccattgcgcgatccccccgtcgataagctgctgccccagacgcagcagaaagtcgtggcgggtatctgctgcgatctggtgcatcccctgctcccgtagcgtgggcaacatctgcgcaagctgacgggcgacatcttcctcagtggcgcgcaacgggaagctaacccctaccgcctgcaccgcgcggtcagcctgcggccactcactgtcgcacagtttccataaccagaccggggcggcatagcccagcagttcgctgattttttccagcccgtgcaggtcgctctcgcttatctgcggcgtcagggtcagagacgacggcatcacccgcacaatcccgtccagaggacggccacggcgcagcttgcgcagcgcggcgtatttttcttggtcgggctctgtgatcaggttaccgccgtaaatcagcacagtgcggttaccttcaagccactgctgctgacgcagaccaggcgccagttgttcgatttctgcctcgtcgccggtaaccagcagcaggcggactttgcgccgccagcgcaggcggtaacgtgcgtgaaggtgctttttcagcggggcataaagggcttcgcgcccggcgggcctggtgggttgccgcacaggcgctgctgaaggcttaaccttatcttttatcagcagtcgaaaggccataaaccccagtaccagcaggctgagtgccatcccccagataataaagcccgtggcgataagcgggcgcagcgtttcccactgcgtggcacgatccatcgcccatagccaccatgccagcccgcccaggagcaccagaagcgtgaccgcagcaatacagacgataaccgtagccgccacagagatagctgcaggtttattgacgttgtccatcaggttttacaattccaattgcgagggtattcaagggatcgcgggctagccagccacacggttgttggtagtgcgcggcgtagatcgccgccagcgacaggacggtcaagccttccatctcgccgatgtctccccaacaggcatcctggcgatacaggttgatatcccaaccgctgtgcgccagcgcttccagccccggctgaaaaaacagcgcacaggcttccggggggccgctcagttcgttctgctccagcacacgagcggctacagcagtcagggcctcccctttttctgcgcaatatatttcccccctggtcaggtgcaccggaccgtctcgtccggcgagccacagtaccgcagactctccggcgggttgcaccgcccccgtctgggcgacaaccacctgacatccggcgataagcacagtgtcatgggggtcagcttccgccagagcgtgtgctatctccgcgaggctggcctccccacgccaggcatacgggcgtgagggtagtgtcatctgcgcaacagtgagggtcatctgtgcacgaaacgcctgccaggcgagctccgttccctgccagtagcaacgcagcggcggcgtaagcgttctttcactgcgctgtcgttgccattccatcaccagtagttccgccagccgtttttcgcgggcgatagcctcagaaactgaaaggtatggcgctcgcagcgccctgccgccgccctcgttctcttcctctggcggacgctggtgacggcttagcacccgcagccagtcagtggtcgttttgcccatgggccccagcaacagaccttcctgtaacccgatcggctgccgatgctccgcccaccattgctgttgttcgtatgccaccagttggtcatagaacctggcgttatgcacgctcatgcggtagtacagcagccggatcaaccagccggtacctgccagcaccagagccaacaggatcccggtggcggccagggcgcttttcccttctgacgaggcaagtaaagcgctgaccccgccgctaagcaggaccagcagggccgaagccgatagccacctggccgtaccaggcggtcgcgcgtctccgtacgggggatactccggtaccggcctcactgatcaaccccgcagtctgggttagagctgaccagcgtgcagccgcaggcgcagcgatgaccgtgcagcgcaaccggctggccatcaatcgtggttcgtgcgctgccttcagcaatggtcgtcataccgtgtttgttacacttgaccgggtcgcccttgcaggcgaatcccagaccaaaacactgataatgccccatcagcaccctgcccccatactcccgcagggtatcgcctttgcgaatgactttattcatcggatcctccttatccgcgttcagaccgttgtcgtcagaacgtcctccagccagctggccggcagcgcggcttgcccccgcgccagctgctcttccgctttccgcgccttttgctgtgcgacaacggttcccggctcgtgggtaaatgcccgcagctgcgcccctccgggcagctccggcagcgcttccccggttatcttgtccagcaccgccacctccagcgagcgcacggcgcctgtcgcagccagcccggccagcttgccggtcaggcgcttttgccggaaactgagcacgacacccgcggtcacggtcgcaaaacccaccaggtctccggcgagcaccagcggcgagagcggtttactgcagcgctcgctgaagtaaatcatccggtagcggaagtagccggtccacatctcgcgcgtgccgagcgcggcatacataaaccaggcgcgtgagtcatgtatctggtcatcaaacagcgccctcaccagcccggcaggctgctccgcgttgctggcctccccggcctctgggaacaggacggccacccgggcctctccgtcacgcttcatgcgccggtattcctgcgcttcatcatcggtattcagaatgaaaatcaccggctgcagcacggtatccagcaccagctgcgccaggttatccgggatacggtaaccgtcgtggtaatcttttccgaactccttcgccgcgtcgaacagctgggtttgatccatctttgggtcaaaatccttcacgcccggctgcagaaccagctcatccatcctgtcaggaggctggtttgctatctggttctggcgagcactgagcaccttctcctgttctttatcacgaatcacttctgccgccttacgcgcggcaggcagcgcttcggtattcgtggcgcgctgatagaagggcgttttcagcatcgagcctctggcatagcggtcgatgcgccaggcggtgatccaggccatctgctcagcaatgacggtttccagactgccgccggcggcaggtggttcgtagtgagaggctgc

SEQ ID NO: 67 - DNA, 116715 bp, Unknown
  source: /note="Description of Unknown: MKP2_coc_1 Mutant Bacteria sequence"
gcccaaagcgggtgaaatagccgtcggcactgcgcagcaccgcgcggccggtgagtttctccaccacttcgcgccccagcgctctggcgatgcagaagcagagcccggccccgaccatggcgctgaaccacgacagcgccccgccccagaaggcgccgaacagggcggcgttcgccagggtaatcaggaaagccggcagcggagcgacgatcgcctggaggatcatcagcgcaaatgagaccagcgcggcctgcggcccccaggcggcgataaaccctctgacctgctgcggatccagggaggctaatgccgtcagactctgctgcagaaaggtacgcccgccagggaaccacagccaggcggccagagcggcggcgaccacgacggcaagggccagccgggcgcggcgcaggtgacggcgatcaggttgggtcatggcgcacctcctcactgcacgccgccacgcgacgggcgcgggcaaaccgtttacctatctgcaccagggcaaacagcagcccgccggcgagactcagtttgagcgcgaaggcgagggttaccccctcgcgggccagttcgctggccattaccgaatagatgaccagacccggcagggtggtcacggccgagatcagggtaaagggccagaagcggatcgccgtcaggccgtaggcgtaattctgaatattgtagggaaagagcggcaccaggcgggtgaggatcaggaaatcgcagccgctgtgggcgataccgcgctcaatcgcctgaaagacggtggtatggcccacatagcgctgcagcagatcgcgtccaagccagcgggcgattaaaaacgacagcgaagaggcgagggtggcggcggtaaacgagagcagggagcctgttagcgggccgaagagcatcccgccggcgatcaccagcaggctgccggggatcagacacaggatggcaatgataaacagcgcagcatagaccagatatccccaggcgccctgatggcggagggtgtcctgaagcagatgcaggtgagtcagcagatcgtggagaccgacgcggtggctgataacagccagcgtggccaccagcgcgagaagtcccagccctttaccaatggccggatgacggcttcttttgcatgagaggtgctcctgtacagtctggacgcggtggacatcaaaaagtgcgcgcgacagtatcctgttccgacaacggtcacaatcctttaccgtcgctttgttgattttgctcaggaaattctgccccccgcacagcgggaggcgagagaagggcgtgaattatggccggaaggtggcccacaccggcgcgtggtcggacggtttttccatcccgcggatctcgtaatcgatcccggtttccacgcagcgctgcgccagaggctggctggccagcagcagatcgatgcgcagcccacggttatcgtcgaagcctttggagcggtaatcaaaccacgagaaatgctcatgattgtcggggttagcctgacgccaggtatccaccaggccccagcccagcaggcggtccatccattcccgttcttccggcaggaaggaacatttgccggtgcgcagccagcgtttgcggttctcttcaccgataccgatgtccagatcggtaggactgatgttcatatcgcccatgatcagcaccggattctctttgttgagttcggtctccagatagttctgcagattctgatagaacgccgctttggccgggaatttggtttcatgatcgcggctttcaccctgcgggaaatagccgttaatcactgtgacgttgccgaagggcgacgggatctccgccataatgatgcggcgctgagcctcttcgccatcgtccgggaaaccgcggcggacggcaatcggcgtctctttggtcagcagcgcgacgccataatggcctttctgcccgtgataaaagacgttatagccgagcctggcgacctcttcgagagggaacatgtcgtcgtgaactttggtttcctgcaggccaatcacgtccggctggtgtttttcgacgatggcggccagttggtgtgggcgggcacgcaggccgttgatattaaaagagacgaatttcatagtcgctgccactgtgcaaggtgaatagtgcagggatggtagcagaaattcgccaggctggctgccaccggatgcgtcattctgccaatcgctgcgcatgagcgtgccgtgggtgccccttttgcgggcatgccgcgccaaaaaagggcaaatagctacgataaatttcgcagaggatcacaattacagaattatatcttaccgttgcataatttatcttctttaatcactgtttatccccctttgtcggatacttattcactaaatatgcattttatgtgaatagcgttcggctgtaactcattgattccgcgttatctcatccgatttatgcatttttatcgctggctggcacgaaccgtgcaatctacatttacagcgtaataactcatatttattaacattattgctacttttaatttaccggaagaggtcgatatgtctcagtcaattacgcgtaaccactttgatgaatggatgatgccggtctacgcgccagcggcgtttattccggtgcggggcgccgggtcacggctgtgggatcagcagggcaaagagtatatcgattttgccggcggcatcgccgtgaacgcgctggggcatgcccatccgcgtctggtgcaagccctgaccgaccaggccggcaagttctggcataccggcaacggctacaccaatgagccgatcctgcgtctggccaaaatgcttatcgatgctaccttcgccgaccgggtcttcttctgtaactccggcgccgaggccaatgaggcagcgctcaagctggcgcgtaaatatgcccacgatcgctttggcagcgagaaaagtggcatcgtcgcctttcagaacgctttccacgggcggacgctgttcaccgtctcggcgggcggtcagccggcctattcccgggatttcgccccgctgccgccgcagatccagcatgccgtatttaacgatctcgagtcggcaaaggccttaatcaatgagcagacctgcgcggtgatcgtcgagccggtgcagggcgaagggggcgtggtgccggccagcgtcgagtttttacgcggcctgcgtcagctttgcgaccagcacaacgccctgctgattttcgatgaagtgcagaccggggtcgggcgcaccggcgagctgtatgcctatatgcactacggcgtgacgcccgatgtgctgaccaccgccaaagcgctgggcggtggtttccctattggcgcgctgctggcgacagaggcctgcgccagcgtgatgaccgtcggcacccacggcaccacctacggcggtaacccgctggccggggcggtggccggcgaactgctgtcgatcgtcaacaccccggaagtgctctccggcgtcagacagcgccatcagtggttttgtgaacgcctgcaggcaattaacgcccgctatggcctgttcaaggagatccgcggcctgggactgctgctcggctgcgtgctaaacgacgcctgggccgggaaggcgaaaaccctcagtaacctggcggcggaagagggggtgatgattctgatcgccggcgccaacgtggtgcgtttcgcgccggcgctgaacgtcagtgaagaagaggtgaacagcgggctggatcgcgtcgagcgggcctgcgcgcgtttcgtggcaggagtctcatcatgatggttattcgaccggtggagccgggcgatttgcccgggctgctgaagctggcagcggagaccggcggcgggctgacctcgctgccggtggatgaagcgaccctcgcggcgcggatcgcccgctcgcagcagacctggcgcggcgagctaccgaaaagcgagcagggctatgtctttgtgctggaggagagcgaaagcggcgcggtggtgggcatctgcgcgatcgaggtggcggtggggctcaacgatccctggtataactaccgggtcggcacccaggtccatgcctcgaaggagctcaacgtctatcaggcgctgccgacgctgtttctcagcaacgatcataccggcagcagcgagctgtgcaccctgttcctcgacccgcagtggcgcaaagagggcaatggctatctgctgtcgaaatcacgcttcttatttatggccgcctttcgcgagcgcttcaatgagaaggtggtcgccgagatgcgcggggtgattgacgagcagggctactcgccgttctgggagagcctgggcaaacgctttttcgccatggagttttcccgtgccgactacctgtgcggcaccggacagaaggctttcattgccgccctgatgcccaagcatccgctgtatatcgatttcctttcccctgaggcacaggcggtgatcggcaaggttcatccgcagaccgccccggcccggacggtgctggagaaagaggggttccgctacctgaattacatcgatattttcgacggcggcccgactctggagtgcgacatcgaccgggtgcgggcgatccgcaaaagccgtctggtgaccaccgaggcaggtgaaacctcgcccggtgactggccgctgtgcctggtggcgaatgaacagtatcaccagttccgcgctctgctggtgcatgccgatccggatggcgacaccctgaccctcagcgcccgcgaactggatatgctgaagtgtcatgccggcgaccaggtgcgcatggtgcgcctgatccctgaggagaaaactgtatgagtctgtggattaacggcgagtggcggcccggccgtgggccaggtttcagtaaacaggatccggttaacctgaaggttgtctggcagggcgaggcggcggatgccgggcaggttgccgaggcggtggcggctgcccgccaggcgttcccgtcctgggcgcggctgccgtttgccgtccgtcaggcgatcgttgaaaagtttgccgctctgctggaagccagtaaggcggagctgacggcggttatcggcgccgagaccggaaagccgcgctgggaggcggccggggaagtgacggcgatgatcaacaaggtggcgatctcggtgaaggcctaccacgtccgcaccggcgaacagcacagcgacctgcccgacggcgccgccacgctgcgtcaccggccgcacggcgtactggcggtgtttggcccctataactttcccggccatctgccgaacgggcacatcgtgccggcgctgctggcgggcaataccgtggtctttaaacccagcgaactcaccccgcgcagcggcgaagcggtggtgaaactatggcagcaggccggcctgcccgccggggtgctcaacctggtgcagggcggtcgggaaaccggcgaggcgctcagcggccaggcggatatcgacggactgctgtttaccggcagctcaaccaccggttttcatctgcatcgccagctggccgggcaaccgcagaagatcctcgcgctggagatgggcggcaataacccgctgatcgtcgacgatccgcgggacgtggatgccgcggtgcatctgaccatccagtccgcctttattaccgctggccagcgctgcacctgcgcccggcgtctgctggtccgacgcggagaggcgggcgatgtcttcctctcccggctggtgacggtgagccaacggctgatcccggcagcgtgggacgccgagccgcagccgtttctcggcgggcttatctctgaacaagccgcgcagaaagtgcatcaggcctggctgcagcgggtcgccgctggcgcggtcaccctgctggagccgcggttattgcaggccgggacgtcgctgctaacgccggggattgtcgacatgcgcgacgtggccaatgtcgaggatgaagaggtgtttggcccgctgcttggggtctggcgctacgacactttcgaggaggcgattgccttagccaacgctacccgcttcggcctctcctgtgggttaatctccccggaacgggagaagttcgatcgactgctgcttgaggcgcgggcagggatagttaactggaacaaaccgctgaccggggcggcgagtaccgcgccgttcggcggcaccggggcgtccggtaaccatcgtccgggggcctggtatgccgccgattattgcgcctggccgatggccagccttgaatcgccgaccctgacgctgcccgccagcctgagcccgggtctcgactttctggccggggaggcgtcatgaccgcccgcgaagtcaactttgacggtctgcccgggctgacccatcactacgccgggctctcctttggcaatgaggcttccacccggcatcgctatcgggtgtctaacccgcagctggcggcaaagcaggggctgaaaaaaatgaaagccctcgccgacgctggctacccgcaggcggtgatcccgccgcaggagcgtcccaacgtgccgcttctgcgccagctgggctttagcggcagcgatgagcaggtggtggcctgggtggcgcagcaggagccggatctgctgtcggcggtgagttcggcctcggcgatgtgggtggcgaacgcggcgacggtgtgtccctccgccgattcgctggatggcctggtgcatctgacggtggcgaatctgcaggataaattccaccgcgccagcgaagcaccgactacagaggcgctgctgcaggcgattttccccgaccgcacgcgatttgctatccacccggcgctgcccgcctcggcctggtttggcgacgaaggggcggcgaaccataatcgtctcggcggcgagtatggtgctcccggcgtccagctctttgtctatggccgccgccgggggagcgaggaggcgccgcgtcgctatccggcgcggcaaacccttgaggccagccaggcggtagcgcgcctcaatcaggtcaatccccgccagctgatcttcgcccgccagcatccggcggcgatcgacacgggggtttttcataacgacgtcatcgcggtgagcaaccgtcaggtcctgttctgccatgagcaggcctttgccgaccagaccgcgcttctccagcagctggcgcagcgggtgccgggttttacgccgctggtggttcccgccagccgggtctcggtggcagaggcggttgccacctatctgttcaacagccagctggtgagccgggcggatggcagcatggcgcttatcctgcctcaggaagcgcaggagcatgccggcgtctgggaatacctcaatgagctgctggccggggataaccctatcgccgacctgcgggtgttcgatctgcgcgagagcatggccaacggcggcggtccggcgtgcctgcgcctgcgggtggtgttgacggccgaggagtatcaggcggtcaatccgcacgtcctgatgaacgatacgctgtttgccaccctcaatgactgggtggatcgctactatcgcgatcgtctcacccaggccgacctcgccgacccgcagctgctgcgggaagggcgcgacgcgctggatcggttgacccagatcctgcagctcggttcggtttatccatttcagcaataagggggcgcggtggaacattttctggcattaaccctggcggggcgtttgccccaccattttcacggcgagacggcccatttcctctggcactggctcggggaagggatccttgagctgacgccgcatgcgcgctgcgagcgcgggctggtactttcctgcgccattcatggcaacgaaacggcaccggtggagatagtcgaccacctggtgcagcgactggtccgggaggcgctcccgctgcgctggcggctgctggtgatcgtcggcaatccaccagcgctgcgggcgaataagcgctatctgcacagcgatatgaaccgcatgtttggcgagcgctggcggcagtttccgctcagtgaggagacgcagcgggcgcagcggctggagcaggcggtggcccgcttttatcgcgaccacgatggcccgcgctggcacctcgatctgcataccgcgatccgcgggtcgctacatccgcgcttcggcgtgctcccggcccgcgatacgccgtggcaggaggattttcttcactggctgggcggcgccgggctggaggcgctggtgtttcatcgccagcccggcgggaccttcacccacttcagctgcgaacggttcgcggcgctggcctgcacccttgagctgggcaaagcgctgccgttgggggaaaacgatctgacgcagtttgccgccgtccagcgggcgctctcccggctgctggtgggggatctggccattgccgacgccccagcgccgctgcgctaccgggtggtacagcagctaacccgccatagcgatgatttccgcttgcatatggcggatcagacgctgaacttcacccccttcgaacccggcacgctgctggcggaggagggcgagacgcggtatgtggtggggcctgagacggagtatgttctgtttcctaacccgacggtggcgaaaggactgcgcgccggcctgatgctggagaaattatcctgagggcaagccgtccgccgggcggcctgctttattgtgcgcgtcttttttcgccatcttattttttcgtgctccactgtaaatttgcagattattcctggtaaaatgctttgtttttaatctcccctcctttatactctccataatttctctgcaaaacagtaagttatttattttttattgcaattcttcggctaaattccttattttctccataattggcgagaaactgttttttacactttcattgttttactcttgctctgactaattgacgattaacgtcgtaaagttaatctcgtcaacacggcaacgcgccgtaagaataacgtaaagtaaggattgaatgatgaagaaactcactgcactgtttgttgcctctactctggctctgggcgcggctaacctggcacacgccgccgataccaccaccgcgccgagcgacagcaagccgatgatgatgcatcataaaggcggcccgggtcagcatgacatgatgtttaaaggcctgaacctgaccgatgcgcagaagcagcagatccgcgacatcatgaagagccagcgcgaaaatatgaaacgtccgtcccttgaagaacgccgcgcgatgcacgatctgatcgccagcgacaccttcgataaggcgaaggcggaagcgcagatcgataagatggaagcgcagcataaagcgatggcgctgtcccgcctggaaacgcagaacaagatctacaacattctgaccccagagcagaaaaaacagttcaatgctaattttgagaagcatctgacagaacgcaacgcgccggcaggtaaaatgcctgcacctgctgaataatgtagcgcaccgaatcaagaccgccggtcttgcccaataatgccatcaggcgttgggcagggccggcggttttttattggtggcttctcagccaagcggatgcagcggatagtctccgctgagcaaaggcttacagaggatcttgtaaccatcctggtcaaatccggcgggcagacgggtcaactccgccgcctggtcgagcgattcaacggcgcccagccacagccagttatgaatgacgtgatactgcgtcatgtccgggccgcgctcctccagcgccacgggccccgcccacggccagcacaccagctgcagtctgctcatctgcgccagcaggcgctctctgtgcgcctccacgctctcctttccacagcaggccccggcgcagcggcccagcgcggagcgaaagcaggcgcggccgcggctgagtggttccagaccaagcaggccataacagaggcgctgttcgtcagcgaggctctgcagcatctgcagcgccgcccgccggttggcgaacaggccatagagatgctgctggtgcgagaaatcaacctcacgggcatagacaatctgcggccggtcgtccgcaagtagccaggcgcagagctgcttgttacgccgtagccgcttgttaaacagcggctgctgctctttaatcaaccgcgcctccagcagcagcgctcccagctcgccagcggtgcgctgccaggtgatacgccgcgactgacgcagcatcgcggcctcttcaggggtgcgcaggtgggataacacccggctgcggaggttgacgctcttaccgatatagagcggcatcgtgtcgctgtcgccgtgaaactgatagacgcccggcagcttcggcagcgcctccagccacgggcgaagatgttcgggatattcatagatcgccgccgcctcaaactcgagacgcggggctgattgctttctggccacaataactcctggtactgtctatccatccagtatagcaggccatttttgcggcgaaaaggacaaaaaataaccccggcgcaggccggggcggggggagagactattttttccagaaatcgtcaaagacggtgatcggcggccgacgcttgtgttcggttttcagataccagccctcgatcgttttggcgatgctcgggtccagcgttttgccttccagataatcgtcgatgttctcgtaggtgacacccagggccacttcatccggcagggaggggcgatcgtcttccaggtcggcggtgggcagcttcttatacagatgttccgggcagccgagatgggccagcagctgtttgccctgacgtttgttcaggcggaaaattgggttgatgtcggtgccgccgtcgccatatttggtgaaaaagccggtaatcgcttccgccgcatggtcggtaccgaccacaactcctttggtcattccggcgatgctgtactgggccttcattcgctcacgggctttttcatttccgcgaacgaagtcgctcagttcgatgccagcttcgcgcagcgcctgttcgctggccagcaccgcagctttaatattgactgtcaacacccggtcaggctggataaatgcgatggcgtcctggcagtcctgctcatcagcctgcacgccatagggtaaacggacggcgataaactgcaggctactgtcgccggtttcggcacgcagttcgttaatcgctatctggcacagttttcccgtcagggtggagtcctgaccgccgctgatacccagcaccagcgatttaataaacgggtaggtctgcaggtatgacttcaggaaatcgacgctgcggcggatctcgcctgcgacatcaatctgcggctttgcgcccagcgcctgaataatctcttgttgtagcgtcatcgcgccctccgaaagtgaatctgtttggcaagctgttggcttaaagctacctctttgccgctgaaacgacaaggaccggggttttgactgccggaaaagaaggcaatcaatgacataggttttcattatagatgctgtaccgcgcattgcgccgccgtccgacgtcggcagaacaatcctgtttacgcaataacataacctgacatgatttcgctgttcggcttgaaaaataacactatttattccaggcttatcgttacacagtagaaaagaggaaccaaaatgaacaaaagcttagcaggaatactgggcgtcaccgtcgcgttaaccttactggcgggctgtaccgcttacgatcgtaccaaagaccagtttacccagccggtggtgaaagatgtgaagaaagggatgtcgcgtcagcaggtgatgcagatcgccggcaaaccttcaacggaagtcaccatggtccatgcccgcggcacctgccagacctatatcctcggtcaacgagatggtaaagttgaaacctactttgtggccctcgacgaaacgggtcacgtcatgaactccggctaccagacctgcgccgagtatgataccgacccgcgcaacgccaggtaagcttcctactgtttactgacttctacgtaagcccgaccactggtcgggcttttttgtgagtaatgatgcttatttaattgcgcgaattatttggatgaaaatgtgagggtagtcaaaaccggaggtcaatgagagacaattctgttcaacagcgaattatcctggcggctcagcttgccgtatactcaactcataaacagaattaaccggatgttaccagtcttaccggctctcagcggttactgaaggccctggtctcacacattgaggaagcgttcatggaaaagaaacacatttatctcttctgctcggcaggcatgtccacgtcactgctggtctccaaaatgcgggcgcaggcggaaaaatatgaagtcccggtcattattgaagcctatcccgaaaccctcgcgggcgaaaaagggccggaagccgacgtagtattattagggccacaaattgcgtatatgttaccggaaattcagcgcctgctgccgaataaaccggttgaagttatcgactcccttctctatggcaaagttgatggtttaggggtattgaaagccgccgtcgcggctattaagaaagctgcagcacaataattttaacttttaaaactcgatgtattttgacgcctggcggctgcctgttgccggacgtcaaaaaataatgagtttattttcccgtcaaagagtaatttcatacatcatcgccgtaatagtttattgcggcttttaagggtattgactatgagtaaagtgatcgattcgcttgaaaaggtactccttccttttgcagtgaaaataggaaagcagccgcatattaatgcaataaaaaatggatttattaaattaatgccgttgaccctcgccggggccatgtttgtgttaattaacaacgtttttctgagcttcggcgaaggctctttcttttattccatgggcattcgcctggatgcctccaccattgaaaccttaaacggctttaaggctatcggcggaaacgtctataacggcaccctcgggattatgtcgctaatggcgccgttctttatcggctccgcgttggcggaagagcgcaaagttgacccgatggcagctggcctgctggcggtggcggccttcatgaccgtgaccccgtatagcgtgggcgaagcctatgcggtgggcgccaactggttgggcgggcagaacatcatctccgggatgattatcggtctggtcgttgcggaactgttcaccttcgtgatccgtcgcaactgggtgattagactgccggacagcgtgccggggtcggtatcacgctctttctcagcgctgatcccgggcttcttgatcctctccatcttcggcattatttcgtgggccctggcgagctatggcagcaacttccaccagatcatcatggactctatctcgacgccgctggcggcgatgggcagcgtggttggctgggcatacgttatctttaactctctgctgtggttcttcggtgtgcacggttctctggcgcttaccgccctggataacggcatcatgacgccgtgggcgctggaaaacatcgcgctgtacaaccagtacggctctgttgatgcggccatcgaagcgggcaaacagttccacttctgggctaagccgatgctcgactcctacatcctgctgggtggctccggggcgacgctgggtctgattatcgccatctttatcgcttctcgccgcgctgaccatcgtcaggttgctaagctggcgctgccgtcaggcatcttccagattaacgaaccgattctgtttggtctgccgatcatcatgaacccggtgatgttcatcccgttcgtgctggttcagccgattctggcggccattacgctggcggcctacagcctggggattatcccaccggtgaccaacctggcgccgtggactatgccgaccggtttgggagcgttctttaacagtaacggcagcgttgccgccctgctggtggccctgttcaaccttggcgtcgctaccctggtctacctgccgtttgtggtgctgtcgaataaagcgcagaccgttatcgagcaggaagagagcgaagaagacatcgctaacgcactgaaattctgataccgcgcggtacgggcagcgtcccgtaccgcctgaaaatgagggaaatattatgtttgatctggacaacatcgacgcggtagagaccccggaaaatgacctcgaagaggtagtgatggggctgattatcaactccggacaagcccgtagcctggcctatggcgcgctgaagcaggcgaagcagggcgactttgccgcagcgaaagcgatgatggagcagtcgcgccaggcgctcagcgaggcgcatcgcgtgcagacccagcttatcgaaagcgacgagggcgaagggaaaatgaaggtcagcctggtgctggtgcatgcccaggaccatctgatgacctccatgctggctcgtgagctggtggccgaattgattgagctgcacgagaaggtacaataggccatcgcgacgatgaggcagcccagaatgatgaccaccgagatcagtaccgcccgagaacaacagctgttcaacgggaagaactttcatgtggtcatctataacaaaacggaaagcgtgagcgggcttcaccagcatgattactacgaatttaccgtggtgttaaccgggcgctattaccaggagatcaatggcaaacgggtgctgctggagcgcggggatttcgtctttatcccgatgggctcgcaccaccagagcttttacgagttcggggcgacgcgcatccttaacgtcggcatcagcagacgcttctttgagaaacactacctgccgctgctgccgtttggtctggtggcttcgcaagtctacgccgtgcagagcgcttttctcggctacgttgagtcggtcatcgcctcactcaattttcgcgaaacggaatttgacgaatttatcgagctggtctccttttatgtcattaaccgtttacgccactatcgtgaagagccggttgccgacgtgacgccgcaatggttaaaaaataccgtggaagccatgcatgataagctgaaattcggtgaaggcgctctcgaaaatatggttcgcttatccggaaaaacgcaggaatatttaacccgggcgacccagcgctattatggtaaaacgccgatgcagataattaatgatatccgtatcaactttgccaaaaaacagctggaaattaccaattattcggtgacggatattgcgtatgaatcaggttacagcagcccgagcttgtttattaaaacctttaaaaaactgacgtcgtttacgccgagcagttatcgcaaacatttgaccagtattaattaaacccgcgcggcgttcgccgccaggtttataccgaaaatcattcaagttaactgtccgcattgttgcggagagcggcctgcgtccaggcgcagcgcctaagggagaaaaagatgagccagaaattaaaagtagtcactattggcggcggcagcagctataccccggaattactggaaggatttctgaaacgttatcatgaactgccggtaagcgaactgtggttggtagacgtcgaagagggccaggagaagctcgatattatccacgcgctgtgccagcggatggtggaaaaagccggcgtgccgatgaaagtctataaaacgctggatcgccgcgcagcgctgcagggcgcagatttcgtcaccacccagctgcgcgtgggccagctgaaggcgcgtgaaaaagatgagcgcatcccgctgagtcacggctacctgggtcaggagaccaacggggcgggcgggttgtttaaaggactgcgcaccatcccggtgattttcgatatcgtgaaagatgtgcaggaaatttgccccgacgcatggatcatcaacttcaccaacccggcgggcatggtcaccgaggcggtctatcgccacaccaatttcaaacgctttatcggcgtgtgcaacattcctatcggcatgaagatgttcatcaccgacgtgctgcagctgagcccgagcgatgagctgaatatcgacctgtttggtctgaaccacctggtgttcgtccgcgacgtgctggttaacggcgtctcgcgcttcgatgaactgctggacggcgtggcctccggccgtctgaccgcgaactcggtgaaaaacatcttcgacctgccgtttagcgaagggctgatccgctccctgcgcctgatcccatgctcttacctgctctactactttaagccaaaagagatgctggcgattgagatgggcgagtactacaaaggcggtgcgcgcgcccaggtggtgcagaaggtggagaaacagctgttcgagctgtataaaaacccggatcttaacgttaagccgaaggagctggagcagcgcggcggggcctattactctgatgccgcttgcgaagtaatcaatgccatctataacgacaagcagactgagcactatgtgaatatcccgcatcatggtcatgtcgataatatcccggcggactgggcggtagagatgagctgcaccttaggccgcgacggcgcgaagccgacgccgcgcattactcatttcgatgagaaggtgttagggcttatctacaccatcaaggggttcgaagtggcggccagccaggcggcgatcagcggtgagctgaacgatgtcctgttggcgctgaacttaagcccgctgatccattccgatcgtgacgccgaacagctggcgcgggagatgattctggcgcatgaaaaatggctgccgaactttgcggcgacgatcgaaaaactaaaatcgtaacgggagtagcaaatggaacgcgtattgatcgtcaatgccgacgacttcggcctcagtaaagggcagaactacggcattatcgaggcctgtcgcaacggcgtggtgacatcgaccaccgcgctggtcaacggcgcggccattgaccacgccgcccagctgagccgcagtactccggagctggcggtcggtatgcactttgtactgacgctgggcgagccgctgtcggccatgccgggattaacccgcgatggccggctgggcaaatggatctggcagcaggcggaagaagatagcctgccgctggaagagatcgcccacgagctggcgtgtcagtaccatcgttttgtcgaactcttcggccatgagccgacgcatatcgacagccatcaccatgttcatatgttcgcccagatttatcccatcgtcgcggcctttgcccgcgagaagggcattgcgttacgcattgaccgccaggtggcggcgcagagtgggctcgaccagcaggcggcgcgcagcagcgccggcttcagcagcgagttttacggcgaagcggtctctgaggaactgtttctgcagacgctggatgcctccatcgcccgcggggagcgctccctggaggtgatgtgtcatccggcttatgtcgatcggatcattatgggcagcgcctactgctatccgcgactggatgagcttgatgtgctgacatctgcctcgctgaaagcggcggtggccgaccggggttatcgtctgggaacctaccgcgacgtgtaagcccgacgggggaaagggaaagtgaatcaagcccggcacagcgtgccgggctttttactacgccggaatagcggcgattttcgggcttctcgaccacacgcggtgggccgtcatcagggcgagcagtttgtccgccgctggcgtgtcgagcgcatcggtgacgatgaccccctcttcaccctgggtcggaacatgcagaacggacgtcagctgccgcgcatcccctgccagcaggatcggcttcagatgtttataggcttccagcaggtaatagcgcgcgtcaccgctctgactcagggcgctgaggtcgccgccgggcaccaccaccgcatccaccgtcagcgacggggaaccggcgaaggtgccggcgatcggcagcggagaaccatcgtcggcaatgacttcgcccattcgcgagtagagcagcttgctgtgcacgccctgggcctgcagcgcctgcaggagctgaaccagatcctgcgctgaggtgcgttcgttgagcaggactgccaccacgcgacctttcacatctccttcggcgtcggcgtagaggctgaggctggggtctttctccacgccattgaccggggcgggcagggtaatgttgcgctgatcgtcgctcagttcgatccctaagttcgccccaaccgcttccgcaagcttagtatcaatgtgggccagatgatcgaccacccgctcgcggatccaggtgcggaccactttgctgagttcgaagctgaaaccatcgataatatgctgctgttcaatcggcgtctggctcagccagaacagacgcggctgggcgtaatattcgccgaacgaagggctgcgctggcggattttttcgccgtcgacgcgctcggcgagggactcaaagccaccgcgtttggcggcaggcggcgtctcgcgcggccagttgtcgttaatcgagttgggctcgtagttggccggattggtgtcaatgtccatccggtgcatcccgtcacgctggaaattatgatacgggcaggtcggacggttgatggggatttcatggaagttcggcccacccaggcggctaatttgcgtatcggtgtaagagaagagacgcccctgcagcagcggatcgttgctgaaatcaatgcccgggacgatatgtccgggatggaaggccgcctgttcattttcggcaaagaagttatccgggttgcggttgaggaccattctgccaacccgctgcaccggcaccagcgcctcggggatcagcttggtgggatcgagcaggtcgaagtcaaaagcaaattcattctcttcggggatcaattgcaggccaagctcaaattccgggtagtccccggcttcgatggcctcccatagatcgcggcgatgaaaatcggggtcgcggccggtcagcttctgcgcttcatcccacaccagcgacgccttgccggcgaccggtttccagtgaaagcgaacgaaggtggctttgccctcggcattaatcagacggaaggtgtggatcccgaagccttccatggtgcgatagctgcgcgggatgccgcgatccgacatcgcccacatcacgttgtgcagcgtttccggctgcaaggaaacatagtcccagaaagtatcgtgggcgctctgcccctgtgggatggcccagtggggttcaggcttcacggcgtggacaaagtcggggaacttcatcgcgtcctggatgaagaagaccggtgtgttgttgcccaccaggtcaaaaatcccttcgtcagtgtaaaacttggtagcgaagccgcgaatatcgcggacggtgtccgccgaccccgcgccgccctgcacggtggaaaagcgtacaaacaccggggtgattttatcggctgacgaaagaaaatcggctttagtcaacgcagccaggcttttgtagggctggaagtagccgtgggcggcagagccgcgggcatgaacgatacgctccggaatacgctcgtggtcaaagtgggtgatcttctcccgcaggataaaatcttccagcagcgttgggccgcggctaccggcgcgcagcgaattctgatcgtcagcaatgcgcacgccctggttggtggtcagcggaaaatcttccccccctttgcgttgcgcctccagggaatccagtttgctgttatgagtatcgggcgctttcaggctgcctggggcggtgggttcgacgcccggagcggtaggtttcggcgtggggcgccactcccgatcgtccggcgccagcgaatcgagacccggctgcgcttcctcgctgtcgtggaccggtgcctgctgttggtgagggttcgggtgcttatcagacattactcgtctcctgctttcattgctaaaagtggtcgttgatagaccaaaacccttctaactatagaacattacgttgtctgcgcccggcgagggggcagggagttatcctaaaatgcgcatcggcggcgaaggggcgacgaacggggccacaatcggctatgatagaggtttctatttcccgctatgtttagtgaatccatttgttatgaaaccattgcgccaacaaaatcgccctgtcattagctacgtgccgcgcgtggagcctgcgcccccggaacatgccgtgaaaatggaccattttcgcgatgtctggattttgcgcgggaagtatgtcgcttttctgctgatgggggagcatttccgtcgctcaccggcattcagcgtgccggagtcggcgcagcgctgggctaaccaggtgcgtcaggaaggtgagattgaagcctgagtcggctgcagaaataaaaaaaccgctgaatgatcagcggtttttttgtgcttgccgtttagcgatgcgccagttcggcttcttcctcgctatcgaagatcgacttgtcggtctggcgcagccactggctggtcagcgtcccggcggtcattgagccgttaacgttcagcgcggtacgccccatatcgatcagcggttcgacggagatgagcagggctaccagggtcaccggcaggcccatcgccggcaggacgatcagcgcggcgaatgtcgcgccgccgcccaccccggcgacgcccgccgagctgacggtgacgatgcccacgagggtggcaatccacataggatccagcgggttgatgcccacggtcggcgcgaccatcaccgccaacattgccggatagataccggcgcagccgttctggccgatggtggcgccaaaggaggcggagaagctggcaatcgactccggtacgccgagacgacgggtttgcgcctcaacgttcagcggaatggaggcggcgctggagcggctggtaaaggcgaaggtgatcaccggccagactttacggaagtacttcagcgggctgacgccgttaatcgccagcagcaggccgtggacgacaaacataatacccagcgcaatgtacgaggctaccacgaagccgccaagcttgatgatgtcctgcaaattcgacccggcaaccactttggtcatcagggccagcacaccgtaaggggtcagctgcatgaccagacgaaccagcttcattacccagccctgcagggtatcgatcgcggtcagcacgcgctggcctttttccacatcctctttcagcaacttaagcgctgcgacgccgaggaacgccgagaaaatgacgatgctgatgatggaggttgggttagccccggtcaggtcagcaaacgggttcttcggcacgaaggaaaggatcagctgcgggacgctgagatccgctactttccccacatagttgctctggatggcgttcagacgggcggtctccgcgctgccctggaccagaccctcggcggtgaggccgaacatattggtcaccagcacgccaaccagggcggcgatcagggtggtgaacaacagagtaccgatgctcaggaagctaattttccccagctgcgaggcattgtgcaggcgggccaccgcgctaaggatggaggcgaagaccagcggcataacaatcatttgcagcagctggacgtaaccgttgccgacgatattgaaccactggatggaatccttcagcacctggctgtcagacccgtagatcagctgcagcgccagaccaaataccacgccagtcgccagaccgaccagcacttttctggccaggctccactgtttatgacgtgtttgccccagcgcaaacagtaatacggcgaacacgactacgttcgctattaatggaaagttcatccccgttctcctgatatttttataacctgggctggtggataaccagctcttatgacggcaaggttagcagaaggcgttatcaaggacttatattcaaatggaatgggttataaccaaatggcgttttccgccgctttatcgcccactctggtgacttataaagcgattgaaggtgatctgcagggaattgatcaccccggatgaccagcgtatcgcgctgttgtccgccagcgtctgcggcatccagacggcatagacgaacagcgccatacacaaggcgcgttcgagctgattgcccttgcgcggcgcaaggatcggcagccggaagcgccagcgacagggccacagcagcggcacaccggcgggggtgagcatatcggcgagaatgtggctgagatagcccagcaccaggccctggagagcgtctgccgggacaatccagctgtcaggcactttcagatagaacagcgtcagcgcgccaaagacggccagcaggctgtgggtgaagccgcggtggccaaaggcccgcgccacgggctttgagatccagctcagccgttggccaagaaacgacttggggtgatcgatgtccggcagcaggcaggtcaataccgccgagggcacaatatgccaccagtcgccctgcgccagcaccggcgttaactctgcgtttttggcaaatactgcgcaggcgattgaaaagaagagatggccttccgccgtcatgataacacaccctaaactgtcgattcatacagtatagggtttttatacagtgtacggaagaggtgacggtgtaactctttgtcacaaactctcagcgcgccaaccatccgccatcgacggccagcgtatagccgttaatatagtcggccgctgatgaggcgagaaacaccaccggcccctgcaggtctttcggcgctccccagcgaccagcgggaatgcgctcgaggatcgcctggttacgctcttcatcttcgcgcagcgcctgggtgttattggtggccatatacccgggcgctatggcgttgacgttgataccctggccagcccattcgttggccagcagacgggtcaaacccagcacgccgcttttcgaggcggtgtaggaggggacgcggatcccgccctgaaacgagagcatcgaggcgatgttaatgattttcccgccttccccctggcgaatgaactgcctggcgaccgcctggctgagaaagaaaaccgctttgagattcaggtcgatcaccgcgtcccagtcgctttccgtgaaggtcagggcatcatggcggcggataattccggcgttgttgaccagaatatcgacccggcccatcgccgccaccgcctggtcgaccagaccgctcatatcattctcttgactgagatccgcctgaatggcgtgaaagcggcggcccagcgccagcacctgggcggccgtatcatggggaattttacggttgatgccgacgatatcgcacccggcctgcgccaggcccagcgtcattccctgtcccaggccggtatcgcaaccggtcacgatggcgaccttacccgtcaggtcgaaggcgttcagtaccatattcacctctgtcagctgatctactggcgtacgatgacgccacctgtgaccagcatagagggaggaaaacaaaattacaattaaaatgaaacaatgttttgattttgttgctggcggcgtgacagcgattgttgcacccgccagcggtcttagccgagcaagttctcagcagtgagtgccagcagtgacgaaagcttgacgtccgccagcgcaaagcgcgggtcgcggctgttctccgcttccggcaccacgatagaccgcatgcgcgcggctttgctggcgatcatgccgttgaccgaatcctccagcgcgacgcagcgctgcgggtcgactcccagggcagcggcgcaattgaggtagacctgcgggtgcggtttgctccagggtaaatgctccgcggaggcgagagcatcaaactggtcgcgcagttcaaacatatcgagcactttctccagcatcatcagcggcgaggccgaggccaggcccacctttaagccctgagctttacacagggccactgcctcgcgtacgcccggcagcagcgggcgtgaggcttccaccagctcaatggcgcgacgaataatgcgcgcggtagcttccgcccggtctacgccgtgccacggctgctgcgcgtaccacagatccaccaccaggtcgattcgcagaccgagcaggtcgggcagttcatcgcggcgacgggtatccactcccaggctctccatgacctcgacctccgcctgatcccagagcggctccgagtcaatcagcaacccgtccatatcaaatatcgcggcctcaatgcggcgcttcgctgacatatgtccttctcctgttgcgtaatcagataaacgaatcggcaatcatggtatatcataccgcgcattattgggcgaaattcgccatggcagatagacttatacccgacatactcgggggagcgagggaagccagcgccacgcaacaggcagcaggcgaaccaccaacgcgtctttaacaaggggaactcatgacgtaccaacaagctggacgcatagcggttatcaaacgcattttaggatgggttatctttattcccgccgtgctgtcgacgctgatttctgtgctcaaatttatgtatgagcacagtgaaaagaaacccggcattgatgcggtaatgatggattttgcgcacgtgatgattgagatgatgcgctttaacacgccgttcctgaactttttctggtacaactcgccgctgccggattttcaccatagcctgaacatcggcttctggatcatcttcattctggtgttcgtcggcatggccctgcaggcttccggcgcgcgaatggcgcggcaggcgaaatttctccgcgaggggattgaggatcagctgatcctcgaacaggccaaaggcgcagatgggttaacccgcgagcagcttgctgaacgcattgtggtaccgcgccatactatcctggtgcagtatttcccactgtacgtgctaccggtgatcgtgattgtcatcggttacttcttcttttcgctgctgggctttctgtaagtcaggtgcccggcaagccgggcaccttcttattccgctggcagaggacgtggttttccctgattatcaacggcaacgtagataaacagcgcttccgtcgccttgtagcgctggccaatcggttctgaagagacttttttcacccacacttcgatattaattgtcaccgaggtgttgccgcgcttcacgcagcgggcgtagcagcacaccacgtcgccaacggcgaccggacgtaaaaaggtcatcccatccacccgcacggtcaccacgcgaccctgggcgatctctttggccataatggcgccgccaatatccatctgcgacatcagccagccgccaaaaatatccccgttggcattggtatccgccggcattgccagggtgcgtaaaaccatttcgccctttggggcgagatctgttgttgtcatgctctactctgctgtggtcaaagacgatcagcgggatgctactatgaaaatagcgcagtgagaataggggaatacgcccgctggcgcgggcgcggtggttcagaaggagagggtaacgccggcgtaatacgcgcggccaggctcattgtaggtcgaggcgccggcattttcgcgatacagttgtttatcaaatagattacttattccggcattcaggcgaatatcccggtttagctgatactgagtaccaatacccacgatggaataggcgccaacctcggtggtggcaagggtcccggtttcgttgcggatctccgcatactgacgcggcttctgacggccataaagcgtccagttcacattcgcagacagggcgtcgtttacctgccagtcgagcatcgtgttaacggtatatttcgggataaccgacagcgggttgccagtctctttactttcagatttgagcatccaggtggcattggtccgccagctgaggacatctctcagcaccgggatcagcagatttccttccagcccctcgaccacggctttgctgccgttctgccattgcaaaatattattgccgctggaggtatagcccagtacctctgttccggagacgattttgtttttgtaatcgttgcgaaaccaggtgactccggcagcgtaaccattaaggttaaattcgataccgatctctttgttgatactgatctccgggtcgaggtcagggttacccagcaggtagcagctgccttcagcgatcgtgtttggacaaccgttgccgcgggtggagagcaaatagcctttactggattgatagaggtttggcgctttaaacacgcgcgcgataccggccttcagcgtgaacatatcgccgagctcctgggacagattgaggctggggctccagttactgccaaactgattatgataatcgaagcgaatgccggggatcaggttggtgccgggcacggcttcgatattatcttccagatagataccggtgagggtggcgctgtttttggtactgcgttgcgtagggtcgcccgaggtcccagggatagtctcgccgttgctgttagtggcctgcattgatgccgggtcgtcgagctgatcatggttccattccattcccagcgtcagcgtctggtccgccagccagaagaaaggcacattgaattccgaggtagtacgccaggattccagacggctggtggcataatcttcactgttgatcatgccttcgacgcggccggtagagccttcctgcaggcgggtattgttggttttctcgtagtaaacaccggctttggactgaccccaatcccatagaccgttgtaggtcagtccccaggactggcgatagaggcgatttgtttcgtggccatacagggagtccaccagcccgttcgggctaagattgccgttgctgtactgggtatcaccagcatagatattcccctgacggctataggcgtagctgaaatcgaggatctgttgcggggtcattttccatgacagcaaggtgttaatatctttattgcggaccccttcgcgtcccgcagcgtaagagccgttttgcgcatggttaatatcccaggcgtcgggttccgttttattgatattgccatacaggcgcatcgtcagcgcctcgccggccagtgggccgctgagattgaagttagcgcgattggtcgtgccttctttgttgttttccggctggttggtgaagaaagacagcgaaccgtgccaggtgttggtcggacgtttggtaatgatattgaccactccgcccgccgcgccggaaccatagcgcgcggctgccggaccgcggagaacttcaatccgttcgaccatttcggcaggtacccagttgctgtcgccccgggtatcgcgttcgccgcgccagctatagcgaaccgcgttacgtgaggtgaccggtaccccatctatcaggatcagggtgttctccggccccatgccgcggatatcaatctggcggttgttgccccgactgccgctggcgctgttgccggtcaagttcaccccgggcattttacggatgatgtctgagagatcgttgaccggcggctgcttagcaatatcctcagccgtgataatcgacaccccgggctgttgcttaagcgcctcttccgccgtactgcgcacaatcatcgtttcggtatcttgttctgattcttcagcaaaggcgttaggggcgaggagactggatatgaccagcgccagggtcgtgggcacagaatattgcggcgatctcatgtaaatatccttttcaaaacaatgcaaaatgagatcgagaatattaatgataacaattatcattacaatgtaacgagatgaatctccataaaatcctcacaattaccgcaactttttatgcagttgagagaaatcgtgaagagagcctgcacagtgtggccgggaagctgtcagcgtatgcgctgaggttgtgtggttgcagggaatgtttgccagtgcagtaagcttatagggggcgagcgcggcgcgcgatggcgcgccggcggaggggttagtggtggtcgtcctgcggcatatgacggtagatgtagatcccgctcagcaaggtaaagaccagcgtgagggcggttaaaccaaagaccttaaagttaacccagatattctgcggcagccagaaggcgatatagatattggccagcccgcagagaataaagaacagcgcccaggccaggttaagtcgcgaccagacctgctgcggcaggctcagctctttacccagcatgcgctggatcagcggctttttcatcacccactggctgaacagcagcgcgccggcgaacagggcatagatcaccgtcaccttccatttaataaactcatcattatggaagaagatggttaacccgccgaagacggccaccagcacgaaggtgatcagcgccattttttccactttccggtagcgcacccagctgtagatcagcacgacggcggtcgccacaatcagcgccgtggtggcggcgtagatatcgtaaagcttataaaaggcaaagaagaccaccagcggtaaaaaatccagaaactgcttcatacatcgatcccgtctttcaggacggaccggggaaggccccggtcctggttaaaattagctgcggataagcatatacacgcggaataaatagatcagcaacagggcggaaatcaggttgctgatggtattaatcaccaccgcgccgacgtttggcgtcagggcggcaaagctggaagcaaacagtaacagcagggttttcgccaccagccaaccgataatagccggcgccaccagtcgcagattggcccacgccaggcgcatgctgctgcgcatggcgccgaggatgcccattttgtcctgtaccagcatgatcggcgcaaaggccagcacgatggccagcagcacgccgggcaccagcaccagcatcatccccatctgcaccaggaaggtggtgaacaggatcagcagcagcagcttgggcagcaccggcgccgaggcgccgatggcgcgcagggcgctaacgcgatgaccggcggagaccagctggatcagcagcaggacgccgccgacgaggatcgcattacctaccagacccgagaaggttgatgccgccgaggcgcgcagcagaacctgctgctgctccggcgtcatgttctgcacaagctcgaacagcccggcgctaccggcgaggttatcgccttcgctgagtatcgacagctgctcgtcgctgggtgaaaaggcatggccaagtactaccgtaataaacgcgcacaacagcgcaatcagtaaaatagtaatgaactgattacgaaaaaaattcccggtgtcacggtagacggacttcgccgtgatagacatgcattctccttgagtgtcgcaggtgttaactagccggcgattgtaccgcaaatcgttccgtcgtagcactctctgcgccggtcagggcaggtatatctttgtaaagaggccgcaatggtggcaggccgtagcgcgcccgcgcccggttgcaggcatcgttttcctcgccattttccccggacagggcgaattcgcgacacggcgaaggccggttttcataaatagtgcagtgaacggcgtcgccgatatcgccagacagggccgcgcagcggctctggcgctgattggtgccgctcatgcagcgcaggaaaggggtcagcggttcggtcagcgcggagggcaccaggccgcccgcatcgtcggcttccgcccagtagaaagagactcgaaaatacgcacaacaggcaccgcacgtcatgcacgggttgatttcactcataattacacctgaaaaaaacgcatcaacacagattgtcggcagttaacttatccagccgcctcagcgtcggcaagaggggcagaaataaatttttgcgcgaaaagtgaaaattgatgtgcgaacaattcaaggcattgcgatcggtagcgaaaattaatctggatcaataaatgttaaatctgaggacttagtgtgatctaaaacagatcaaacgtaactcgttataggtatatttggccgcgctgaaaaaccataatgaggaagtggatatgaagaagttagcagcggcggcattgattcttggcacgctttctatcggcagcgtctgggcgcatgaagcgggtgagtttttcattcgtgccgggaccgccaccgtccgaccgacggagggctctgacaatgtgttaggcagccttggcagtttcaacgtcagtaacaatacccagctgggtttaacctttacctatatggcgaccgataacattggcgtggagttgcttgccgcgacgccgttccgccataaggtcggcaccgggccaaccgggactatcgccaccgtccatcagctgccgcccaccctgatggcgcagtggtactttggcgatgcgcaaagcaaggtgcgcccgtacgtgggggccggtatcaactacaccaccttctttaatgaagactttaacgacaccggcaaggcggccgggctttccgatctgagcctgaaggactcctggggcgcggcggggcaggtcggcctcgattatctgattaaccgcgactggctgctgaatatgtcggtgtggtacatggatatcgacaccgatgtgaaattcaaagccggcggcgtggaccagaaagtcagcacccgtctggatccgtgggtgtttatgttctccgcaggctatcggttctaaattcttctgtaaactggccaacggatggccagttcattgtctcgtcacacctgtctgccgcaagcctctgtcatcaacagcggatcacacttccgtccactggcgcagcaggttgtgatacatgttgagcagggagaggacctcttctccgtcgccaaagcgggtcttcagagactggatggtgcggtccaggtcgtaaagcatcgcacgctgcttatcgtcgcggaccatcgactggatccacaggaaagaggcctggcggacgccgcgggtgaccggggtgacgcagtgcaggctgctggcgggatagagcaccagatgcccggccgggagcttcacccgatgttggccataggtgtcttcaatcaccagttcgccaccctcatagctctccggatcgcaaaggaacagcgtcgctgacagatcagtgcgcatccagcccgcctcgccgttctggcgaacggcgccatcgacgtgaaaaccataggtctcccctggcccatagcggttaaacaacggcgcggaaatcgtccgcggcagcgcggcggaaaaaaactgcggatggccgcgcagcatatcgagcacagcggcctgcaggcgggcatacagcggcgttcgggtatcgatctgctggttctgtttgacggccgccccctggctacccaccgtaacccgcccgtcgacccactcggcctgcgccagctgccgggtaaattccgccacctggtctgtcgatagcacgtcaggaatgtgatacatcatcgcggtgttctctctaaaaggtggggcgcaacggccccacgcgcagactcagaaatggacgttcgccgtcagcataaaggtccggggttcgcccggatgatagcgatagccgctcttgttgatggaggccacgtaatcggtatcaaacaggttatacatattgagctgcagatcgaggttgctgttgacccgatagcccagtttggcgtcggcaacccagtagccctcggtgtgatccggggtaccgactgcaccatcgctgccccggcgcaggcttccgacatagcgcacaccgccgccgacggacagatcgctggtggcctgatactgcgtccacagcgtaaaggcatgtttcggggtgtaggccagggcggaagatccatcctgtgcaacgttctgtccctccgtcactgtcgcatgctgctgagtgtagccggcgataatcgtccagtccggggtcaggtttccggtcgcggagagttcatacccctccacgcgctttttgccgtactgcgaccaggttccgtcatcgttggcggccacttcgttttcaatatcggtgcggaataacgccgcgctgagcagcagacggttgtcgaagatttgccacttggtgcccagctcgctggatttcgccttctgcggcttaaagtcggtccggttagcgctgttgccgctgccgctggcggccagggcgaagctgctgcctcccggcggctgctgtgagatggcgtagttgacgtagacattgccctgctcggttaagcggtacagcgccccggctttccagttaaccagattgccggatttagcggtatcgacagtggtgaccgggctgccggtcgactgtccgggcgggcaggcgatagccccgcgtccgctgccgccgcaggcggtggcgctgtcatatttggtatggtaattgtcgagacgcagcccgccgttgatctcaatccgctcggtcagcgtcagcgtatcgaaggcataaatcccgaaggtatcggtctggccgttggcgttcgccccgtttctgtccagcccgccaatcgacaggttgctcaccggatggtagagattcaccgccggcgcggtcctggcgttaacgccatagttggtctggttttcccgggtaaactccacgccggcgctgacgtcatggcctatcgagccagtattgaaagtcgaggtgatattggtctggttggtcagaatgcggttgctgacatctttggtattaaccagacgcgaccagctccaggtgttgacgtcattgatatcgggggcggtgatattgttcgcgccgcccatcaccgcggtcaaaagatactcctgtttcactcgcgaccagcgggtggtattgcgcacggtggtgctctctgtcagatcgtgttcgaagcgcagggtaccgctgtcggtagtagatttatcgtaatcggagtcggtgccatagaaattgctggtatcgaccttcccggcggagttgagtgcggcatacttcggcgaaggcgccgaatagcccggcaggccgacggtagggatcccgccatccggggtgttgttctgccggacgtgcagatagttcagatacagacgagttggggtatcaaggccgaaggccagcgacggtgcgatgccatagcgttcgttttcaatgcggtcccgaccagcgtcatgggttttttcccccatcaggttcagacggaacgcagcgttgtcgctaaacgcctggttcaggtcgagagtgccccggcgcgaccaggcgctgccgatgctggccgagccgtcgatcccggagtcaaggcgcggctgcttgctgatcatattgatcgagccggagggcgcgctgcggccatagtccgtgccggcgggccctttgatgacttccacctgctgggtattgaaggtatcgcgcgtcacgctgccgatgtcgcgaatgccgtccacatagatgctgttagaggtatccacgccgcgcataaagatggcatccccggtggttgagctgccattctccccggcataaaacgcccccacgccgggaacgtttttgagggcgtcagtcaggttggtgacgccctgatctttaatcacctgttccgggatcacggtgatggtgcgggtggtatcgaccagcggtttattgaacttgggatcggcggaagcgccgggggagtagagtgaaggcggagcggcttccactaccagcgtctcttcactatttttgaccgaattttccgctgcgatgcctgctgccggcgaggctcccagacacagacctgtaaacaatgccaatgagttgaaactgccgaaaggcagagaagcgtttttttccatgataaatgcaggcttattttttgttatgagcacatatcacaccgcgcaaaagcgacgttattcgtcgtctggcttgcgctgacccggtgtgattctataaatgataaaaagaatagttatcatttgccttaatatttacatagaaaagttgaccttaaaacaactttcttcacttcgatttacataattcacattttttgaacgataatgcgggaatatagggaaagtgctgcagaataaggtcggtagcaagccgcgccgggcggggttaacttccgggcggccatatgatggttgttccggctcggatcaccagggcacggtacggccctggtaatcgagatactccagtcccggacgttgccgtttgtcgagcaggacgttcaccaggcgtgggatcgtctcttcgatggtcagcggggcatctgccccgccgagctcggtgcggatccatcccggggccatcaccaccagcggatgggaggccgaggaggggcgagcggcaaagctgcgcataaacatattcagcgcagctttactcccgcggtagagttcccgctggccggtaaggttattggtcaggctcccctggccagaggacatgacgccgagcagcccctgcggtttaacggcctgctgcaggcgctcgataacccgcatcggcgccagggcattggtgagcatcacctggtaaaactcctcggtggagacgtcgccaatggtctgcgacgggtcacgattggtggtgccagcattgacgaacagtatgtcgaggctcgcggcgggaagcgtcgcctgcagcgcggtaagctgggcttcatcgcggatgtcgagcgtcgccaggcgtagccgcaggggatgcgtcttggccaggtcgtggagcggcgtgtgggatgataaatcgcgcacggtgccgatgacctcccagccgtgctggaggaacgtcgccgccatagcatggccaaggccgcgcgaggcgccgacgatgaggatagtgttgtgctgatcggatttcatgatgtctctcgctgcagaagggaggtcttcactataatcaggcccgagatcgggcggaagacgccgccagtgcactcatatcttgcagcaaacgccctgtctggcgactggagcgataatgaacgatcccgattttaatttgctggcggcctttgatggggtgcgggcggaggagagcgtggcgggcgccgcccggcgtctcggcctcagcacctcggcgatcagccgtacgctcacccggctgcggcatccgtcgccgcaggggatagtgcgttttccgctgccggtcagcactgaggtgattacggtgtcataggcgtggcatccgcgcctggagcaggcggcgggccactgctggctgcggcaattggtgcgtgaggtgtgtcgcgagtaaaaaaagcccgcacaagtgcgggcaaaaatactggaagcaatgtgagcaatgtcgtactgaatacccgagtgatttactcaactattcagtgatgagaaagataatatttctcatttaagatatcaaccccatcttttgtgcggaagcgattttttatccgagggtgaaaaccgtgcgcttttggctgtcgtcctgcggccaggccgccgcgatctcctgcagcggccgcggggtggtggcgatggtcaatttccccggcaccgccgcctgcagcatttcaccggtcgccgccagcagttgcgataccgacaggctaccgatcccgctgcccatcagcaggagcggggcggaacgcagcactgcgccatttaacgcgatatcggcgccagccagggaacccacctgcacatagcgcaccggactgccggcaggggtatatttcgccagtgccggcaataataattccgcgctgtgtccccacaggtaatcgatgaccacatcgatctgcgcggcgctgaccgctgaaaattgcccgctcaaggttttatcatcagcggttaactgaatacactcatcggcgtccagcgccgccagcgtctgcgcattccgtccggttgcaatgatttttttcgctcccagatagcgggcaatctgtaccgccaactgaccggcgctgccggtggcgccattaatcagcaccgtttcgccggcctgaagctgggcgcgtgtcaccagcgatgcccacgcggacataccggggttggccatcgccgccgcctggatatcatccagcgcatccggcagcggcagacaattctgcagggcgaccggcgcccgctgcgccatactgccgaagggggcggtggggaaggcgaagtagacgcgctggccctgaggtgtggtgccgacgccatcgataccgggcacaaagggcagattgccgtcgaagctgtaatggcgtccggatgcccgggccttaaccacatggcttatcgcggcggcgcggacgtcaatgagcgtctggccgggcgcgggctgcgggtcgataaaatcggcccaaaccgggccttctgcgaggtcaaaaaccacggctgctttcataaattatctcctgtcgggaattatgtgtaaaatacacatattgttttgcagcactatacgcggaaaattaatatatgcaagatgcacataatgactacgacattaccgactttcacggcgcgctactggatatcatcagcgtgatgaaccagccgctgcgcgacgagcagatcctccaggcggccggcgtccagctggaacagatgctgtttccgctgctggtggcggtaggacgccatggcccggtgggggtggttgagctggcggatcatttagggcgcgattacaccaccgtcagccgccaggtgaaaaaactggaagcccagggactcgcctgtaagcaacctaaccgtcatgaccgacggatcagcgaagtgacgcttagcgccagcggacaacagatgatcgacagtattgcggtagcgcggcggcggttaatgaatcaggtgctggcgcagtggccggaagatgaagtgcaggcgctgtttcgcttaacgcgcaaatacgccgacagtttgcagaaatcatcgccgcctggcgcgatgccaggcggctgatggtcaggcggttttggtcgctgccttcaggctctggacgaaggctttcagctcgtcgagcatggtctgcggctcatcgaggtggcgttcgatgattttgacgatggcggaaccggagatagccccggcggctccggcgtcaatggcggcgctcacctgctccggcgcggagataccaaagccctgcagcggcggcgcggcgtgatattccgccagcttctccaccaggtggtgcagcggaagcgcggcgcgattttccgcacccgtcactccggcgcgcgacagcagataggtgtagccgcggccataagaggcaatctggcgcagtaaatcgtcatccgcattgggcgggcagatgaaaatcggcgcgatgttatggcgcatcgccgcctggcggaacggggcggactcttccaccggcacgtcggccaccagcaccgagtcgacgccgacgcgggcgcactgggcatagaacgcatcgatgcccgggctgaagacgaggttggcatacatcagcaggccgattgggatggtcggatgcttctggcggatcgccgccagcatctcaaagcactgcgccggggtcactcccgcggcgaaggcgcgcagggccgcgccctggatggtcgggccgtccgccagcgggtcggagaaagggatccccagttcaagggcatcggcgccgccttcgatcagcgcatcgataattttcagcgactgctccggtcccggatcgccaagggtgacaaaggggacgaaggcgccttcctggcgatttttcagttgggcaaacagcgtctcatagcgttccatcagatttcccctcgcgctttcaggatgtcatgtacggtgaaaatgtctttgtcgccgcggccggagagattaaccaccagcagctgctctttttccgggttctcgcgcatcatcttcagcgcgtgggccagagcgtgagaggactccagcgccgggataatcccttcgtggcgggaaagcgctttaaacgcgtccagcgcttcgtcgtcggtgatcgacacataatcagcgcgaccggtgctgttcagaaacgcgtgctgcggcccaacggacgggaagtccagcccggcggaaatggagtaagactcttcgatctggccgtcggcggtctgcatcatcggcgacttcataccgaagtagatcccaacgcggccatgcttcagcggcgcgccgtgctcgccgctctcgataccgtgtccggcgggctccacgccgatcaggccgacgttggtttcctcgataaaatcagcgaacatgccgatggcgtttgatccgccgccgacgcaggcgatcaccgcgtccggcaggcggccctctttttcaaggatctgcgctttggtctcttcgccaatcatgcgctggaattcacgcacaatcgtcgggaacgggtgcggaccggcggcggtgcccagcatatagtgcgccttttcgtagctgccggaccagtcgcgcagcgcctcgttacaggcatctttcagcgtggcggagccgctgtgcaccgggatcacctcggcgcccatcaggcgcatacggaagacgttcggcgactggcgctcgacgtccttggcccccatgtagatacggcatttcaggccgagcagggcgctggccagcgctgaggcgacgccgtgctggccggcgccggtctcggcgataatttcggttttgcccatccgtttggccagcagagcctggcccagcacctggttggttttgtgcgcgccgccgtgcagcagatcttcgcgtttcaggtacagggtggtgcgggtgccttcggtcagattccggcatttggtcagggccgtcggacgaccggcgtagtttttcagcaggtcggtgaattccgcctgaaaggccgggtccttctgcgcgctgacaaaggcttcttccagctggcgcagggcgggcatcaggatctgcggcacatacatgccgccgaattcgccgaagtaggggttcagtaaagtgctcattattgctccttaatatgcgcgcagcgtctggaatacggaggccagcttgctggcgtctttcatcccgtgttgcgactctacgcctgaattgaaatcgagtccggcacagccgcttttggccgcttccacacagttatcggcgccgaggccgcccgccagcatgacgttgcgcagatcctggccctgcagcaggctccagtcaaagcgctggccgctgccgccctggccgttgtcgagcaggtacttgtcgacatggcggagcgtacgggccgggaaggtttcgccgacgctcagcgctttccagatgcggacgttgtccgcgagggcgtcgcgcagcgcgtcgatataggcctggtcttcatcaccgtgcagctgcacggcggccagccccagagcctgcgcgcgggcgaccaccacctccagcggcgcattgcggaagacgccgacgtactgtagcggcgcagcggcgatcaccgctttggcctgggcgtcattcaccgctcgcggcgaggtcgggacgaagatcagcccaccgtaaatggcgccggactcccaggccacctgggcatcctgcgggcgcgtcaggccgcacactttgttctcgccgagcagcacgcgtttaaccgccgtttccagatccgcctgctccatcagggcggagccgatcaggaagccgttggcgaagtggctcagctcgcgcacttcggcataggtatggatgccggattcgctgatcaccgtgacatccgggccgagacgcgccgccagctgacgggtgcggttaaggtcaatcgacatatcgcgcaggtcgcggttgttaatgcccaccaccttcgccttcaggtcgatggcgcgctccagttcctcttcattgctgacttcggtgagcacgcccatattcaggctgtgagccaccgccgagagctgacgatactgttcatcgtcgagcaccgagagcatcagcaggcaggcgtcggcctgatagtagcgcgccaggtagatctggtaagggtcgatggtgaagtccttacacaggatcggctgcggcgcgacctggctgacgatcggcaggaaatcgaagctgccctggaaatatttctcatcacacagcaccgagatcgccgaggcgtagtgcttgtagatgctggcgatcgctgccggatcgaaatcctcgcgaatcaaccccttcgacggtgaggccttcttgcactcgagaataaacgcggtgcgggtgccggccagtgcgtcatagaaattgcgctgcgtcggaacgatctcattttgaaaactggctaacggttgttgttgtttgcgggcttccacccaaatcgctttgtcggcaacgatttttgctaaaacggtttgcattatttaccctcttgccgctaaggcggtcactctgtcataggccgcgccgctgtgcagcacattcagtacctgctgagcgttagctttcagatcttcatgcccgtgtaaacgcatcaacatggcgacgttggcggcgacggcggcttcgtgagcggcttcacctttaccttgtagcaagcgcgtcagaatgtcacggttttcttccggggtgccgcccgccagctgcgcctgatggtaaggcgtcaggccgaagtcgtcggcggtcagctgatagcttttaatttccccgttatgcagttcggccaccaccgtaggcgcatgcagtgaaacttcatccatcccaccgctgtgcaccaccgccgcgcgctgataacccagcacgcgcagggtctcggcgatcggcagcaccagttccgggctgtagacgccaatcagcgccagcggcggatgcgccgggttgatcagcggccccagcacgttgaacagggtgcgggtcttcagctgctgacggaccggcatcgcgtggcggaaaccggtgtggtacttcggcgcgaacaggaagcagacgcccagctcatcaagcgcggcgcgggatttatcggcgttcatatcgagattaatgccgaaggccgccagcaggtcagaagagcctgatttactggagacgctgcggttgccgtgtttcgccacttttaacccgcaggccgcagcgacaaaggcgctggcggtggagatattgatgctgttgctgccgtcgccaccggtgccaacgatgtcggcaaacaggtagtccgggcgcgggaacggcgcggcgttttccagcagcgcggtagcggcgccggcaatttcctgcggctgctcgccgcgcactttcatgctgaccagcgcggcggccagttgctcaggcttcacttcgccgcgcacgacggcggagaacagctggtggctctcctgctggctcagggtttccgcctggtacagtttctcaaggatcggctggagggtgttggtatgctccagcttctgcagcgcccaggccagggtctgctccagcagtcgcgcgccctgggtggtgaggatcgattccgggtggaactggaagccgcacacccgatccgcatcgtgacgcaccgccatcaccataccgttgaaattggcgttaatcgtcagcccggcgggaatattgctgccgaccagcgagtggtagcgcgccaccggcagcgggttagccagaccggcaaacatcgcctggccgtcgtgctcaatgctggaggctttgccatggaggatctcccccgcctggccgacatagccgccgtaggcttcgacaatggcctggtggccgaggcagatgccgatgatcggcagcttgccgcgcatacgggtcagcagctccggcatgcagccggcttcgctcggcgtacccgggcccggggagagcatcagcaccgggttgtccatggtgcccagacgctcaatcagcgcctgcgccggaacggagttgcgataaatcactacgttatggccgttggcgcgcagctggtctgccaggttataggtaaaggaatcgatattatcgagcagcagaatgtcagccatcagaaaatctccttcgcgtgatgggcctgggcaatggcgcgcagcaccgcgcgggctttatttcgggtctcatccgcttccgactggggaaccgagtcgagcacaatgccggctccggcctggacggtagcgataccttcctgcacgtaggcggaacggatgacgatgcaggtgtcgaggtcgccgtgggcggtgaaatagcccaccgcgccgccgtagctgccgcggcgtttaccttcggcggcggcaatcagctgcatggcgcggaccttcggcgcgccgctgagggtgcccatattcatgcaggcgcgataggcgtggaggacgtcgagatcctgacgcaattcgcctactacacgggagaccagatgcatcacgaaggagtagcggtcaaccttggttaaatcagcgacatagcggctgcccggggtgcagatgcgcgccaggtcattacgcgccaggtccaccagcatcaggtgttcggaaagctctttatgatcggtgcgcatttccagctcgatgcggctgtcgaggtcgcgatccagcgagccgtcggcgcggcggccgcgtggccgggtgccggcgatggggtagatctcaatctgacggctgacggcatcatacttcagcgagctttccggcgaggcgccgaacagggtgaaatcattgtcctgcataaagaacatgtacgggctggggttgctcttcttcagcacatcataagcggccagcggcgatgggcagggcagcgagaagcggcgggaaggaaccacctggaagatttccccggcgcggatcgcgcgctgcattttgcgcaccaccgcgccgtactcttcatcgctctggtcaacgtcgcagcgcatttcggccacggtggtaaccggtagcggcgccggcggctcgttcagctgctgacgcagctggctcaggcgctgctccaggcgctgtttttcactctccagcggggtgaacaggctggcctgaatgcgggtatgcttggtctgatggtcgatgaccagcagggtttccgccagatagaagcagtagtccgggcaggcggtgtcgctttgcaactggggaagatcttcaaaaccggccaccaggtcataggcgaacaggccgccgaagaacatcgcttcgcgctcgttgtccggaacgctcaccagctcctgcaggagacggaaggcgtcaaacaccgacagtgagcagagacgggcgtcttcatcgagcagggcgctgacggccgggaaggtcaggatgcggccgttgggctggcgctgattgttgatcccggagggcagcgcgccgtccagtagttccagcagcgccgcgccgttggcggagagggcctgaatagtgacagtgtcaccaagggccgtaatgcgcagcgcgctatcgaccagcagcaggctttttaagtcatctttgctgtcgatgtcagcggattccagcagcagcgtcgccggacgggcgccgcacagttggtggaataacgccgtcgggttctcccggtagatggcgtcgctggtgagaagctcgagtgccggtttggatgtttgcattattgttctcgcctgttcgtattatttttgtccaataaaaagcccgctcattggcgggccgggtatctgtatgctgaatgcaaaacgcgatcacgccgcccgtcgtcaggaggtgcgccaccagctgtgcagagtgataaagtgcattttcatcgtgataccccttcatgtgaactttcgtactagttaactagttcaatggaataaagtcaacccttgtttgcagattttctctgcctgtcggtatgataatgcgcttatttacgttgatgtccagcaggagtccttttgagcgacagccaatacgcagtgatttacgatctgcacagccataccaccgcctctgacgggcggctgactccgcaggaactggtccatcgcgcccatgagatgcgcgtcggcaccctggcgatcaccgaccatgacagcgtggcggcgatcccggcggcccgggaggagatcgcccgcgccggattacccttgaccctggtgaacggcgtcgagatttccaccctctgggagaatcacgagattcatattgtgggtctgaatattgatattgcgcacccaacgatgaccgccctgctggaggagcagaaagcgcggcgccagcagcgcggtcagatgattgccgagcgcctggagaaggcgcggatccccggcgcctgggaaggggcgctgcgactggcggacggtggcgccgtcacccgcggccattttgcccgttttctggtggaggccggccatgcgaaaaacatggcggaagtcttcaaaaaataccttgcccgcgggaaaaccggttacgtgccgccgcagtggtgtacaataaaacaagcgattgatgtgattcatcattctggcggcaaggcggtgattgcccatcccgggcgctacgatctttccgccaagtggttgaagcggctgttggcccactttagcgagcagggcggtgatgccatggaagtggcccagtgtcagcaggcgccccatgaacgcgcccagctggccaccctggccgtgcagtttggtcttctggcgtcgcagggagccgattttcatcagccctgcgcgtggatcgaacttggccgtaagctctggcttcctgccggcgtggaaggcgtctggcacagttgggaagcggccgccgaataaaaattgagagggaagtatgagccagtttttttatatccatccggataacccgcaggcgcggttgattaaccaggcggtggagattgtgcgtaagggcggggtgatcgtttatcctaccgactccggctacgcgctgggctgcaaaattgaagacaagggggcgatggagcggatctgccgcattcgtcagctgccggacggccacaactttaccctgatgtgccgcgatctgtccgagctgtcaacctacgcttttgtggataatgtggcgtttcgcctgatgaaaaacaacacgccgggcaactatacctttatccttaaggggaccaaagaggtgccgcgtcggctgctgcaggagaagcgtaaaaccatcggcatgcgcgtcccgtctaaccccatcgctcaggcgttgctcgagaccttaggcgagccgatgctctctacgtcgctgatgctgcccggcagcgactttaccgaatccgacccggaagagatcaaagatcgtctggagaaagtggtggacctcatcattcacggcggtttccttgggcagcagccgaccacggttatcgatctcactgaagacaccccggtggtgctgcgcgaaggcgtcggcgacgtgaggccgtttctctaaggctatctgccgggcggtgcatcatgcgccgtccggtaccccgcgttttcgccccgacggcacgataatcatccatagcgctacacaaaccagcagcgcgccgagaatcaatccttcctccaccgtctctccgaggcagagatagccccacagcgccgcaaaaggtgggatcaaaaaggtcaccgacagcgaacgcagcggccctatatctgcaatcaagcggaagtagagaatataccctgccgccgtgcagaccacgcccagcatgactatcgctatccacggcagactctgccgccagtctacggcaggcccatgccagcaggaccagagaaagaaaggaaacagaaacagcgtggcgccgacctggctacccagcgcgacgcgttcagcctcgaggccgcctcgctgctggatccagcggcgggtcagaaagccggccagaccgtaacaggcggtcgcggtcaggcaggcgccaatccccggcagcagcagggcggcgctaaggccagatgtcgggcgcgcgatcaccgccacgccaatggtgcccagtatcgcgccgccgcctttgcgcagggttaacggttctgcaaagcataacgcgccgatcagcacccccatcatcggcgccgtggcgttaagcgtggcggagtaccctgccggcagccattgcgcggcaaggcagtacatgagaaaaggaaggcctgaattaatgacccccagctgcagagtggatgtgaattttccctgatacccgctccatttacgctgcacgccgagtaacagaccgagcgcgatagcggcgaacagtacgcgaagaaaagcgctgttcaacgccccgaaggccggggtggtgatgcgcataaacaaaaagctggcgccccagagggcggcgagcagcagcaggcggccatagtcgataacacgcatgattgactccttgtagtcacgaaggaagtcaactgtagaacccacgtgcagcgtgcgacaaacgcgttatgcttacatgattaagtttttcttaactgaggttccatacccatgaaactcccgccgctgaatgcgttgcgctgctttgaggcggcggcgcgactgcttagcctgaaactggccgccagtgagctttgcgtcacgcccagcgccgtcagccagcagattgcccgccttgaggagacgctgaatgtcccgctatttatccgtactccgcgacggttacagttaacggcggtgggagagatctacctgcgggccgttcagccggcgtttcatcagatagccgccgccacccagcgtctgcaggtgcccccgggaccagaaaaggtagctatcagctgtaccagcggcttcgccattcagtggctgctgccgcggctggctgattttgaacgacgctatccgcagatagagatccagatcggcaccaccaaccggcgagtagatttgctgagtgaagggatcgattttgccgtgcgtcatggtgtcggcggctggccggaactgcaggcttaccgcctgctggatgacgatctgatgccggtctgtagcccgcaactgatcgctccgcgccggacgctcaccgatgcgagcgatctactgcagtatccgctgctgcacgatgaacatcgtgaagactgggcgctgtggtgtgaggccgtggggctggcgccgcacttcgcgcggcgtgggccggtgttcactgattccaacggcgtgacggaggcggcgttcgccggtatggggatggcgttgctgcgacgctcattcatagcgcctgcgctgacgcaggggcggctggttaatcctctggcgcagcccatcgcctgtccgctggcctatcatctggtttaccacgagaccgcgctgctggcgcctgccaaccgctgttttcgcgactggctgcttggccagcgcccggccgttgctgaggagcgcgcgtaatgaggggggcgctgtccgataaagatccgtatgcgtgaatgggcacaggagaatgaggaaaatctgttccatactaaagacggggcgcggcgaacagaagctttcccgacgaagttagtgtagtatgttcggccacgaatacgggctcgcggtggatatcctgaacgcgccgacgagactttacgttaaaagtatatacgtaacaatgagttgtgcttatggcctcattgtttcataaagcataccagacgcctgggaaggcgacaccttaaggaagctcaatgagcgagaaactgcaaaaagtgctggcccgtgccggccacggctcccgccgtgaaattgaagcgaaaatcgaagctggccgcgtcagcgtcgacggcaaaatcgccaccctcggcgatcgtgtggaaattgtccctggtttaaaaattcgtatcgatggtcatctgatctcggtgaaagagtctgccgagcagatctgccgcgtgctggcttactataagccggaaggcgagctgtgcacccgtaacgatccggaaggacgcccgacggtatttgatcgtctgcctaaactgcgcggcgcgcgctggattgccgttggtcgtctggacgtgaatacctgcggcctgctgctgttcaccaccgatggcgaactggccaaccgcctgatgcacccgagccgtgaagtcgagcgtgagtacgccgttcgcgttttcggccaggtggatgatgataagctgcgccagctgtcgcgcggcgtacagttagaagatggtccggcagcgtttaaaaccatcaaattcaccggcggcgaagggattaaccagtggtataacgttaccctgaccgaagggcgtaaccgcgaagtgcgtcgcctgtgggaagcggtcggcgtgcaggtcagccgtctgatccgcgtgcgctacggcgatattctgctgccgaaaggcctgccgcgcggcggctataccgagctggacctggcgcagaccaactacctgcgcgagctggtggagctcacgccggaaaccagctctaaggttgccgtcgagaaagaccgtcggcggttgaaagccaatcagatccgtcgggcggtgaagcgtcacagccagaccagcgctaatccgcgccagggtaacaacagcaaccgtcgttccagtactcgcaataagactaacggttaatgttatgcgttccggtgacttgccgccggaacgcttacttccttccgcgctatcaggccctcagtagtctatccccatctgcgctttaatcccggcatcaaatgcatgcttgaccggacgcagttcgctgacggtatcggccagttcaataatatcgcgatgacagccgcggccggtgatgatcaccgactgatgggcagggcgctcacgcagggcgctcagcaccgactccagcggcaggtaatcatacgccaccatgtaggtcagctcgtccagcagcaccagatcgagctggtcgtcagcgagcatacggcgggcatgctcccagaccgccaggcaggcggcggtgtcgctgtcgcgatcctgggtgttccaggtgaagccggtggccatcacctgaaattcgacgccgtgaggctccagcagattacgctcgccgttaggccaggtccccttgataaactggatcacgccgacttttttgccatggccgacggcgcgggtcgcggtgccaaaggcggcggtggttttgcctttgccgttgccggtaaagaccatcacaatgccgcgctcgtcctgggccgccgccacccgggcgtcaactttatctttcagccgctgctggcgttcgcggtagcgttcatcactcattgggcaattcctggtttacgtcccggttgggcgtcgaaggtcattcccgtcttgcgacgactgtcgtcacccatcagccacagatagacgggcataatgtcagcgggggttttcagtttcagcggatcttccgtcgggaacgcgctggcgcgcattccggtgcgagtgccgccggggttgatacagtttacccgcaggtggcggctttgatactcgtcggccagcacctgcatcatcccttcggtggcgaatttggaaacggcataggcgccccagttggcgcggccctgacgaccgacgctggatgaggtgaagaccagcgagcccgattccgaacggagtaataaaggaagaagcgcctgggtcagcataaaggtgccattaacgttcacctgcatcacctgctgccagacctccggcttctgctcttccattgggcagatgtcgccgagcaggccagcgttatgcagcacgccgtcaaggcggggatagtgcatgctgatctgctgcgccagctgctggcacgcctggggcgtacaggtgagcaggtcgagggtaaaccagcgagggggaataccaccctcacgctcaatctcctgggcgacggtgcgcagtttgtcgtcgttgcgacccagcaggataacgctggcgctatagcgcgcgtaggtcagggccgcttcacgaccaatcccgtcgctggccccggtgaccaggatgatgcgatctttcagcaagtgacgttgtggttgataatgcacggcaactccttgggcgatcggttcccgatcgcgcttcatctttggtatctcacttttgcgctgttatgcctgaaagcgcccgccattgcaatcggcgaagcggaaagtattcacaaaattaatatcttgcaacgatttcagccgcgcgaaaaaaaacggaatccgctgcgcagagaacacaaagcacaaagacttctcgccagcggctgaggtacactgtgcagcaacgtcagtgctttacacaaggtgaaaacgtggaattacttgctcagtacggcttatttttagccaagatcgcgacggttgtcgtcgccatcgcggtgattgccgctattatcgtcaacctcgctcagcgcaagaagcagcgcggcgagctgcgggtgaccaatcttagcgagcattataaagagatgaaggaatcgctggcggtggcgctgctggacggcccgcagcagaagcagtggcataaggcgcagaagaaaaagcaaaaacaagaggcgaaggcggccaaagcgcgggcgaagctgggtaatgccgagccggaaggcaagccgcgcgcctgggtgctggatttcaaaggcagtatggatgcccatgaggtcaatagcctgcgggaagagatcaccgcggtactggcggcggcgaaagcgcgcgatcaggtggtgattcgcctggaaagccccggcggggtggtgcacggctacggtctggccgcctctcagctgcagcgcttgcgcgacaagcagatcccgctgacggtggcggtcgacaaagtggcggccagcggcggctatatgatggcctgcgtggcgaacaaaattgtctcggcgccgtttgcgatccttggctctattggcgtggtggcgcagatcccgaacctgcaccgcttcctgaagaataaagatatcgatatcgaactgcacaccgccgggcagtacaaacgaacgctcaccatgctgggcgaaaataccgaggaagggcggcgcaagttccgcgaggatcttaatgagacacatcatttgttcaaggatttcgtccaccggatgcgtccgggacttgatattgagcaggtagctaccggcgaacactggtacggggtgcaggcgctggaaaaaggtctggtggatgcggttgaaaccagcgatgagctgctgctggggctgatggagagccacgaggtgatcggggtgcgttatcaacagcgtaagaagatgctcgaccgctttaccggtagcgcggcggagagcgccgatcggcttctgctgcgctggtggcagcgcggtcagaaaccgctgatgtaaataacataacgcgaggcctgggcctcgcgttattgttttcactggtcttaatcgaccaggtggtacttgtccgacagctcgtgagcaagatacttaaacatgttaaataccgctgtactcttcggcgtcggtagtccctgctcatcaaggtaaaactcaccgctaaacaccaggacattgttgcgctgaacgacgtcggtggcttcgataccggctaacgtatcctcatgttcgcgaataagtttgttggctttttcgagcagcgtctggcgatcgattggttgggttgtaccttgcataacggactcctctttttctccgcgcgtagtttacgccgcgcggcggcgtggggcaaattttccatgcataaatcaggggtaatggtaaccagtggagaaacagccgtttactggcgggatttgcttttgcatgctaataaagttgcgtaacgaattttatcaggtacagtgtgacgctttcggcgatctggcaacagatttgcttgacattcggccaaaaattcttcgtgctatgtcacctgacgagaaaaagtcagcaaactcaagcgcctggttttacggagatgaaacgggtgttcagggttgatattcaccgacggtgccgcaacatatgaggcagtcgccagtggagggtgtatgaatgtgcgatgtattcctggatgaatcaaattaggtaaaggtgaatatgggtaaagctctcgttatcgttgagtccccggcaaaagccaaaacgatcaataagtatctgggtaatgactacgtggtgaaatccagcgtcggtcatatccgcgatttgccgaccagtggatcagcttccaaaaagagcgccgactctaccgccaccaaaggggctaaaaagcctaaaaaggacgaacgtagtgctctggttaaccgtatgggcgtggacccatggcatgactggaatgcgcactatgaagtacttccgggtaaagaaaaggtagtttcagaactcaaacagttggcggaaaaagctgaccacatctatctcgcaaccgaccttgaccgcgaaggggaagccattgcctggcacctgcgggaagtcatcggcggcgatgaacagcgttacagccgcgtggtgttcaatgagatcaccaaaaacgctattcgtcaggcctttgaaaagccgggcgaactgaatatcgatcgggttaacgcccagcaggcgcgtcgttttatggaccgcgtggtgggctatatggtttcgccgctgctgtggaaaaaaatcgcccgtggtctgtctgccgggcgcgtgcagtccgtcgcggtccgcctggtggtggagcgtgaacgtgaaattaaagcgttcgtcccggaagagtactgggaagtcgatgccagcaccaccacgccaggaggtgacgccctgccgctgcaggtgacccataaggacgataagccgttccgtccggtcagccgcgatgagaccatggcggcggtatcgctgctggaaaaagccagctacagcgtactggagcgtgaagataagccgaccagcagcaagccgggcgcgccgttcatcacctccaccctgcagcaggcggccagcacccgtctgggcttcggcgtgaaaaagaccatgatgatggctcagcgactctatgaggcagggcacatcacctatatgcgtaccgactccaccaacctgagtcaggacgcgctgaacatggttcgcggctacatcagcgacaaatttggcaaaaaatatctgccggatagcgcgaaccagtacgccagcaaagaaaactcgcaggaagcgcacgaagcgattcgtccgtctgatgtgaatgtgctggcggaaacgctgaaagatatggaagcggatgcgcagaagctttatcagctgatctggcgccagtttgtcgcctgtcagatgacgccggcgcagtacgactccaccacgctgaccgtggctgcgggtgatttcaaactgaaagcgcgcggtcgcactttacgtttcgacggctggacaaaagtcatgccggcgctgcgcaagggcgatgaagaccggacgctgccgctggtcaaacagggcgaccgcctgagcctggtggagctgacgcctgcgcagcactttaccaagccgccggcgcgtttcagcgaggcctcgctggtgaaagagctggaaaaacgcgggattggccgtccgtcgacctacgcgtcgatcatttcgaccattcaggatcgcggctacgtgcgggtggaaaatcgtcgtttttacgccgaaaaaatgggcgagatcgttaccgaccggctggaagaaaacttccgcgatctgatgaactacgattttaccgcgcagatggaggatcgcctcgaccaggttgcgaaccaccaggccgagtggaaagaggtgctgaaccacttcttcggcgattttaccacccagctggcgacggcagagaaagatccggaagagggcggcatgcagccgaacccgatggtgctcaccagcatcgactgcccgacctgcggccgtaaaatggggatccgtaccgccagcaccggcgttttcctcggctgttcgggctatgccttgccgccgaaagagcggtgcaaaaccaccatcaacctggtgccggagaacgaagtcctcaacgtgctggaaggcgatgacgcggaaaccaacgcgctgcgcgccaaacgtcgctgccagaagtgtgggacggcgatggacagctaccttatcgatcctaagcgtaagctgcatgtctgtggtaataacccgacctgcgacggctacgagattgaagagggcgaattccgcatcaagggctatgacggcccggtggtggagtgcgagaagtgcgggtctgaaatgcacctgaaaatggggcgtttcggtaaatacatggcctgtaccaacgacgagtgtaagaacacgcgtaagatcctgcgcaatggcgaagtggctccgccgaaggaagatccggtgccgctgccggagctgccgtgtgagaagtctgacgcctactttgtgctgcgcgacggggcggcgggcgtcttcctggcggccaacaccttcccgaaatcacgggaaacgcgtgcgccgctggtggaggaactgtaccgcttccgcgatcgtctgccggaaaaactgcgttatctcgccgatgcgccgcagcaggatccggaaggcaataaaacgctggtacgctttagccgtaaaaccaagcagcagtacgtggcgtccgaaaaagagggcaaagcgaccggctggtcagctttctttatcgacggtaagtggacggaagccaaaaagtaatggcgttcgttcgggcaggaaaagcgcgcttttcctgctcaggcgaccggcagagagagtgcatttctctgccgtgtcgtcttcccctctttgcgttaatttcctccccttataaccacctatattatttttcgttagcgtctatacagtgttgatataaatgatatagtggttatagttaatgccttttttattattaaaacgtcttatacatcatcgctttcaggatgcattgcggcgccactatggccaactgccgggagcccagggccttcatcggcgacaagttgcctgaacgtaaagtgtattaagcggcttcattttacgcgcaaacggatatcagccatgaaactacaacagcttcgctacatcgttgaggtggttaaccataacctgaatgtttcatccaccgccgaagggctctatacctcccagccgggtatcagtaagcaggtccgcatgctggaggatgagctgggcattcagatctttgcccgcagcggtaaacacttaacccaggtgacgccggccgggcaggagatcatccgcatcgcccgcgaagtgctgtcgaaagtcgatgccatcaaatctgtcgccggagagcatacctggcctgacaaagggtctctttacgtcgccaccacccatacccaggcgcgctatgcgttaccgggagtgatcaaggggtttattgaacgctacccgcgggtgtcgctgcatatgcatcagggctcgccgactcagattgcggaggctgtgtcgaaaggcaatgccgatttcgccatcgccaccgaggcgctgcatctgtatgacgatctggtgatgctgccatgctatcactggaaccggtcgattgtagtgacccccgagcatcctctggccaccaagggctcggtgtccatagaggaactggcccagtatccattggtaacctatacctttggttttaccggccgctccgaactggataccgcgtttaaccgtgcgggcctgacgccgcgcattgtttttaccgccaccgatgccgacgtcatcaaaacctatgttcgcctggggctgggggtaggggtaatcgccagcatggcggtggatccggtctctgacccggatctggtgaagctggatgcgaacggtattttcagccacagcaccactaagataggtttccgccgtagcaccttcttacgaagctacatgtatgattttattcaacgttttgctccccatttgaccagggacgtggtagataccgcggtggctttacgctcgaatgaagatattgaagcgatgttcaaagatataaaacttccggaaaaataaccctgaaaataataatggcactccctgcgaggagtgccattaactatgatggactgtatttaacaacttaaacctcgaaccaatcacaaaattaataatttttggcaacacgtttttcattatgcccgccgcgatcaaataaccggttaaatatattccatcaggcctaaattcactggattaatcttttatccataattaagatttatctgtacctgatgatttgagcaattggtggtgacaatatgataagtaatatcgattacatgaaactggcgatgtcatacgagaatgacaaaaccgaaatcgatcccgttctgcgtagtcgcgtatggggcgtagtgttggtagggttggcgatgttctggagcatcatcgcgctcaccatctgcaacatctggattgtcagctaaagctgtaggtcatcgttgtagatacatgtcatttttatgacagtgaaaagaaactgtaatataaaatcagtgaccggcaatacagggagaatatattttgccgctggattcatccaacctgaaatcactcatcagagctaatcactgcccgctggccgattagctctttttttgtcctcgtgtactaatacaatatcggcatacgccctctttgcactattttggtgctatttcgcctgctctcggataattcccgtttcctctctctctgtctcgccgtatttagcaatttgggttgttatcaaagtgttatgctcagtatgtgttatctttaatggagaccctgaggagaatcagggtatgccatccctgagataaaggaggagctatgtcgtcaaccctacgagaagccagtaaggacacgctgcaggtcaacgataaaacctggcattactacagtctgccgttggcggagaagcagctgggcgagatcagtcgactgcccaagtcgctgaaggtgctgatggagaacctgctgcgctggcaggacggtgactcggtaactgaagaagatattcgcgccctggccggctggctgcaacaggcccatgccgaccgggaaatcgcctaccgtccggcacgcgtcctgatgcaggactttaccggcgtgccggcggtagtggatctggccgccatgcgcgaggcggtgaaacgccttggcggcgatacggcgaaggttaatccgctatcgccggttgacctggttatcgaccactcggtgaccgttgaccgcttcggcgacgacgaggccttcgaagacaacgtccgcctggaaatggagcggaaccacgaacgctacgcttttctgcgctgggggcagcaggccttcagccgcttcagcgtggtgccgccgggcaccggtatttgccaccaggtgaacctggaatacctcggccgggcggtctggagcgaggaggtgaacggccagtggatggcgtggccggatacgctggtgggcaccgactcccataccaccatgattaatggtcttggcgtgctgggctggggcgtgggcgggattgaagcggaagccgctatgctgggccagccggtgtcaatgctgatccccgatgttgtgggctttaagctcagcggcaaactgcgcgaaggcatcaccgccactgacctggtactgacggttacccaaatgctgcgtcagcatggcgtcgtcggcaagtttgttgaattctacggtgacggcctggataccttaccccttgccgacagggcgaccatcgccaatatggcgccggagtatggcgccacctgtggctttttccctatcgatgacgtaacgctcagctatatgcgtctcagcggccgtagcgaagaacaggtcgcgctggtggaagcctacgctaaagcccagggcatgtggcgccagcctggcgatgagccggtctttaccagtaccctggcgctggatatgagcagcgtcgaagcgagcctcgccgggccgaagcgaccgcaggatcgcgtggcgctgggcgatgttccgaaagccttcgccgccagcggcgagctggaggttaaccaccttcagcgtcagcgtcagccggttgactatacgctgaacgggcatcactattcgctaccggatggcgcggtggctattgcagcgattacctcctgcaccaatacctctaaccccagcgtgttgatggccgccggcctgctggcgaaaaaagccgtcgaacgcggcctgcagccgcagccgtgggtgaaagcttccctggccccaggctcgaaagtggtgtcggattatctggcccatgccggcctgacgccttacctcgaccagctcggcttcaatctggtgggatatggttgcaccacctgtatcggtaactccggtccattgcctgaacctatcgaagaagcgatcaaaaaaggcgatctgaccgtcggggcagtgctctccggtaaccgtaacttcgaagggcgtattcatccgctggtgaaaaccaactggctggcctcgccgccgttggtggtcgcctattcgctggcggggaacatgaatatcgacctcacccgcgagccgttgggacagggcaagaatggcgagccggtctatctgaaagatatctggccgagcggggaggagattgcccgcgcggtggaacaggtctccaccgagatgttccgcaaagagtacgcagaagtgttttccggcactgaggagtggaaggcgatcaaggtggaggcgtcagatacttacgactggcaggaggattcgacctatattcgcttgtcgccgttctttgacgagatgggcgccgagccgctgccggtagaggatattcgcggcgcgcggatcctcgccatgctgggcgactcagtcaccacggaccacatttcgccggcggggagcatcaaagccgatagtccggcaggccgctatctgcaggagcatggggttgcccggcgcgactttaactcctatggttcccgtcgcggtaaccatgaggtgatgatgcgtggcaccttcgccaatatccgcatccgtaacgaaatggtcccaggggtggaagggggcatgacccgccatctgccggatcctgaaccgatggcgatttacgatgcggcgatgctgtacaaggctgagggcacaccgctggcggtgattgccggtaaggagtatggctcaggttccagccgtgactgggcggcgaaggggccgcgcctgctggggattcgggtagtgatcgccgagtccttcgagcgtatccaccgttccaacctaatcggaatgggcatcttgccgctggagttcccgcagggcgtcacccgcaaaacgctgcggttgaccggggaagagcggattgatatcagcaatctgcagtcgcttcagcctggcgctacggtgccggtgaccctgactcgcgctgacggctcgcaggaagcgatcccttgtcggtgccgtatcgacacggcgaccgaactcacctactaccgcaacgacggcatcctgcactacgttattcgtaatatgctgtgaaacaaagggccagcatcgctggccctttttcggttattccaccagtttattccgtcggcttgctgttcagcagatggcccatcttggcggctttggtgtccagatagtgagcgtttttcgggttacgcccgacgatcagcggcacccgctccacaatgttgatcccggcttcggtaagaatttccacttttttcgggttattggttaataaccgcacctgctcaacgttgagcaatttgaacatgtcggcgcacaaggtgaaatcgcgctcatcggcggcaaagccaagctgatggttcgcttcgacagtgtcgtagccctgatcctgcagcgcgtaggcgcggatcttattcaataaaccaatgttgcgtccttcctggcggtgatacagcaggatcccccgaccttcttcagcgatatgcgacagagccgcttccagttgaaagccgcaatcacagcgcaggctaaacagggcatcgcccgtcaaacactctgaatgtacgcgggcgaggaccggcgactgccctgatatatcgccatataccagcgcgacatgatcctgtccggttgccagttcttcaaaacccaccatcaggaaatcgccccagggggttggcagtttggcttctgccacacgtttaagctgcatgtgattctccagattctgtcagcacctgactgtgctttctgtttcccgctattttgccacaacgcctggacgttctcctaatcgcgaacggttagccgtgtggaaagcgcacaaacgatctactttccgctatgatgttcatctacaaggagaaggagagaaaatgctgttgatagcccgacgaactgctctcgcggcggcgctgctgctggttatgcccctcacggtctggctttccgggtggctgtggcagcctggactgccggttgccatgttgaaaagcctgtggtgggtgacggaaacggtgacccagccgtggggaattatcactcatgtcgtgctttgcggctggttcctctggtgtctgcgctttcggctgcgcgcggcgttgatcctgttccttatccttgccgccgctatcctggcgggacagggggcgaaatcctgggtcaaggcgcgggtccaggagccgagaccgttcgtcatctggctggaaaacacaaggcaggtgccggtgacgcaattctacgcgttaaagcgtaaagaacgcgctaaactggtgcatgaacagctggcgcaggcgcaggacattccgtcatttttacgcaaacactggcagaaggagacggggtttgctttcccgtcaggtcacaccatgtttgccgccagctgggcgttactcgctgcggggctgctgtggccgcgtcgccgctggggcacaatcgcggtgctgctggtgtgggcgacggcggtgatgggcagtcgcctggcgctgggcatgcactggccgctggatctcatcgtcgccacgctgatctcctggctgctggtcacggtggcctgctggctgacgcagcgcctttgtgggccgctctcgccgcccggagaagaggcgcaggatattaaaaaacggatgcctgaagcggaataatgttgattttagcggcatccgaccgcatatcctgaagagttgccatgctttttcattccaccgctgcggcgaaaatgatactttatagggctgaaagcgggcttttttcgcgcaacccacataacgggaagtcatgtgaaatatttactcattttcttactggtgttagcaatcttcgtcatttcagtgacgctgggggcgcagaatgaccaacaggtcactttcaactatttactcgctcagggtgaattccgcatatcgacgctgctggcggtgctgtttgccgcgggctttgccattggctggctgatctgcggcctgttctggctgcgggtgcgtgtctcactggcgcgcgcggagcggaaaattaagcgtcttgagcatcagattgcccccgtcagcccggcggctgtcgacgcaggcgtgcctgcggtgaaggaataacctcttatgctggagttgttgtttctgcttttacccgttgctgccgcttacggctggtacatggggcgcagaagtgcacaacagtccaaacaggacgatgcgagccgcctgtcgcgagattacgtggcgggggttaacttcctgctcagcaaccagcaggataaagccgtcgacctgttccttgatatgctgaaagaggataccggtaccgttgaggcgcacctgacgctcggtaatttgttccgttcgcgcggcgaagtcgaccgcgcgatccgaattcaccagagcctgatggaaagcgcgtcgttaacctacgatcagcgcctgttagcggtgcagcagctgggacgggattatatggccgccggactgtatgaccgcgcggaagacatgttcaaacagctggtggatgagaccgatttccgcctcggcgcgctgcagcaactgctgcagatttaccaggcgaccagcgactggcagtcggctattgaagtggctgaacggctggtgaagctggggaaagagaaacatcgtggcgaaatcgccaacttctggtgcgaactggccctgcagcagatggcagccaacgatctggataaagcgatggcgttgttgagaaaaggcgccgccgcggaccgcaacagcgcccgggtatcgatcatgatgggccgggtgtggatggaaaagggcgactacgccaaagcggtggagagcctcgagcgggttatcgatcaggataaagagctggtgggtgaaacgctggagatgctgcagacctgctaccagcagctcggcaaaaccgatgaatgggaagtttttctgcgccgctgcgtggaggagaacgccggggcgaccgccgaactgatgctggcgcagatccttgagcagcgggaaggcgtcgaagcggcgcaaaactacgtcacccggcagctggaacgccacccaaccatgcgcgtcttccataagctgatggactaccatctcaacgaagcggaagaagggcgggcgaaagaaagccttggggtgctgcgaaacatggttggtgagcaggtgcgcagcaaaccacgctatcgctgccagaaatgcgggtttaccgctcatacactctactggcattgtccgtcctgccgctcgtgggcgaccattaaacccattcgcggtctcgacggccagtaaagccaaaaaaaagccctccattagttacaacatacttatcgcttcactcctctccaggcgcggcctcggcagcgccatcgtccggtcagggcaggtacggcagtctgttattttgttcgcttcacaggtagaatgctgcccgtttaccttttttgcgccaccccggcgcccatcaacactaaggtctggtcatgacgtctacagctatcccatcttcccgcgctgtcacatcctctcccgttgtggttgcgctcgactatgataatcgcgataaagcgctggcatttgtcgaccgcatcgacccgcgcgactgccgcctgaaggtgggcaaagagatgttcaccctgctgggcccgcagtttgtccgcgatctgcatcagcgtgggtttgaggtgttcctggaccttaagtttcacgatattcccaacaccaccgcccgcgcggtggccgcagcggctgagctgggcgtatggatggtgaatgtccatgcttccggcggcgcgcgaatgatgaccgccgcgcgcgaagcgctgctgccgtttggcaaagatgtgccgctgctgatcgctgtcacggtactcaccagcatggagtccagcgatctacaggatctgggcattaccttatctccggctgactacgcggcgaagctggcggcgctgacccaacgctgcggccttgatggggtggtgtgttcagcccaggaggcggtgcgctttaagcatgagctggggcaggcgtttaagctggtgaccccggggattcgtccgcagggcagcgacgctggcgatcagcggcgaattatgactcctgagcaggctcaggaagctggggtagactatatggtgattggtcgcccggttactcagtcggcggatccagccgcgacgctgcgggcgatcaacgattctctgcgcaagggggcataatgagcgattccaacagccgtctggtctactccaccgaaaccgggcgtatcgacgaggcgaaaccggcgccggtgcgcccgaaaggcgacggcattgtgcggatccagcgccagaccagcggccgcaagggcaaaggcgtctgtctgattagcgggattgatgccgatgatgctgcgctaaccgctctggcggcagagttgaaaaagaagtgcggctgcggcggcgcggtgaaagacggcgtgatcgagatccagggcgataagcgggatttactcaagtcgctgcttgaggcgaaagggatgaaggtcaagttagccggtggctgatcgctattttccctctgctccagtggtctggttgaaataacaaggccgcggtaaatgccgcggccttgaatgatttaacgtgcgtaagtcaattcgtgtgaattattcttttatttcgtcagataattaaattatttgccgacctggtgaccaataataccaccgactgctgcgccacccagggtaccgagcgcgctaccgtcagttaacaccgcaccaccgatagcgccggcgccagcgccgatagccgtgttacgatcgcgtttagacatgttagagcaagcgctcagagacattgctacagtgacagccagaacgacagcagccatttttttgctcgttgaagtcatcattttttttctcctgaataatctattcatggattacagcgctcctctaagcatagcctgataaagcagctttagggcaattccatgaagttaaggtgcgcaggtgtcacgaaaatcacgcaggtgatagtcacttcctgttatatcgctaataataattttactttttttaaaatttatcgtcaggtaaaaagtcttaattagcggctcggaatactctcagagcgataaagcgccccttccggcgctttggcaggagatggggcggcggaggatcagatgtagggcacgatatcgacggtcaggccgctgcggagcaattgttcgcgacaggcgtccggtaagcgatcgtcggtaataacgcgattaaagcggccggcgggaccgagcggatagggatgtaccgcgctgaattttgaactgtcgctaagaataattgcctcacaatgcttctccagcacggcgttcaccacgtccgcacgcatcatatcgcggccggtaaagccggtttccgcctgccaaccgtcgatcccgatgaaggctttgctgaaatgcacctgctggatgaactgacgggttagcggaccgaccatactctcactgcgtttctgataaattccgcccagcaggatcacctctcctggggtctctttcagcagatgggcgatatagctgctgacggtaatgatggtgatatcgccgcgctcggccagcgtacgcgccagcagggcattgctgctgccgttttcgataaataccgtttcaccggtattcactagcgccgcagcccggctggccagctcacgcttaatggcgaaatgggtcatcatgcgggtttcgacatcttcgctgtccagcggtacggcatagccatgagtacggcgcaaatagctctgcttttccagcaaattcaaatcctgacgaatagtaacctcagagacaccggtcatcttcgccagatcggcgacgctcatgcggcctttatcgatgaccacttgcaaaatactttgttgtcgggcgttcatagcaacatcactgttagggggctatatggcgagcaaccggtccatatggccggctgcggcatggctgatattcagatttcccagggcgccttgggttggttttgttgttcagcatcgtccgccgccagcgccagcagctccgctttgaggatctccagattatggatcgcagaatggtaatcaccggcaaccagaatatccagcacggtatcgatacgttgagcgagcaggtgggcattcacatctgacatggcattatcctggtaacaaaaacgaatgaaatcaatgatgctaaaaatgaatgaaaaagagaagcgaaaaaaacgcacaaccttaatcggtgcgacggaaatggctggatagagaggaaagaagcagcggttcccgcaggaaccgctgtgaaggggcgtcagaccgccggacgcgcaataatgctgcgggtttccatgcgaacttcagcgatagtgacatcgataacgtcagtcactttatagactacttcacctttgatctgcacggtaccgttctcctggctgcacaccagttcgtcgcgcacggcgtggaggaacggggccggaataaaggcgaccgcgccattgtccaccagacgcacgcgcatcccgccgcggctgacgtcgatgatctccgccgcgaagcgggtatcggtcccggctttatcgttgaggaaacgggcgtacagccagtcggcgacgtcgcgctcggccatccggttgagacgacggcgctccgccatctgcacggtggcttcatcctggggacgcgcaatggtctcgcctttaatgatggctttcagcagacggtggttgatcatgtcgccatacttacggatcggcgaggtccaggtggcataggcttcaagcccaagaccaaagtgcgggcccggctcggtgctgatttccgcaaacgactggaagcggcgaatgcggctgtcgaggaaaccggtcggctgagcgtccagttcccggcgcagcttgcagaacccttccagggtgagtacttccgtcgggtcgacgtgcacatcatgggttttcagcagggcggccaactgctcggtattcgccgggtcgaaaccggtatgaacgttataaacgccgaagccgagcttgtcgcgcagaacgcgggcggcacagatgttggcggcgatcatcgactcttcgacaatgcggttggcaatgcgacgcggttccgcgacgatatccagcacttcccctttttcgccgagaacgaaacggtagtccggacggtctttgaacaccagcgcatgggtctgacgccattcgctacgacgctggcacacgtccttcagcagcgtaatttgctgcgcgatcgcctcgctgtccggctgccagctgccgcggccttccagccagtcagagacgtcgtcataggccagcttggctttcgattcgatggtggcggcaaagaactcgatattgtcttcgatggtgccatcggcccccagagtcatccggcaggccagcaccgggcgcacttcgttagcgcgcagggagcagagatcgtccgacagctcgcgcggcagcattggaatgttgaagcccggcagatagttggtaaaggcgcgcacttttgcggcgttatccagcttgctgccttcggcaatccaggcggtcgggtcggcaatggcgaccgtcagcagcagtttgccatcagcagtggactcggcatacaacgcatcgtccatatcttcggtgctggcgctgtcaatggtgacgaagtcgagggtggttaggtcgcggcgcgtcagcccctcgtcgagcatctcggtggcgacgccgtccggtgcctctttctcaagattatggcgcgccagggttacccaccatgggacgaagtggtcgtcgctaaaagtgatgaactgggtcaactccgcgtaaaatccgcggtcgccttttaatggatgacggcgcatctcggcgacggcccagtcaccctgtttaaaatcgtgctcaacgccgcgggcggcgcggcagggaatggcgtctttcagcagcggatggtcaggaacgatagcgaggcgatcgtctttcttctggactttaccgacaaaacgagtcaggaagggctcaaccagcgattccggctcggcgctttcgcgttctttttcagaatggatcaccgcgacgatacggtcgccatgcatcacttttttcatctgcggcggcggaatgaagtagctcttctgagcgtccacttcgaggaagccaaagcccttttccgtgcccttaacgaccccttccgcgcgcggcgtctgggaatgcagttgctgtttaagctgcgctagcagcgggttatcctgaaacataattaggtattttcgtggctaaaagagcggctgacatttttacgcgaatatgcctgccgcagcaagcgctgtttcagcaatttacgtctgctgacgcacattgccgagggcgattttcagacgattcatccatccgcacagcccgctccagatcaacagatcgattgcttgttgcgcagagagtcgatattccgcgaggggcgttaactgggcggcgctaaaacggtcaggcgagcgggttaacagctgcaccgcggtcacgagagaccgggcctgaggatgctgctggagccagtgatggagggcctggtcgccctcccgcaaatggctggcgaactcctcttcaccctgccagtgggggagccaggcgtcaaaacaggtggggctgccattggtgcgcgccgtgagtaaggcgacctgcgggccaaaggtatcatccgtgctgagctggcggatcaaggtctccagaggcgcgaataactgtgggtcgcaggccagcagcggcgccagctcgcccagaccgggcagcgactgccagccggcgatgcgccgctgacgctcatcatcggcatactgcaggtcgggatccgcaatgtctgcctgccatgctcccggcggcggggcgaacagttccgcgggtgcctcctcttgctggggcataccggggatccagcgcaccggaaagccctgggccgcctgcaggacggcaatcgcccgcgcctggaagccgacgaatccgataatctggttgaacagaataatgtcccgactggttaagcccacttcgtccagctggctacgggagagagcgttaataaccgagggcgaaccggcaagctgacgagcatattgcgtgatttgcgccagacgacggttgctctcgcgcgaggagtcggggcctggcaggggagcaaggcgggcggcgtagtggttacacagccgctggacgccgtagacctgggcgacggtgagcgcggtgctgagtcgatcgtaagcggtaaaggtctgcaggcgactcaccgccacctggtcgggaaatagcagttcggccagctggcgtgcggggtgtagccagtcagcgtgggcacttagccaggcggccggcagcgtcaggtccagcaaaaagcggtcttcaacatgggcggcttcagggacgagcggcaggacatccaccgggcagattgttgactgggtttcgtgataccagtgatttttgccattcacgcggcgtggctccatgggctttccttgttcggtatgtggcgaaccgccgttccgcggatcgtttatgcagaactatcctggcgtaacccggaagcaggagaaaatattgatacgtgctaacaaatagccgattggaataacaggtggggtgtaaggcgtgggggagggaagaaccctcctcaccggggcgaggaggggaaggaacttatttcagttccagctcgttcatggcggcgatattgaacccgccgtcaacgtgaacgacttcaccggagatccccgcagacaggttggagcacaggaaggctgcgctgttacccacatcttcaatggtgacggtgcgacggatcggggtgaccgcttcgcagtgcgccagcattttacggaaatctttaataccggacgcggccagcgtacggataggaccggcagagatggcattgacgcgaacgccttccggacccatggcgttagccatatagcggacgttagcttccagagaggctttggccagacccatcacgttatagttcgggatcgcgcgctctgcgcccaggtaggagagcgtcagcagagccgaacccgggttcagcatgccgcggcaggctttggccattgccacgaagctgtaagcgctgatgtcgtgcgcgattttaaagccgtcgcgagtgacaacgtcaacgtagtcgccgtctaactggtcagccggggcaaaaccgattgagtggacgaaaccatcgaattttggccagactttttccagctcggtgaacagcgcggtgatgctctcatcttcagcaacgtcgcacggcagcacaatgtcagaacccagcgcggcagcaaactcttctacgcgacctttcagtttctcattctgataggtgaatgccagttccgcgccttcgcggtgcattgcctgcgcgatgccgtaggcgatggacagtttgctggcgacgccagtgatcaaaatgcgcttaccggaaagaaaacccatagctttaatccttatcgttattgcttatttttactttaacaatcataacgttaacattgttatttcaaaataactcaaatttagccgggaattatatcccactgacgaccccttgtgtcacgatatttttcagccggtccgcgccgcgcggggcaaaagtacatcgcgatagctgcagtatatcatctctcctgacgattatttgagcgcgatctccgccagcagcaggcgtccattgctgcccaggggacgcagattccgcggggatccaccgcgccagcagaggccgctgccggccgcgcagcgtcgcccggccagatcccactcgccttgtagaacataagctaccccctcgctggcagggcattgcaggtcgctaacgacctgaactgtcgccgacgcgcgcccgcgctgagtcatgatattgaagtccagccctggcgcaacgatcccgacgctggacagcgcccattcgccggggaaagcccacggctgccagagcgccagcggttggtcgatattctcgccacacagccgtagcggctgccccgccagcagagtaatgacccggtcgacgccaggaaagggggagaaagggccatccgcctgcagggtggcaatactcgctcgccagagaaaaggggcatctggagcgggtacgcagatgatttcgcgcgtctctccgccaccgtttttccacggcgtgacggggagcgtcgaaagttgaaaagggaccatcatgggcagcataccttagttaatcgcttccggcgtcaacaataagcaccgccttgagctagttcagtaactttctgcagtacaaatattttacatattcgtcacaaaatgagagtgcatgcaaggcggtgagttgtcaatgcttgtatatacaagaacgattgagtgaggtgatattaataacttgagtgaggaacctatgtcttcgttttcgtctacagacgggcagtcaaagagcaattatgctggaatgagtgaaaggcggtcgattgattacatcccggaaagcgaacggcatggacacccttttagccagttcaccctttggtttggcggcaatctgcaaattacggcgattgtcactggcgctttagccgttgtgctgggcggcgatgtagtgtggtctctggtcgggcttctggtcggtcagatgctgggggcggcggtgatgtctctgcatgcgctgcagggaccgcgactgggacttccgcaaatgatccttagccgcgcccagtttggggtttttggcgcggtggtgccgctggtgctggtttgcgtcatgtatatcggtttttctgccagcggcaccgtattggccgggcaggcaatggccaaactactgaatatcagccacgtagccgggatgctgatattcagtgcgattattatcgttatcgccgtcctcggttataaggtgatccacaagctgggcaaactggcgagtatcgtcggaattctcgccttcgtttatatgttcatcacgctgctactttcggccgatctcagtgcgctcgcgcacaataaccatttttcgctgccgacgtttttattagccgtatcgctatcctcatcgtggcagatcgctttttgcccctatgtatccgactattcgcgctacctgccatgcgatgtttccgccacgaaaacgtggtgctcagtgtttttcggcaccgtatttggtacccaaacgtcgatgacgctcggggttctgacagcggccattgccggcagcgcgttccctggtcatgaggtgagctatctggtgggattacgtaagagtcaggcgatggccatggttatctatttcgccatctgttttggtaaaattaccttcactaccctcaatgcgtacggcagctttatgtcgctgaccaccattgtttccgccttccgccggcaaaccgtgctgtcgcaaaagtgtcgcattgcattcgtggtgctgatggtgacggcttcctgcattatcgcgttgcttagcgaacccgctttcttaaagcatttcacgcattttcttctgtttctgctggcgttcttcgtgccgtggagcgccatctgtctgacggattattatcttatctcgaagggcgccatcgatattccggcgctaagcgacccgcagcaacgctacgggttctggaacctgtacgcgatcaccctgtatatcgtcggtgtgcttatccagttgccgttcattgagaacccgttgttccatggttcgctcacgtggatcttcgccggtaacgatgtctcatggataataggctggtttggcaccggggttctttactacgcgctgcgccgctttgaccgccggtcgctgccggcgcagagtcttttcccttccacctgaatgacaagggcggcgtgagggccgcccctgccgttgcctgccagctatttcccgtctttgcgccaggcgtcggcggtgagggcttccccgaagtggccggcgatcaggcgccgggtcaggtcgtgcagcggcgaggccagcacatcggcagtgctgccgcgctcgaccacttcgccgttatgcatcaccagcacctgatcgctgatgtgtttcatcattcccaggtgctgggtgacatagatataggagatgccctgtttctcctgcagctccagcatcaggttgataagctgggagcgcatcgacatatccagcgaggccagcgcctcatcgcagatgataaccttcgggcgcaggatcagcgccctggcgaggccgagacgctgcttctgaccgggcgccagcatatgggggtagtagctgacgtggtccggcagcagaccgaccatgcgcagggtgtcgattatctgcttctgccgcgcctcggcgtcgagatcggtattcagtcgcagtggaaaatcgaggatctgcgagatgcgctggcgcgggtttagcgaggtcgacggatcctgaaagatcatgcgaatcttctggctgcggtaggagtaatccccaaaagtcagcggatgatcatcaatcagcagttcgccgctggtgggttccaccatgcccgccagcatcttcgcgagggtcgatttcccggagccgttctcgccgataatcgccagcgtctgccgttcacgcagggtaaaactcagcggcttaaccgcctcaaccgtctgacggtgaaaccagccggtgcggtagcgaaaggtcttactgagttggcgaacttccagcaatgtttcgaccatttcactctttctccatgttcaacgggaaatgacaggcgtacagatggttgcgcgccccggtaagacgcggcgtttcgatacactcgcgctgggcgtacgggcagcgcggccctagccgacagccgataggcaactgctccagcagcgggatcgctccaggcagggtgttgaggcgacttttatgcggcatggcgctaccgaaatccgggatcgcgcggattaacgcctgggtgtaggggtgatgtgggagggtgatcagctcttcgctgggcccactctccaccgtctgcccgcagtacatgacgttgattttatccgcccatttgctgagcatttgcaggtcatggctgatcagcaagatggtggtgttgttgttctggttgagccgcgtcagcaggcgaataatctgcgcctgggtggtcggctccatggcgttggtcggctcgtcggcaatcagcagacgcggctggttggccagggcgatggcgatcatcaccttctggcactcgccctcggtcagctgataggggaagctgcgcatggcatctttgtgatctttaatgccgacgcggtgcaacagctcgatggcccggcgcttgcgccagcccagccgttgccaccagcggcccttgtaggtccagccggggatactctgaatcagctgctggccgatgcgctcagagggatcgaggcacgactggggctcctgaaaaatcatcgacacgttatggccgatcagcttccggcgctcgcggttcgacagtcgcagcaggtcgatgtcatcgaagcgcatgcggtcggccgtgacccgccagttgtctttggtcacgccgcagatagctttggcaataaggcttttcccggagccggattcccccaccaggccgcggatttcgccttcggtcagcgtcaggctgacgcgatcgacggcttttacccagccttcgctggttttaaattcaatggttaagtgacgaatatcgagtaacggcattattctaccccggcaatgatcgcccggcgaataccgtcgcccagcaggttgaccagcagtacgctgagcataatcgccgccccggggagcatcacggtccacggcgccacatagataagctccagcgcatcgcccagcatggctccccattccggcgaaggcagctgggcgccgagatcaagaaagcccagtgcggcaatatccagaatggccatcgacagggcgcgagtgatctcggtcaccaggccggaggcgatattgggcaggatggcgaacagcagaatattcagcgtcgaggcgccgtcgaggcgggcggcgatgatgtactctttctccagctcatcgtggaccatgctgtagacggagcgcaccatgcgcggcagcagcgccagccagacggcgaacatcgcatggctcagatgcggcccggcaaaggcgacgacgataatcgccagcagcagcgaggggatggagagcagggtgtcgaggatatggttcatcaccgccgagcgcaggccgtgggtcgatccggcaatcacgcccagcaccagaccaaacagcgtggcgccgagggtgacgacaaaagcgccgccgacggtgggcgccgcgccgctcagcagtcggctcagcacatcgcggccgaggtcatcggttcccagaaagaaggagacttcgccatagcgcgaccacgacggcggcaacagctggtagccgaggaactgctggtcgatgccgtagggggcgaaccagccgccgaagacgcagagcagcaacaggcccgcgcagccgtacaaaccgatcatcgccgtggtgtcgccatagaacttacgccatacggtgcgcagcgcgccgggcggacgcttttccagataaacgctatcgtagggcatatgaatccgttttaagtttgttagtcatgctttaagtcttttcaaaaatcccgctaataccaataccttgctagcatagagtgctttaattttgtgtgttctgcattgatttgaaggttatcaatttaaccaaaatgtgtacactgatgtgtatatcatcttccggagtgtacacattgcttaccgacacaaaattaagaaaagctcttggcaaaaagagagaccagatcgaggtcatatcggacgcccatggtctgaatgtccggttgtctacttccggcagtataacattcttttaccgctacagatggaacgggaaagccgctcagctaacgattggcgattatcccaccacctccttatctcaagctcgcgaacgtagacagcagttcagggcctggttgacagaaggactcgatccgagacggcaaacagttctggagaaacagaaaaaagtcgaagcgctcaccgttaaagaggctttcgattattgggaaaagtattactgcatccccgaaggtcttgtgaaaatcaaggttaaccgacgggacttcaataaccatatagcgcctgtgctggggaacatgattgttgatcagaccactaaagcgcactggcttaacctttttgatggcatggggcgaagagttgtcactggtcagatgcttgggctgatgcagcgtacgttccgtttttgctccaatcgaggggtaattaatgtgaacccaattgagagccttaggcgctctgacgtaggtctcacagcatccgtcaaagatcgcagattgagtgatgaggaaatcaaaacagtttggaatatccttcctgaattgaagtacagacaacagctgataatgaagtttctcatcatgactggctgccggagtacggagatcaggacggcaagatgggagtggttcgattttcatgagcaaacgtggaccattccggcaagcgattataaaaccgggaaatcggtcagaagggcacttcccgaggcagtagtaagaatgatgttagcagagaaggaaacgtcagtttcaaaacacgttgtgacactgtcacgctacagagggccagaagatgacagaccgccactacaaccaaacgtcgctctgttttctgctcagattatagctaaaacaggcatgaagccctggtctctccatgacctcaggcgaacagtggcgacacgcctttctgaattaggtgcgccgccacatgttgtggaaaaactgcttggccatcatatggcaggtgtcatggcacgttataacctgcatgattatctggatgatcagcgtcactggcttgctgtttggcaggatcaccttgagaagctggttggtcagcctctggtttgatccccacgttatcttcccaggccaacaagtctgaaagtctccaccttttagggctgccatttattttaggctgcgggaatggctgagcaaagtaagagggcatccgggatggggtgctccagaaataaagtgtgctgcgcgatattttgtatctggacagaacgtcatcggttatcaaaatttcatctgatttatgagatgtattagtcataaaaaccccttagttacattgtccaggcagatggtgtagccggcgcgcgcagctcatggctgtggccacatagctactttttctgttaacaacttctacagtgatctttgagccttgaaccaccaccgtataagttctctttgttttctgtcgcccgtaggctccataaagctcaacgtgttttgccagtgccgcatcgcacgcttggcggcccagaggggagtgtctgcttcggttaatcaatcgcatatacattcctttatcgggagagtttcccctcccaatctggttaacccacgtattccggtttcatgtcgtccagggtgatgcggaactggtcatacagttcatcaccgaggtggcggcgcgatgaggtcaaggtgctttctgccttcgcgaataatgcttctgcttccggatcccccgggttagggagtgaatttatggcggcctcaactttgttcttcgcatcaacaaggtagtagcgtttcaccgccttactcttcagttcggtatacaaagcagtacccagcagagctttctgtgattcgatgtctgcacgaatggctttggcctggtccactgagtcagctgtatcaatccggtctcggagttcgtcagcaacagagtcaacgttagatgcaggctcttgcgtgctggtggaatcgccaacggagtgtgttatctcattcagcgtgaccttttctgtctgcgccgggttgataaccctttcttcgcgttcgtcaatttcatcggcggtatagaccccgaggatcacatccgggcagtacagtcgcgcccaacgtttaacggcgagataggccagttgctgacgggggtcgctcgcccacagtgtagagttgcggacttgtgcctgcgaaagcatcagcacaagctcgcgaggttctgattctcctttgagggttgcccaggcgcggacgcccacgccagcttcatcttgcaaatcccagcccggcgcgatgtagtcgttacctttgccgctggtttttttaatgaagcggccaacgatattttcccatgcaccaaaccattcaaagtgaatacggtcttttgtcggagccatggtgttaattaccgcattcaccagttgtgcctcatagccaagcacacctgagttacccacgatgaaggttttctgtgccactgcaaacggatccataccccaacgcgctgcctgcatcactacagccatgcacgcatctggtttcccgcgataatgctcaggcacgaagtttccactattggccattacttccgagagcgtgcgcaggcggttgaacaattcaccgttcgtcaggatagaaacgttgtcgatcttctgggtctggttttcagtagttgcgactaaattggacattgttattcccccttatgcctgcacgcgcagcgcttcgagacggcgcatatcaaaatcgttaagttcttcggtgtagtcttcggtaatcggcgccggccattcgccagtgtcgaaaccgttcgcaatggcgcgcatagctttgcggtattccagcatgccgagttccagcagttcttcggatgcctcgatgatggcgatccagtggtagttctcgtctttgttaacgaatatccagaagaactggtcaagggctgcggtttcgcagtacatagccgcgctcaggtggtaatcgcgctcgatgatttcccggtgcagcttcgcgcgcaggccttcctgcttgatgttccacatactgatggttttcaggtccgcaccgatgcgcaggccgcccatgtctatctcaaggtcagggcgcacgcgaacttccagcccggtttcctcatcaatgccgaaatagctcacctcgacggcacggctcgggtgcgtcaacaacttgccagcggtcgggtgattcaacagtgctttctgaatggccagtgccgtagccagctgctggcgggtaaccagcacttttccttccgggttctcgcgccatgcatccagcaactcgtcggcaaacacggcatccggttttaccgatttcacggcctgaatcagatcggcctttgcgccagagactttcagcggctgcgccttctgtgcttcctgagcaaccatgtcaggattaataagcgccagctgttccagtaaggaatcgcggctgccgctggttttcacctgggcgggcagggtcgcgttgtattccttgatgcatgccttcatagcggtggcagtttgcttctgaccgtcttcaatgcgctggaactcagcaggtaaagacatatacccctggccggtttcttcaactgaagtacccaagggaacctgggcgggcagggtcgcgttgtattcctccaggaatctcttgatgtcatctgcgctgagcaaaaccggaagcccgttgttgtactcgtcgataaacgcgcggatcgtcgcagtcgtggtgaatgcgccttccgggatttcgggctcgatgctgaattctttttccagctgatcaggctgcagcgccagtgcatgcaccagatttcccatatccagaacaggggagcgtaccttctggatggtcttggatacgtggcgcgcctcgaaatacatcagcgatacccgcgcatctttaaccatcgtggagctgatgccgttagcggcgtggtagacctcatttggcacgccttcatatcgacccggctcgaaatactccggccatgctggcgctatttgttcagcctcttcctcatcatcaatgtgagcattctcagaaacctggcttttcagcacttcggctgtaaggtccgggcaacgttcagccagtatttcgctcatgttcacggcagttgtttgcgcaggaggttcatcagcgctttcgcctgttgataccgaactatcaatttcgtttttgactgactgatccgcttccatctgcacattgctggtggttccttcttcggtggcatttgtagccggtgaagtcataaggccttcaattgaaaacattccgccgccgagatttgcaatttccggggctctgggtttggtcaggtcttcggttatccacttcggatccgtggggtcactgataccttcgacatattcgccacgttcggcggccagaacctgattagcgtcaggacgtttcttttgcgcttctttcaccagttcggtgccaattacctgaaagtcagttgggagagtttccaggtccggcacaccttcatctccatcgatagcctttttcacagcgtccagagtgacggcggcagatgaaacatgaccagctttttcaagcgtctcagcagaaggggcgtcatgcttatgctcggtcaggttcgcattgatataggtctgcagacttaccgggaaatgatgaatatcgctggtggcgccacgaataagggcaaaaatcgcggcgcgggaataatccaggatgcctgcaaccttgcgcagcgcagccgaccattccttgaacggactttctttcttctgaacgatctctttggcccggcggtgaatagatgccgggaaattgtagatatcgaaatccattggcattgtggccagggctatttctacatcgagcgtatcaagggtatgggtgtagtcagggttgcgatcggttttattaccgccgccagcattagttcctgcatcagttttcaaaaccgaagaaatgcagttaccggcagcccattccctggtgagaatgccgcggtcgatcgcgttcgtggcgaaccacagctttgcaaactgaatacgtttgccgagctcatgccgtttcccttccgggaagacttttttattggcgctggtgaatttccagagcgccggcatatcgtattttttgatttcagggacattctcggcggccaggatcagatcctggacggctgcgttatcagtgtccatttcaagagctgacagctcctgccggtgaggcatgctgatatgataaacgtgacgttcttcggccatgtactgcgccagcagctgagcgcgaaaagggagttctgccacattaaatagcgcgctcgaatcgtcctggtattcatcgctaccgaaagtttccacggtctcatcttgtgccgcgtcgccagtagtattggcatcaaccaactctccagtaacggcctcagaggatactccggcattatcgccgtgatgaacatcagcaggcgccagtcctggcttaagagtccaggtgcggccatcgtcgccgagctggtagcgttcgcaccatgagtaatcgagaacaccctccgctggcaggtcgttgaataccgggaaatcggtgcgaattggtttttggtaatccttaccgcggcctgtttcgatcccagcgtcttccagatcgacgtccagctgcagaagggcgcgagcttctgttttattagtgcgccagattacggcatcagctttacccgatttttgagtcgcttttatcagataaaaatattccatgtgatagcctctattttggatgtagaatcccccgggccattggtagcgcccattcagggtggtcattggttttggtaatttccggtgtaactttggtcggtggcaccggacgtacagcccgcttcggcgggtttacgttagccctcgtgagccatctggtcgtgagaggcgcaacgttcagagcaatactctttttctttccgtgcgagctggttcccctggaggtacaacagggtgcttaccactggttttccctcgattgctttacggcagtaaccgcattttttctgcattcctccccctacatttgcaccgtgaacccggccggatgcttgtccagtacacctttcagcggataacattcagctttcacgtgttgctcttctgcagctgccttgcagtcattctcagtgtcgtaaacgccgagcaggacatcctgattaccgcccgtcagcatgctgacggtgagaaccagggcaaacatcgtgctcatgaagggtctcctttttgcgcgagcatgtagcacactcggcggatgaaagctgacagcggatttaaacgaacagcctgctgacgagcgggtttgcgtgcgaaatcattcatagaaacaatcccctcagtgcgctgaaaagcgcgatccagatgaagagcccaattactgctgaaatgaccatggctctgataccgtgcttgctcatttcaactcctcatgtatgcctgtcttttaaccacttcaggctcggtggtatgctggtagttctcacacagccagcaaggaaataaaaatgtcaaaactgacaacgatgaaagttgcttgccctgattgcggaagcgagatgctcaagcgtcccgatgatttcgactttgatacaaattttgttggcgtcagttgtgccaactgtggtcgagaaatcactaaggacgatgtcgttaagcaagggacggatgttgtcaaaaagcaggttgacgacattctcagggatgccttcaagggaacgggctggaagctcaagtaaccccagtagttcctcgacctgattgattacttccgtggcgtctatttcgagttcaataggcgccacctttaccttactcatctcatcctcattgccttgtcgccggccagcggaacgttactacctactgcgcattgatatttccacctcatcccggcattcgtatgctccgggcagctacttcgtgggcgtcctgccttggtggggtgttgctggagttaattaaacacaatgtttaatgttgtgtcaacattgtgagtaattaaacgtaaacaaaaagtttataacgagaggtgggttagtgcagggagtatgtttatgggtctattctttggttttaaaaacatctatgagggctaatggtatgcggtatgacgatgagtttttcgcgaagatgcacccgcaaatagcgcaggttatcggggtagcggttatgcagctactggttgagaagcaagagccgtcaagagaggctctgatagagatgatttaggtgttgtggcaggaagaccatgtcgatctggctgtggaattggcccttgacgttctgtcgctaccgaaagagtaggggcaataaaactcgacgcgtggccgggctactggcgctgacaatacggcaatattttttcaatcgctgattgaataaatgaagggctatgaaagtcaggatctttcaacgggtcactgacatcaatactgttttgcagggagcgctgatattcactccagagttccgaaaggtgtttcttgttcttggggctgcagatatcaatgaacgtatcaatctctcgctgtgatattgatacatttccgccaccgggaaacactccattctcaataagtcgcaattgatctcttaatttttgtcttattatatcgcttattgcattgaactctttgcgtttttccccttttactgcatatctgtagctaaagtaaccgcttgcaggaactgctgtgatagatacaatcattgcaatagttgcaacgatgtcgctatagctcatggaggttttcctatgtctggctctgatatcttggccacagttgccttgattatttcagttacaaacctctccgtaattctctacgggatatggcgcttacgtgattaaaccgttgtgatgattattcttcatcgcccttaatccttcgccccatgtacttggcatacagctcatcgagttctttgagacgcagagatacgatccgcagcatgttctgttgctcttcttcgttggggagttggttatagagttccagcaaccgtttctcgtccgggcgtaaaccatcatttgcatcgacgtcctgacctaaaacccactcaaggcttacgccaagagcatcagcgagctttatggcagagctctttccaatcgctccccgcacaaaccagttgttaaccgattgcgaacttacaccacaaattctcgctatatccgctttggatatgcgcttcatctcaattatttcattgagcctttggacctgtgggttgtcggactggtgcgtattttttctcatatatcacgattttaaactaaatgtttaccgtctcaacattcataaagttgacattaaaataaacataatgtttaatccactctgtaactttaatggagtggtttatgaacgcattagaaaaagccatacacatcgctggtgacgcaacgaagctagcagaaaaactggacgtctcatctatgacgattagccattggaagcatcgccatgggggagccgttcctcagtctcgggttttccaaatcttccgggtaaccggcgttactccgcatgaacttcgcccagatctttacccaaatccaaacgacggtttgtcttcacaaaatctggtgggatgaccatgcaaacactttcctttcaacaaaataccggattcaaccccggcgctctgataaagcgaaatcaggcgaaagtggcagatcacgacggcattcgttctgccgttcgcgcctgggctgcagctgaaggtcaggatgttgtatcggcgtacatcatcgatgagtggcgccagcagggcggggaagaaattgaatttcctgcggacatcagccgcgcccgacagaagcttttccgttatctggataacgaggtcgattctgaaaagtatcgcgcgaatgtgcgtcttctgacgccagccatcatggccgtcctcccgttggaatttcgccaccgcctgttgcctgaagacaatttcatgtcccgactggcacggctggagaaagagaccagcgaagcgaaggttgccgttgccatgggagctccacgtcatcaaaagctgaaagaactgagcgagggaattgtcgagatgttccgggttgacccagaactaacggcgccactgatggccatcgtcacttcaatgctgggggttttgtaatgtcgggtatcaaaaaggcgaaagccgcggtgctgtaacaccaacggctttcaggtgcaaaaacgaagaggtaattgcgaggtaagtatgtcagaaacaaagactgaggtaaacgcccaagcgacccataaatgctccttttgcggagcgagcaatattgaggtttcgggcgttctaatcgccggccccggcgtatccatctgtcaaaaatgtgtctttcagtgggttgatattgtctttcaacacgcagaaaagaccgataaaccaacgtcataagttcaggggtatctatgcgtgactatgcaacagtcgcaccgcaattctggctggggaaaacaggtcgggaactgcggaaaaaaggcgctgaagcgcaggtggtttcgttttatctcatgacctcgccacacgcaaacatgctcggtttgtattacctgccaattctctatatcgcccatgaaacagggctgggcttagaaggggcttcgaaggggcttaaaagcaccatcgaagcggggttttgtagctatgacgaggacacagagatggtctgggtgcatgaaatggccgcctaccaggtaggcaaggcattaaagccaggtgataaccgttgtgcgggggtcaggagtgagtatgcatcactttcagaaaacccttttctttcatcattttacgagcgttataaggatgattttcatctgaatgtcaaacgcgaatcgtgcccaacgccagaaggggcttcgaaggggctaggaagccaagatcaggaacaggatcaggaacaagatcaggataaagatatttcggggcatggcgacgccacacccccagatggtggatcctccgatgaagctccatctgaaaagccgaaaagcagttacccggaggaatttgaactggcctggagggaatacccaaaacgtgccggaggcaatagcaaggtcgatgcgttcaaagcctggacagcccgaattaaatcaggcgcaacagcgcaggagcttaccgatggtgttcgacgatatgcggattacgtcactgctgccggaaaactcaacactgagtacgtgaaacaagcgtccacgtttttcggtccctcaaagcactacgaggagttgtggagcttcgaagtaccaaccggtaaacgggatccgaactcaatatcccagccagataaattaattccgagtgggttcagggggtagtgatgaaaaatatgattggtactggtagtgcgctggagcggctgaaaaaactcatccctccgggtgtagagcctaagtttggcagtgtagaggagtggagaacctggcaggccgaggaagggcgcaaacgctgcgaagaactggaaaaacaaaaccagcgtacccgtgctgaaaaaatattcggacgagcgggaattcaagatctgcatcggagctgcacgttcgcaaattaccaggtggcaggagatggtcagcgccgggcgctcacgatggcgaaaagttacgcacagaacttcggttcagggttcgccagtttcgtattcagcggagcgccgggaaccgggaaaaaccatctggcggccgcaatcggaaatcacctgctggctggtggtcgctctgtgctggtggtgactattcctgacctgatgctacgtgttcgcgagtgctacgacgacgggcagtcagaggcttcgcttctggacgacctttgccaggtagatctgctcatcctggacgaagtaggcattcagcgcggcagcagcggcgaaaaggtcattctgaaccaggttatcgatcgccgcctgtcgtcgatgcgtccggtcggcatcctgacgaacctgaactacgaatctctgacgggcaccctcggcgcgcgcattctcgaccgtctccagatggacggcggcatgtgggtgaacttcgactgggatagttatcgcaaaaacgtccgccatctgcgcgtcgttaagtgaggaaaacatggctagagcattttctgctattgagcgccgggagtatgtccgcgcagtgattcgtatcaccagacatcaggggcgactcacgaccgccgaggcaatgaaaaaactggggctgagccgcgctactgtccaacggtatttttccgaagcagaagcgactggtgaggttgtccggcatggtcgtttggggctgttccgcgatcagcgggccgtcatcgactttgacatgaagcgttttggcctggtgccgaaagttgctgttgggatgaattacagcctgcttggcagtcctgtttttcagcgagttttagatgttcaggaggctattcatggctaagaattcaatcgatgtatacggtgccagcggcaaaacaaacgtgctcaatttcgagcctgaaaacctgcacctggtcaccgataagacccacccactttacgatgagcgagtacacctgccgatcgaggaagggatggtactgaacattgcggagctgggtgtactggagccaatcatcgtctggaaagaccctgaaacggggctcacttgcgtagttgttggccgtcagcgcgttaaacatacccttgaggcaaataaactccgtctgaaagaaggcaaagacccactgcttgttcccggagtcgttaagcgcggatcagcaaatcagatggctaaatacatggtcagcgaaaacgaaattcgccgacctgatacaccgcttggccgggctaaaaaaatgtcagacgcgctcgaccgcggactcgatgaggacgacattgcggtgttgtttggctgcagcgttcaaaccgttcgtgcaacgctctcccttctcgatgccacccaggccgtccgggaagcagtggagtcgggcacagttaccgttacccaagcccgccagcttggcacacttcccccggaagagcagcgggaaaaagtgaaagagattgaatctgcgaccgctgggactaccggtcatgaaaaagcccggcgtcagcgtcagatcctcggtgaggcaaagccgcgcctgaaaacccgcaaagaaattactaaagccctggaatctgccgagggtgagtatgcgagcgcactccgttgggtgcttggggaggccgtatgacaatcgtaaaaacccataccggcaccgtgatcaccaaagacggtccgaaggtaaaaaaactgcaccagacagagcggatgtgggtcgtcggcaaaagcgagttttaccacaaagaaacagggcgccgtcactttgcagaaaatacgcgccgccggctgctgctcgacaccatcaagcctatcgaggtgaagcatgtttaaaaagaacaaaaaggctatttcacagattgcggaatatatcccgcgcgcctgccggggtatgcagctgcatgaagcgaaagcgcgtctggagaaaaaaatcgcgctctataccgatgacggctgtgatgttgccgttcttaatgcggcctttgcgccagctcttaacagtcatacgcgggagtcttttttttcgagcatcgcagcgcagctgcatgagggggccaaatgaccgagcaaaccatcctcgacatgtgctgtggctcccgcatgttctggttcaacaaacgagatactcgcgcggtattcgctgacattcgagccgaagagcacaagctgtgcgacggccgccgtctggttatcagtcctgatctcgttgctgacttccgtgcgctgccgttcgctgatgcctcatttccggttgttgtgtttgacccgccacatcttgagcgcgtcggccagaccgcgtggatgggcaaaaagtacgggcgcctgaacaaaaaaacatggcgtgccgacattcgcgcaggattcaaagaggcgtttcgcgtactgcggccacatggtgtgctcatattcaaatggaatgaaacccaaatccccgttagccaaattatagctttaacagacgagaaaccggcgatcggccagcgcaccggaaagaacgataaaacccactggatcatcttcgtgaagggagctgcggtatgaaaattaaatgcatcaaagacacagagggatactggactgaaggtgaaatgtatccggcccgtgtagttgctggcggttttgttcaagttggcgacgattacgatcgcattggcgagggctggagcgctatgcctatcgaataccgggatgacggctcgatcgtttatgaattggggggtattgaagatgacgttcagtttgaggaacgtgcagcatgcgcaaatcattaaccgcacgctgtatgtggatgggaagttgagtttaaaccgtattgcgactcgaaggttagaccgaagtagtgcaaaaccccacgcaccgaccagcagcgcgcggcatgaaggactttgccgcgctaggcttctacgtggtggcgctgcatagcaaagcggtgggggaaattattcccccacaatgaaattaaggctttttgggaggtggtgccggttgagaagtttgcttagcaggctgaaaaccattattagccaaatcatttttaggttgataacccttttctaggggcttgtaaccatcttccttataagtttttttagtttctgacatatacaaaatcctctatttctatgggtaggtagtttgctgctgttcaaagcggaaaaactctaagtgctcgatatccttacttaaaatcagtattcctaaagtggaagtgcgctgacgttcaaaaccaccgtcgctgtttaattcccaatgttcctcaagatagatctgttcaggttctggagcgctggacgcaaacgagttagctccatacttacccgctattttcttcccatcttttagcgtgataatcatccagcatggaactttcagaccaaaaaaataatcccatgccctacctgtggggtgaggcatgtatttacatagccaatcccattcgcgcatcctcgaaaacaaaaaagccaacagtgtcgggctagcaaataatataaacaagtaaaataaaaagtaagcgaaaggatgcgctgcataaaccttgttagattctataaaatacacagggataaaccagattgcataattaatacagctatacgagacaatttcaataattgctttagatgtatcaaaaaaagcattgggtctaagtacgctatacatcttcatacttatgaagccaggtataacgaatagtaaaaatattacaattttgctcttatcccagatatccattttgttttccaaggcgtagaggtcacataggtcacccctcatatgatatcctttaaacctacaagttaccaatcccttctcatgaaccacgaaatggatatcgcgcgttgcgacatatgggtggacatagcatgggtaaaaccgtggcgacgctgatctcgttggaaggtatctttttgggcagagcagagacacagtcagcgaaagtacttgcttcgctgttacggctaggacattgcaggatgaggccttgtcatagggtgacctgcgcaatatcgaagtgtagctattgaaaacgcgcactgcggcaacgctgtctcgcctccttttgctgaggcgctggtgagggctaatttaccggagatgtgcctgaaaaaagacattgcagcatgataaaacccgcttcggcgggttttttaatatggaaaaacatcaatctaaacataagcatggtgttagcaaaaagtgctgcagaggggttgaacatttcatgcaaccggtatactgtttatttatacagtatccatgtgaggtgctaaccatgaaagttgaagtcacaattgataaacataaaaaactccctgatggcgccatacctgcgcttgagcaagaattgctgcgccgcttgtcccagtcttatgatgactgcaaattaactattagacgcacaagcaacgatggccttagcgttttgggcggcgctgatggcgataaaaaacgcgttgagcaaattctgcaagagacgtgggaaagcgcggacgactggttttactgattcaccttttggtggctggcatttcccaaagcatcgcaataagcgtgtccctttgatgctgtcaccggacttttttttgcgtctgtatgtcgctcagggggtagtgtgagtgatggtattgaggttcctactaatcattcctggtacgatgttgtcaggagatcagatggcgccattatttgtagcttcccggccgaaggaaggcatctgatttacagggttaatggcataatttcaatgcgacctttattgcctgaagaagaaatttttactctaaacggatttatgaaatttgcggaacgacttggctaccgagttctcccaccttctgataatatgaaatcaacggcctgaacaaccgttacctactgcgccacggagagaagccatggcgcaattgcacttaataaaacaatctcaaggtatcctgatccccgcgacgccggagaccagtgattttctgcaatcaaaatgcaagctcggatccgttctggaagccgattataagcttgtccgcaatccggcgtttcaccgccgttactttgctttactcaatctcggctttgaatattgggaacctaccggcggggcgatttcgtctaacgagcgcaggcttatcacaggttacgccaaataccttgctgcatatggcgggagtgaatcggcgttgcttgatgccgccgggcaatatctcgaccggatagctgagaagcgatccggctatatcagtatttgcaaatccttcgatgcttaccgggcgtgggtcatcgttgaagccggccactatgacgccatacagctgccggacggcacgctgaaaaaacaccctcgcagcatttctttcgcaagcatggacgaatgcgagttccaggaactgtacaaagcatcgctggatgttctctggcggtggatcctctctcgttcattcaacagcctgcaggaagctgagaacgccgccaaccagcttttaagcttcgcggggtgatgccgatgaaatactcatggtttcagcatcccgaatgcactgcggagcaggcagaacagttggtgtccagatatcaggcgcgtggcatcgtcaccgagaaaagccttaacccggattatctgagctggacggtcagcgccaggctgccggtttgtgctcgaccggagtatacgccgcgatcacttcgtcaacggatttgggggtaagcatggctaatcttcgcaaagcggcgcgcggccgcgaatgtcaggttcgtatcccgggcgtctgcaacggtaaccctgaaaccacggtattggcccatatccgcattgctggattgtgcgggaccgggattaagccgcctgatctgatcgccgctatcgcctgttcatcctgtcacgatgaaatagaccgccgcacgcgcctggtagatgcggagtatgcgaaggagtgcgcgctggagggaatggccagaacgcaggttatctggatgaaagaggggctgataaaagcatgaaccaatatcgaatttcattaccctggccaccaagcaacaaccgctactaccggcataaccgggggcgcacacacatcagcgcggaagggcaggcataccgcgacagtgtcgccagaatcatcaaagacttgatgcttgatatcggcctttccacgccactgagaatccgtattgagtgccacatgccggatcgccggcgccgtgacctggacaacctgcaaaaagctgcattcgacgccctgacgaaatcgggtttctggctcgatgaccagcaggttgactactacagcgtgaagagaatgcctgtcgtcaaaggtgggcggcttgagctaaccattaccgaaatggaggccgcatgagccgtgacgttatcgaacgcatccacgaccgctggcaaaagctccgcctcctgcgtagccgcggcaccgtgctggttgactacaaaatattacgcaatttcgtccgtatctataagcgcctgggagaagaagcatgacagctcaatacttggaatttgttcgccagcagctgatagtggccaccgccgatctgagcggcgcgacgaaagggcaactggtggctttcgcagaaaatgcgcaattcaccgctacggcgcgcagccggggaaggaagaaagtagccgacccggtaaccggccgcatggtaaacccatccagcccgccaattcccgggcagcagtcccgcgctaagggttcatcaatcgctctcgttcttcccgttgagtattcgacggcaagctggcgccgggctctgctgtcgctggaagagcatcagaaagcctggttgctctggaactacagcgacaatatccgctgggagcaccaggagacaatcacccggtgggcatgggagcaattcagcgagaagctggctggcgtgcgcattgcaaagaaaacggttgatcgcctccgtcaacttatctggctggcagcgcaggacgtcaaagccgagctggcgggtaagtatgtataccagcaccaggatcttgcagccctgtgtggcgttaaacctgataactggtgccataactacgctgattactggcggactatgtgcgccatttttaagcggcttgatagcgactctcttctctgtgtcgtgagaacacgatcacaacaaaaagcgactttttcgcagcagggtcttgcaaaagtcaattaaatgcgtcatatttgagtctactttgatatgctgccttaactttaagtggcggcatgaagatgatagtcacataccagtttgtaaaattagcctcggcatcccgccggggcttttttatgcctgcgatccggtcagggctcttgggtagagacgtgccgcacgacacgttaaagccctccgcgcagagccctgaaccagatttctggtttagctcagcaataagaaaactgcatgccatcatttgcttacatcttattgaccagaaaaataacatcttgttaatctattcatgtggtgaatccccctgtgcggtggggcgaccagtcacttacagtgatctgtaaatgcagcgcgagtcatgtcggctgggacatgctcaccgggaggcacccggcaccatgcaatactactaagacattaggttgtgggttgccgtttcggcttctccagctatgtttaaaaggcagtaacggaaaaagcgagcgctctcctggtaaatcggtagctcggactattaggtgcgttttcgtttgttactacctagaatgcctactttctgcccgttcctctgagcgggctttttttcgccatgaataaggctcctcggcaagctgaggaacaaatcatttgaggctgcgcttatgcgcggccttttcattttcccctcaattctgagaggactcacagcaataagagggggcttaatgtccgatcctttaactggtaccggcctgatttttggtggcggtttaattggttccgtcatatatggcgttatcacccataccgattttggtgtggtatttggggcttttggcggcgcagtgttttacgtggctacgaccgcaaacctgacacgtggaaggcaaatagcttacttcatgacgtcgtttattgtcggtgttctggctgcaggattattaggctcaaaatttactgcatggacaggctatacggatcgtccgcttgatgcgctcggtgcggtggtggcatctgctgtaactatcaaggtcctgactttcattaacagccaggacttgagcagcctgttcggattactttcccgattaaggggaggaggttcgagtggtaataaatgacccggcagcgctggtcaatgcggtgatatgtgccgttattgtctgcgctttgatgttttatcaacgtcgcggtgccaggcatcgccctggtatctccattcttgcttacttgctggtattgatttacgcgagcattcctttccaatttatcttcggtctttacgtacagtcccactggctggtggtaatggcaaacgtaatgatatgcgccgccgtgctgtgggcacggggtaacgtggcgcgtctggtcgatacactgaggcactaatgaatcaaacacaattccagaaggcggctggtatcagcgccgggttagctgcgcgctggtttccgcatattacagccgcgatgaaagagtttggcataacagcagctatcgatcaggcgatgttcattgcccaggtagggcatgaaagcacgggatttacccagcttgttgagagcttcaattatagcgtggccgggttgaatagttttgtccgcgccgggcggctgacgcagggtcaggctaattcgctcggccgccgtcagggtgagccctctttgccactggagaggcaaagagcgatcgccaacctggtgtacagcaaacgcatgggtaataacggggcaacagacggctggttttaccgagggcgtgggctcatccagatcaccggcctgaacaattaccgcgactgcgggaatgctctgaagattgatctggttaaacagcctgaattgctggcccaggatgagtatgcggcgcgcagtgctgcttggttttatgcctcacgcggctgtttgcgttatcccggtgaccttgcacgcgtcacgcagattatcaacggcggacagaacggcatagatgaccggcgcgcccgcttcctgaaagcaaaagcggtactggtggtgtgatcatgggaatcgaagcaatcgcggggctggtggttgtcatcctgggtgctatcgctggcgcgttcggcatcggccacgctcgcgggaccagtaaggcggaagccaaagccgatcagcagcgtaccgaagagaacgccgccgccaccgtcgccgcggcagaacgtaaggcggaagttgtgaaaggggccagtgatgtacaggaagacgttaagcgtatgggcgatgacgatgttgatcgcgagctgcgcgaaagatttacccgccccggtagtcgttgatacggcctgcaactgggtgagggtcatctacctgaccgaccacgatattgacgtgatggatatgcagaccaagcgcgacattctggcgcacaacaaatcggtacaggccaactgtccgaaattatgactaaccaaggcctcgcaatagcggggctttttattaccagaagcaggagaagaagcatgttaacagtaaaagtgatgtcaccagatggtggcgaagaaatccattgtggcctgagtgttggtttcaaccccaaccagcagagtattgccgtatcgggaatggaccagaacgtattcctgaagcagggagaggttgcctatgtgatgaacgcaaacggcaagaccatttcccgttacgaacacagggtccagcagtaggcattacagaagctcctgagctaggggcttcgataatgctaaaccgaaagatcgggttaaagcctgataaaaaaccccgtggaggaaatcccaaaactacggggtgctgaacagccagccaatggcggattgtagccacatagttggtttattatctactggttgagaataaaactgagagcctagaaggcttgagagtggctcatccctgagctcacgggtagaacggcagactttgtcatggcagagcaaagtcataacttagtttaggtaacatttcggatataacaagcgtagcgggcgtgtatcaattagcggagttcagcaactgaggaatcgagcattcactgagtgccatagataatgctatagttcaccaggaaaagcagattgcatgctgtcatgagatgcagttcatattttgaacgtcagggttaagtcagtagtgaatataactattaatagtggattatttggttatttgtttttgttattaactatgtggccagtttttataacactgtgtctggcaatgtccatagcattttacggagtgttaatgaagaaggctgcgcttgcgtggctgattgccgctttattttttggcattcttggggggctgcgtgggtattgactctctgatattgaggttatttcgacgtctgtaaggatccatagctgccgtcatccatcgaattcatgtatgctgataaggatttttaaaggaaaaggaatggatgatgaatacccataagcttctggatacatacatgttagttggtaccggtctttctcgcgtcaaatatgagattttttcaggagatgaaggatcatatgcgtttattacgatttatgcatatgagcctcatttccatattaagggccatgattccttaaagttagacgaagctgttgatgtcagatctcagatcgaagggcattttgcagatagctaccagtagccaaaccatttatctgaatctacagccccgtttgtgcggggctttttattgcgcctcgaatgctaagtagtaaccaatgccaccgttaattcccccgcatgtcgtaagcgcggatgtgcaagcataattacggaccgctcaggctgctgcgacaagcaccgcaatgacggttgacagcaattcaagggcataagagtgactccctcggatagtgggaaagcattacagaagctattctgccgagtggtttctataatatttcccacatcgcacagaggtaagacatgtcagagatcaccacatccgagcaaatccgcctggatatcatcaagaaagttaactacgacaccgcagcggccaagctggccattgactgggttggtgatagcaatctgaaagctgagctattcgctgactctttcgatcgcgtcttcactgaaagtgagattgtctcgaagacccgtaaagcgattcaggaagcgaccgaagcgctggcgctttttgataccgcagctgagtaatcatcacaaatgccacctacgggtggcttttttaatggttatcgaatagggggagtctatgccggtatgcacgatttcaatagaagtaaaaagccgctggtggctgccgctctacctcaaaacgctgatgctattctgccagatgattcagcgagagcctgattacgaaaagatttccgcattcatcgcggagtatggcatcggccagaaagtgaaggcgggaccagtgcgaaagaatacggagtaatccatggcaaaaccggactggggcgagcttcagcaacggttcctgtccgatcatgccgcaaccggcgtatcaccgaaggattggtgtgaagcgcagggactgaattacgctactgcccgccgatacatcaagaaacccactgcgcaaactgcgcaaaaacctgcgcagaagaaactgcgcactgcgcaaaaggaaaagtgcgcagaagagctggtggatgatgatggcctcaccgatcagcaacgtttatttgtcgcagaatacctgaaggaccacaacgccacgcaggccgctatccgtgccgggtacagcaagaagactgctgaacaaattggctatcagctgcttcagaaaacttcagttgcgcaggccattgcgcagcagcagaaagcatccattatgcgcacgcttggcagcgctgatgaagtgcttgagcagatgtggcggctggcaacattcgacgccaaccaactttctcagtatcgccgcgggagctgccgctactgctggggcttcggtcaccagtatcaatggcgcgatgcggtggagtacgaagagaagcggcttgaagcgcttgagcgtaaacgtcgagagcctttggatgatggcggctacggttacaaccacaccagcgcacctaacccggaatgtcctcgctgcaatggtgatggcgtcggccagccattcttcgccgatacgcgcaagctggcgcctgatgctgcgcttgcctattccggcgttaagctcgggaagaatggcgtggagataaccgctatcagccgcgagcgaatgtacgaggcggtgatgaaacgtctcggcctggctgacagtgagttcacccagcgtctacagcagattgaaatcgagcgccggcagctggagatcgacaagctccgtaaagagctggccgctgacccggaagatgacgaaccaacgccagttgcgatcaatatcaacgtagtcgatgcgcgagtgagggaagaggatggcgatagctccgacgcttaacgttccccaggctcgttttctggctatgcagcagaagttcaaagcctatgtagctggttttggatccggaaagacatgggttggctgcggtggaatatgcaaagggttttgggagttccccaaaataaaccagggctactttgccccgacctatcctcagatccgcgatatcttctaccccacggtggaagaagttgctcacgactggggactgaaagtcaaaatcgttgaaagcaacaaagaggtccatttctacagtgggcgccagtaccgcggcacgacaatttgtcggtcgatggaaaagcccgacacgatagtaggctttaaaatcggcaatgcgctggtggatgaactcgacgttctgaaagcggataaggcgcgtcaggcgtggcgaaaaataatcgcgcgtatgcgttataaggttgatggtctgcgtaatggcattgacgtgactaccacacctgaaggatttaagttcgtctataaccagtttgttaaggctgtgagggaaaagcctgaactaaggtcgatgtatggtctggtacaggcttcgacattcgacaacgaaaagaacctgccggatgactatattccttcgcttctggcgagttacccgccggaattgatcaaggcatatctgaacggccagtttactaacctgaccagcggcaccatttatcatcagttcgacagagtgctgaataattccagtgaggaagagcagccaggtgaagcgctgtatatcgggatggatttcaacgtcgggaagatggccgggatcgtccatgtattgcggctcggcttaccacacgcggtaacagagattatcaacgcttacgatacgcccgacatgatacgcatcatcaaggaacgtttctggctgtatgccgacggtgactaccgcaaggtccgcgagatttatatttacccggatgcctctggtgattccaggaagtcaaacaacgccagcaaaacagatattgagcagctccggcaggccggatttaacgtcatcgttgatgatgctaacccgccggtaaaggaccgcattaactccatgaacgccatgttctgcaatggtaatggcgatcgccggtacaaggtgaatgtggcccgttgcccggtctatgccgactgcctggaacaacaggtgtgggataaaaatggcgagccggataaaaagagcgataacgatcaccccaacgatgctgccggttacttcattgtgaagcaattcccaatcgttcgacctgcattctctatttcactggacacgacattctgatggccaataacgatattacttacgttcgccctgaggtcagggcggcaatgcccgtgtggaaaaaaattcgtgacgtgtgcaaaggggctgatgctgtaaaggccgccgggaatgaatacctcccttttctggatccgtccgataagtctgcacgcaataaaaagcgcaatgctgattacattcagcgcgccgttttctacgcgataacgggcaatacaaaagtgggtctactggggctggcattcagaaaagacccgaccatgaccgcgccggataaactgaattatcttcgtgacaacgccgatggtgctggtgccagcatttatcagcagtcccagcaggttacagaaaatattctggaggccgcgcgcgaggggctttatacggattatgcagctgagaccgacgaggcgatcatccttcgttatcaggcggaaagcatcattaactggcgcaccaaacgcatcaatgggcgtgatcaactggtgctggtggttttacgcgaatgcatggaaaaggaagatggttttgcgtacgaggatgaaatccagtatcgcgaactggctctggagaacggaaagtttgtctgccgggtatggcgaaagtcagctgacgcaggctctttttccgtcacttccgagtatcatcctaagccaaaaggtgaggatttctgggatgagatcccctttaccttcgttggtgcgcagaataatgatcccaccatcgacgagtcgcctttagccgccctcgttgaaattaaccttggccattatcgtaattcggcagattacgaagacagcgtatttttctgcggtcaggttcagccggtgatttccggtcttgataccgcctggcgtgactggctgcaggataagggaattcgtgtcggttctcgttctccattcctgctgccgaaggaggggagttttacctatgctcaggcgcaaccaaacaccctggctaaagaggcgatggacagtaagcgtgattattctgttcagcttggcgcccggcttatcgagcagaacggcgcggttaaaaccgccacgcaatccagcggcgagcaaaccgcatccacatcggtgctcggcatttgcgtttccaatgtctcggaggcctatacgctggcgctcggctggtgcgccagatatctcggcataaaaggcgaggaatatcgttacagcatcaatcaggagtttatcgccaaagtcgcagaatccggcatggtaacggcaatcgtcaatgcctggcagtacggtgcgattcgcgacactgatatggtcagagctctgcagaggcttgacctgatagatcctgctgacgaccctgaaactgtcattgacgctattcgtaacggcgcgcctaacctgattggtggcaataatggcaacggcgaatgacaaactgcaggatgaatccatagcccacgctatatgggttagtcgctacagcaccggcgttgccaacaggatgataaaagttctgaatgacagcgacgccgaacttaccgccaggctgctggtggctatcgatacgctggatcccgagagctttaccgtttcgcgtctggaagcgttactggtcagtgtcagggcgataaacaaggatgcgattcagtcgatgtatgcagctcttactgccgagttgcaggaactggcgaagcacgaagccacttttcagatgagcctcttccagtttgccattcccgacgatgttcttgctcttcatccgctggtgggcatctccccggatgcggtttatgccgcggcgatggggcgtccattccagggacgtttgctgagtgaatgggccagcaacctcgaagctgatcggatggcgcggatatccaatacggtgcggcagggattcctgctgggcgatacgcaggagcaaatcgcaaaaaaggtccgtggccatgctaatcgtggttaccaggatggtgcgctgcagatgagccgggccaatgcagccagcattgcaaaaacggcagtagggcatcttgcatcaacagcaagacaaagctttgcgtcggcgaacgacgacattctgaagggtaagcagtggttatccactttggataaccggacatcaaaggattgtcggatccgcgaccgactcaagtacacgctggataacaaaccgataggacacaaggtgccttatttgcaggggccggggaaaatccacttttgctgtcggagcaccgaaacttacatcctgaaatcgtccgaggaattgggtattaaattcggcgaaatcaaggatagctcacgcgccagcatggatggacaggttccggctgacacgaattaccaggactggttctcccggcagtcgttcacgcgacaagctgagattgtcggagaaacgcgcgccaggctgattcgtgatggcggcatgtctcccgatgagttctacaacgacaggggcgagtggctgacgcttgaccaattgcgcaaccttgacgcgcaggcgtttaaggatgccagagtgtgatagagtaaattcgtggtgaatgcaggatgctgacctgcgcgccaaagcgtcccgtgagaaacgggcaagccggaaaccagactcacttcggtgagtccccgccgttctgaagtatcagaatgccgtggcagcaccggccaccacacctaattgtattgtcagtggctagggtcgctcccgaaaagcggaatcgtcaccacctacaaccaataacccgacaagcaacgagacgaggttgttatggattcacaaaaacaaagagaccttattgcaagcctgtatgaagagctggtaatcgcaagagggctcattaaagagatttgcacagtgcgaagcattgcagagccaaagtcttctttgcagagaatggataaagccattaaagatgcaaaagaatatatgctagaaaatagctaaatgaagaggtcgccttagcgcggcttttttattatctgaaatttacaacaggctgcctaagggcggccttttttattgggccaggcccacagttactatcccaaggggacaacatgcttattcgtaacatgctcattaaatattattcggcagctggtggtgaaggtggtgatggcggtggctccggtagtggtgcgcccgagattacgccggaaatccaaaagctgatcgatgagcaggtcagtgctcaggtttcaggcctgaaaaataaaaatagtgagttactcggtaagctcaaagagtccactgagtcgcttaagcgttttgaaggtatcgatcctgacgcggtgaaaactattctccagcgtttctctgatgatgaagaggcgcaactgatcgccgccgggaaaattgacgaggtactggataaacgcactgagcggctacgtgctgatgttgataagcaaatcaaagccgctaatgaacgcgctgaaaaggcggaagcgttctccaacaaattccgtgatcgtgtcctgggtgatgctatccgcagcgcagcgcttaaggctggcgcgctgccagaagcatccgacgatctgattcttcgtgctaaaggcacattccagctcaacgacgaaggcgaggccgtagcagttgatgcaaatggcgatgttctgttcggtaaagacggcaaaactccgctcaccccggttgagtgggctgaatctctgaaagagacggccccgcacctgttcccgcgcgccgaaggctccggggctggtggtcataaacccgctggcggtggcggtagtctgaaacgttcagaaatgagctcaagcgacaaagcggactacatccgcaaacatggccagcaggcctatctcaaattgcctaagtaaggactaatcaatgcctacgaccgtaaacagtgacctgattatctatgacgacctcgcgcagactgcgtttcttgagcgtcgccaggataatctggaagtcttcaacgccgcttcaaacggcgcaatcattctcgacaacgaactgatcgagggtgattttcgcaagcgcaccttctataaagttggtggttctatcgaatcgcgcaacgttaactccaccgacccggtaacgggtaaaaaaatcggtgccggtgaatctgtcagcgttaaggcgccgtggaaatacggcccgtatgaaaccacggaggaggcgtttaaacgtcggggtcgcgacgttagcgaattctccgaggtgatcggcgtcgacgtcgctgatgcaacgcttgaaggttatatcaagtatgccctacagggtcttgttgcagccattggcgcaaatgctgacatgacggtatccgcggatattgccactgatggtaagaaaacgctgacccgtggcctgcgtaaatacggcgataaatttaaccgtgttgcgctgttcgttatgcattccacgacctatttcgacattgttgatcaggctatcgacaacaaaatttacgaagaagctggcgtggtggtttatggcggacagccaggcacgttgggtaaaccggtgctggtaactgacaccatgccagttgatgcgattctggggctggtggccggcgcggtatccgtaacggaatcacaggctccgggcttccgttcctacgatatcaacgaccaggaaaaccttgccattggctatcgcgcagagggcacggttaacgttgaactgctgggttacagctgggatgagacgaagggcgctaaccctgacctgaccaaaatcggcaccggtgcgaactggaagaaacatttcaccagtaacaaatccactgcaggcgtactgattaagctggaagcccctgcgggggagtaaccctgtcagtggataaaacttccgcaactgctgacagtaccgacgcggtgaccgtttcgctcaagtacaccagaaatggtgcaggagtctccggggcatctgtggcgtggacgtctacaggcggcacactcagtgcttcgacgtcacagacagggtctgctggtggctcgacggtgaaactcacctctgctacggccggctccttcacggtgacggctaccgttgacggtgtggtgaaaacaactgaagcgattgcgttcactgctcctgcgggtggttaaccgacggggcgaaagccccgtttcttttggtgaggatccgatgaccgtttatataacaatccaggacgttgacgagttgctgggggatacctgggctgccgccgacaaaaagggtaaagccgtgctccaggcaaacacctggataacggcgcttaaccttcaggatatcgacccggagcatattcctgaagaagttaagcaagccggagcgtttatcgcttccgtagccgctgcaggcaatctgtatcagcaaaaaacagattccggcgtggtgacgagcaaaagcgttgaggccgacgatgtgaaggtttcccgcacttttgccgagctttcaaccaccagcactgaattactcgatcctgatttgcagctggcgctggatatgctcaaaccgtggatgattaaccctttccagacattctttgtgagggcgtgatatgtccgatttgaaggtggtcccatttcaaaagcccagccatcacaacctcgataacgaccaggttattcgcctgctgaaacaggctctggagagagccgaaaacggcggctgccacagtgtcgcagtgatactgcttgatgatgagggtaacgcgattgattgctggcataacggtggacgcccctatgtgatggttggcgctatggagtcgcttaaaaccgactttatccatgctcatattgagcggcggtaagggggtaacatgcaaaatccatatgtgcattatgccggcgacgggctcggtccccgcgatgtgtttgtgaatggaaacccgatcagacatgtcgtttacgcaaaccaggcaaagggtgttgtagagtttgctccgctcccgctgcgggttaagcgcaatggcgaaatttatacccgcaaactccacggtacagtgatcgttaaacctcagcagcgtattggtgggtgcaatgggcattcgtgacgagctgcaaaccgaagtcgccgcggcattcgataccgacctgcaggatgccgttaaggatttcactgggtcatataccgttcggggtgcctgggacccggtgacggaaaccggcactgaaacgcaggtgacttactcggggcgtggagtactggcgcgctataagctgcgccgtatcgatggcgttaacattctgcatggtgatgtgaagctaaccgcactggttaacgaggtgactgataagccggccgtcgggcatatcatcaccgcaccggatccggttacgggtgagcttcagcgctacgaggtcatcaccgcttctgccgactctgctggcgctgcgtactccattcaactgcggagggcgtgatatggctaagggctggaacattgacccggcggcattcgccgggctggtggcagaagatgtcaaactacgccagcggacaatcgccattcagctgctgaatgaaatcgttcggcggtcgccggtaggaaacccggagctgtgggccattaacgcgaccgcggttcagtacaacaaagctgttggggaatggaacgaatctctttatgccgatcctgccaacctgacaaagacaggccgtctcagaaagaaagtccgtgttaatgacagcatggatatcaggcggccggctgagtatcgcgcaggaaccttcagggcatcgcatttcgtcagcatcggcgaacctaatcattccgtcccgaccgaaccggatccgcgcgggacaatgacgtttcttaatggcaaaaatatcattgaccaggcgccagcctactcggtgatttacatccagtcgaacctgccttactccgtgcctctggagaatggccactcaacacaggcgccgacaggcgtctatgccgtctcgtttaatggtgttattcaggcctacaaatgacccttacagaaatcagaaacgctgtcatttcccgaatggcggcacagaccgctattgcctctgatgcggtggattatccgaatggcccggtatttgaccccagtaaccgcgatatctgggcccgactaaccaacattgctgggcaggctggcgcaaccgagatcggggacgggccggtagtccacaggacgggcttactcatcattcagctttttgttccggtcggttccgggacgttgcttatctcccgaacggccgatcagctaacggagctattcgagtttaaggatgacggaaagctgagttatttcgctgtttctgctgtgccggcgggtgagaccgatggctggttacagctcaatcttcaaattccttatcgcgctctgtagcgcacaaaaaacaggaggctcctgtgagctcaggtgcaaaagtagtagccgcgtttattcgcgagacaacgccaggaatcacgcctacagcaggggcgtggaacctgctgcgtcgttcttcatttggtctgaaaccaacgcagaacaccaacgacaatgacgaaatcgctggtgaccgcatggcgcaaggtgtttcacgcggcacagtggatgtcggcggcgatgtcggcacgcggtttcgctggaaccagcatgatgattttcttgccagctgcttcggttccgaatggctaaataacgtgctaacgatgggtaatggtcgcattacgttctccgtggcgacttttgccagtgatgtggggatcgcccagattgcccgcggttgccaggttggcaccttccagatggaaatcccggccgatggtgatatcactgcaaccattacgtttgcagggctggactgggagacgaagggggacgataccagctatttcaccgcgccggtggatttagcgggggcgctgcgttactcctttaaagaggtcacgaacatccggctaaatggtgttgatggcgggacaggtttctgcgtcgacaccttcaacatccagttcaacaacaatatgcagactcagcgctgcattggtaccggttcggcattcgccagcgcaaacattccgacaacctttaccccgtcaggtcaaatcacgctgtcatggtcaaaggctgcctgggaggtttacaaaaaaacgttcaccggcgaaacggtgccgtttagcttcacgctggagaatgctgaaggcgcctataccttcgatttcccggaagtgcagatctccggcgactggccggatgcggggagcactgacattgttcaggttcagctggatatcaccgcggccaatactccgccaactatcacccgcgttcccaaagtgccggcgacggcaatcagtgttgcgccagccacttcaactggagcagtgggatctactgtgacgttaaccgccacgcttacgccagctgattcaactgataccgtccagtggacgtcatcggatccgactatcgccagcgtggtttctaccgggcagaaaacagcgaaagtcacacgtaacgcagccggtactgcaaccatcaccggtaaggcccgcacctttaccgcaacgtctgaaatcaccgttaccgcgccttaatttacctggcccgttctgcagtcatcgcggaacgggcttttttgggagtctttatgctgattatttcttctcaaattgatttgaacggagaacgctggttttacccttacaaaaagccagcaggaagtaaaaagaaattcacgccggaagacgaggcgctatttaaactccgtctgctggtggccagtagcgagaatccacaataccgctcacgcaatgcgctggtgcggcgccatatcgacaaaatggacgcgagctaccaggtcggtacggatgctttcgatctcgccagtgtgggcgagattgactcggttgatgatcttctcatcgacaattgcgcgcgctttcttctgaaagactgggaaggcgtgggggagctggtggatggtactgagacggccgtaacgtatactccggagcgtggtgttgcgttactgaaacaaaacccctctctgtactggcttattctggctgaggcggcgtccattgctcagggtaaggagcagcagactcaggaaaccgtaaaaaagccatagaggcccaaaaatggctaagggaattcgccggcgagcagggcgagaaagcaaagtggcgcagggagaaactaaatctcccgcccattccggagcctgaaatcgatgcagttactggggagatcatcagcgcttacgccatgatatcgcgcggcaggaagtatgccggcatggccggggtgccgctccctctatccctgaatgatattgagctttacctggcatcgcgcaccatcctgatcgagcgcattgagtttgacgcagcgatactggctctcgatgatgcctggagggctgagtgggccgaagagcaaaaaaggcgggcgatagtaaaataacctaatcattgtttagctgcctctatatgttaggatgtttctgattgtaatcacgggaaacataaaatgaagaaactaatgatggtaatagctgggatgtttgttatttctggatgcgctactaagcagtatccgcaagctccgtccgtaactagcgaagagtctgctgcgttagattgtgccgcaattaagcaggaaatcgcaaaaacgcacagcattcagaacgaaatcgaaactacaggtcagtttgatgggcgtaccgtattgggggctttgggagatttcggtatcggtaatggtatggccaaaagtgaagcgcgtaaaaaggcgcaggcacgtcttcagcagcttgaatctcttaaaactattaagtgttcagatagcaaagtctcaggttaattctggcagcgattgtctctgttgcaataatcgcaacaattatcgtatatcgacagtaattgtttattaaaaatctaacctcgccccggcggggttttttattgtccggagatcgttaaatgacagaacaaacctcccgccttgccattgttattgatagctccggagcagagaaacaggccgataatctcgcaactgcactggtaaaaatgacacaggcaggtgaacgtgctgccatcagcgcagtgaaggtgacaaaggccactgatgaagaaaaaaagtctctttctgaactcttagatcgcatcgacccggtaaacgccgccctgaacaaactggataaacagcagcaagatcttgcgaaattcaaatcaaaggggatggtagatgccgatacattcgatctttattcaaagaaaatcgaggaaacacgaaacaggctaactggatttcgtgacgaccttggaaaaaccggccaatcagccgcacagactgcctttgccatgcgcatgatcccagcgcagatgaccgacattattgtcggcttatctacaggtcagtcaccgtttatggtgcttatgcagcagggcgggcagttaaaagatatgtttggtggtattggtccggcaattaagggtgtgggcacctatgttatggggttggttaaccctttcactcttgcagctgcggcggtcggttttcttggtctggcctattacaaaggcactcaggagcaggacgaattttataagtctctcgttctcactggtaatctggtaggcaaaacctccggtcaacttgccgatatagctgccagcgcaggcattgctgcggattcaaccactggcaaagccgcatcaacccttaaccaattggtatcatccggcaaagttgctggagattctctggaacgcgtgacaatcgctattgttaagatcagtgatgcgacgggtattgctacagaaaagttggcgagcgactttaacgatctagctgctgatccagtagcggctataaccaaacttaacgaccaataccactttctgacactggcaacctacaaccagattaaagcgctacaggatgaaggtaatcagcaggatgctgctcgggtggctactgatgcttacgccaatgccatgcagcagcgtgcgaatgatattcatcaaaaccttggtcttcttgaaagtgcatgggactcgctgggtaaaacggccaaaggcgcctgggatgcgatgctcaatattgggcgtgaacaaacactaacggataaacttgccaccttaaacgaaaatattgctgaagcccaaaaagggcaaaaagatggtgggttctggaacagttttagcgcgaggtttaccaacctcccggagatgataaaacagagagatttgctcgaatcagttgccaatcttcagggggatgtaaccaaaggacaggcgaaggctaaggaagccgaacagcaaagaattaaaacgcagcaagaagcagatcgcgttaaccagcaatatttgagcaatgcggataagcgcaataaagctattaagcagcaaagcgagttcctgaaggctggtgcaattactgcagagcaatacgcaaaaaacgtctcacgtattaacgagatgtataaggacccaaaggcacctaagcaaaaggtctatacagaggacgcggcaacccggctgcttgatcaaataaaccagcagacaactgccttgcagtcccagctggatgccagtgacaagcttaacagcgcaacccaggcgcgggtaaagttcgaacagcaaattgctgacctcaagtctaaaacgcagctcacagccgaccagaagtcgattctttcccgttcagatgaaatcctccaggcgtataagcagcaggaggcactgcaaaattccgtaaaaaccctggacgattaccggaagatgcaggaacaggtaaagacgaaggatgagcggaccaacgatctgcttaaaacccgtcttgaactgctggagaaggccaaagcaacggggcaacttaaacccggtgaatatgaaaaaacgcgggcagatatttatcaaaacaccgatatgcaactgccctcgacggttcgtaatgttgtaggaaacctgacacccacaggagggcgactctctggaacttttgaggggatgcaggggcaaatcaacgaatatgaccaggctcagcaagagctccagcgctggctggcagctcaggaggaagcttatgcgaaggccggcgaaataactgccgagggtgaggccagaatgacctcgattcgtcagcgtgcagcggatgcaaatcaggtcatagaggctcagaaaaacaccatcatatctgcggccacgcaatccttgtttgacagtaccgccgacatcatgcgaactgggtttggtgagcaatcggcaatctacaaggttgcttttgctgcgagcaaggcattcgctatcgctgactctatggtgaaaatccagcaggctatagcaagtggggcagtaagcgcgccttatccggccaacatcatcgctatggcctcaatcgctgcgcagactgccagtatcgtctcaaatatccaggctgtttcaggagttggcttcgcctccggcggttacaccggccccggtggtaagtatcagcccgcgggtattgttcacaaaggagagtacgtcttcgaccaggcgtcaacgaaccggatcggcgtgtctcagcttgaggcacttcgaaatggccaaccgcttgatgcaactctggggcgtacagggtttggtactggtgtccagaacgttaacagcgataacagcagcaagaccaccatccatgctcccattgagcagcatttccatacgccgcccggtgtgacacctgatcagatggctctctccatggctcaaacgcagaagcgggcgacaacggaagccctggatcaggttgctgcgcaattgttgagaggggacgggaaagttggtaaggcaatgcgcagtaaatattcaggcagagggttagagtgatgactgatatctactacccgcatgatagtcttccgatgccattacaggaaggatacggattccagcctgtaagcccgttaaaacgaacacagttgaccaccggccgcgcgcggcaaaggcgagcttatacgtccacgccgacgcaggccagcatcacctggtttatggaaaccgatgcgcagggactggcatttgagtcctggttccgtgatgcgttatctgacggggctgcatggttcatgatgaagctgcagacgccggcaggcattaagttttacaaatgccgcttcacagatatttatcagggaccggtgctggtggccccgatttactggaagttcacggcgacgcttgaattatgggaacgcccccttgctcctgccccatggggtaattacccggaatggatcgtcggcagctcgctgctggatattgcgctgaataaggagtggcccaaggcttgattaaaaccgtttctccttcataatcacttgtgtcgatttgtgggaaagtccttcatgccgctccgtagccggagcgtgaaataaagcgcggaatagcgatcctgccggtgagggtacacccacattcgacaccaatttttaaggtcaccttcgggtggccttttttattgggtaaaaatcatgacaagactcaaccgcctctacgccagcagcggaccggaggtgatcattgaaacgctgcagatcaccattggctctgatgttcactacctttgccagggttacgacaacatcacggcgacgacggagaacggcgataccgtaacgttttcagcctgtgcgatagacattgcgctgccggcgcgcaatgcggacggcacgcaggacctcaaatttgccttgtgcaatatcgatggtgttgtgtccacggcgatccgcaatgcgctggctaaccgtcagtctgcatttctgacgtaccggtgttatatctccacggatttagcggcccctgcggaagtgccgtatacgctgaaaatcaagtctggttactggactgcgaccgaagggcagattaccgcgggttatatgaatatcctcgataccgcctggccacgttaccgctacacgctacctgtattccccggactgcgttatatcagctaaggaattccaatgttcaaccctgataaataccgttctgttaaatggcagaagggcggtcgctcttttccaaaacttgactgcttcggcattgtgaacgagatacgccgcgacctgaatttacccgtctggcccgattttgccggggtcaccaaagacgacggcggcctcgaccgggaagcgcgccggatgatgcttacccttgagcgctgcgaaccctgcgaaggggctggggtggcctgctattccgggtcgaccgtcacccacgtagggatcgtggtcagtatcggtggcctgctgcatgtggcggaatgcaacccaggcacgaacgtcacctttctgcccttgccgcggtttaagcgtcgatttgtcaaagtggagttctggcgatgaccattcgtttttacccgtcccggcttcccggtgaaccactcgaaacgcatgagcatggtgtaaccagtattcgcagctggctggtggcaaatgttgaaggctacgaggatcgggatgtcccaccgctgaccgttgaggttgaggggctgttaattccgccaggcgagtgggctaagtgtgtgattcgccctgatagtgatgtcaggctttatccggtgcctttcgggcttgaggccgcgacaattgcctggataggagtgggcattgccgtcgcatctgcggcttattcattgttcatgatgagtaacattgatgccggcggctatacatcatccacaggtcgaagcctcgacctgaaccccgctaaagcaaacagcgcgaaactgggtgatgcgattcgtgaagtttttgggcgcgtgcgtatttatccggattatgtcgtgcagcccgttacccggtttgatgccgccgatcctacgaaaatgcgcgtccagatgctgctgtgtctcggtgtcggtgatctgatttataccaatggcgatatcagggttggcagtacgccagcttcaacgctaccgggattcagcagcacccattacccgccaggcgcggacgtttccggtgatgagcgcagcgaaaactgggtcaactccaccgaagtgggcgggacgtcatccggcaccgggctggatatggcccagacgtcgccggacgcagacgacattatcgcagacagcatgaccgtatccggttcgagcgtaacgtttaccgggctggacacggatgatgatgacgataatgacgagaacgataacgcgctaccgcccagctgggtcgccggcgccgtggtcgaactgaaagccccggctaactaccagatcacttcggcggctggatacagtgttatcgccagcccgctgctgacggagatcgcgccggtagtaggtatgccggtcacgctggggtttaactctgtcgattacgatctgtttatcgcgtcatatacccccgctcaggctgcagtgcccggcgccggggggagtgcggcaaaactccaggccagtgcggccccgaccacctacgatttttcgaccagctccagcacgttcacgatcacctggcagggggttacctacccggtgtcgctggtggctaactacgtctctatgtcgggactgctggcggccatcaccgagggactcactggctccggcctggttgcgcaggacaacggcggaactgtactgataaccgagtcggccagtccgttcgcgggtggggcgatcacgtcctcttcactgcctgcagctgttttcggtgatgccccggtttacacctccggcacggcatcaaccggcggcagcccggcggtaacggcgaatgtgacactcgcctataactctgccacgggcaccgcattctccgggatgccggagggggtgcaacggctttcacttgctcactgcgggaatgagtaccggattgtgtcagctgacggcacgacggcgtcggtggcgcgcctggtttccggtgccgttgatgagtcatggccgggattcaccgcccggacgatgatcgactatgaggcttctggtcttaacgacacgctgagctggctggggccattcctcgtatgccctgagaatgaagtggtggatgcattcgaggtgaatttctccttcccgaacggcatctgtggctttgacagtaagggcaaaaaacggatccgccacgttgagtgggagattcagtatcgcgtctacggttccggttcggggtgggtgagtcaccagggcgagtatgcgcttaaaaacgtcaacgggctgggattcactgagcggatcaccctcagctcaccagggctggtagaggttcgctgccgtcggcgcaatgagcagggctcaaacaacgcgcgagacagtatgtactggcaggcattgcgcgggcgactgctgacacgaccttcatcctatcccggcgtgtcgctgatggcggtgaccgttgagacgggtgggaagctggcggcacagtcggaccgccgcgtaaacgttgtggccacgcgcgcctatgaaaccggaacggccagaactatctcgggggcgctgctgcatgtcgggaactcgctggggctggagatggatgccgacaccatcaacgcgctggagtccgcgtactggacgccacggggcgagtatttcgatttcgccacgggcgacagtatctcagcgctggaaatgctgcagaagatagccaacgccgggaagtcacgttttctgctgagtgatggcctggctaccgtaagcagggaagggattaagccctggaccggagtgatcactccgcatgagatggtggaggagctgcagagcggatttaccgtaccgtccgacgatgattttgacggtgtcgacgtgacgtacatcaacggcgtcacctgggcagaggagaccgttaaatgccggacgccggacaatcccacgccggtgaaaatcgagaactacaaacttgatggggtactgactcaggatcatgcctaccagatcggcatgcgtcgtctgatgaaataccttcagcagcgggtgacgttccagaccactaccgagctggacgcgctgtgctacaacacgggcgatcgcatcgtgctcacggatgatattccgggtaacaacacgatttcctgtctggtggaagcgatgacaacggctggtggcgtgacaacgttcaccgttacggagccgctggactggtctttcgaaaatccccgagcgctgatccgctatcaggatggatttgcatccgggctgatggtggcgagcagggtgggtgattttcagctgtcagtcccgcacctgagcgagtttgatgacccgatgaaggttgacctgtcgtcggcaaccatcgagccgatccgcctggtgttctgcggctcaacgcgccacgtctacgacgcccttgtagaggagatcgccccgcagtctgacggaacatgccaggtcaccgctaaagagtacctcgaatcgttctatgcctacgacgacgctacataccccggcgacgctgcttaataccaaaaaaatccctttcaacttttctttcgctcaaaccctcgtttgggcgaacaccgttttggagcaaaaatcatggccgaacttaacccgcctttgggaacgacgacgcctgcaatattcctggataacgtcaagcgcgctgacgagctggttaacggtccggccggaacggttaacgaccgcgcaggcgaaccgctcgatacctggcgccagatgatggctaagaatgacgaagttcgg

SEQ ID NO: 68 - DNA, 110391 bp, Unknown
  source: /note="Description of Unknown: MKP2_coc_1 Mutant Bacteria sequence"
ataagccagctaatgcattgaaaataaaatatagctctcattatgaagatttaaatccattactctgtacgttattttgaacgcaagttgtatactacttattgggttttgatgaagaccttgactaagttctcctttctctcaaaagaggacattccaagcatacagctcaatgtatttctacgaaaccttaattataagagccctgatttaagggctcttaatagtaattagtcaattatatgagctaaagctgctaaaatatttgtgattaagtttctagggaggttaggttttttgaaaaattcactgatgtaactctaaatacactttcttcaaattttacattcagaactgtaaaatttccaacccttagtctttttttatcttctccaaaatcatatctttgatggaaacattattatcctttgcaagatgatataatatataaaaggttttctcatcgatccttaatacgaaagtgagcttgatgatattttcataaatatatgcagaagatacaataacaaagaaagtaattaaagatattaataatgcctctaatcctttatctaaatatgtaaaaaagagaatgccaattggagcaattaaaaatataatattaaagattagaaataaaaaagcagaaccaagaccaaaattcttatactcgtttgtggtttttttcaatatgactatagatacaaagacaaaggggattaggataattccgacccccatacatttcaaatattccaatgtggttaggttaaacattagctgttcctagcaaaagctaaaagtattgaaaggtactataatgggaacataaaaatatgtccataggtgttgaataaacgactttaaattacgttttatccttacaagcggataagaggtctcaacgtttatgtgtgtagactttagtttggtgcagttttataacttaaatgaaaattagactcactttcattaatcattgagtattaagctcactgcaatcataccttccctatcaatactgctcaactgtcagtcataaatataaggcgctaaatgtctgttacgtgtagtgtttagaataatgttcctaactacttttccgttatccacgctgagaccacacctagatcctagatcatacataagtgtctagctctatcttataaaaataggtatgtacttacttattttttttgcaataatatcccgcctgtattttttataatgtgccgtgcttagttggttgttggcctgttttacatgcttaaaatttatatcaaaataaccacaaaggaaaattcacatgacgttgccatatggggtgatctccgatccccattaccacaaatgggattcattctcgacgaccgatgcagatggtctcaattctcggctagccattcagctggaggccacaaaagaagcggccatcgctatgaaaaaagcgggctgcagccacatgctggtggccggcgacacattccacgtccgcggaaccgtatcccctaccgtactcaactacgtctccgatgcgtatgagtggatcgtcaaagatctggggctcagcgttgcgatgctggctggcaaccatgacctcgaaacaaacgactctgtctacagcgctaacgccgctgcggcgctgaagtcgattggtgtacagatcgtctgcggccgtaagccacacagcatcaaattgggtgacgtcacagtccatatggtgagctggcgaaataaccacgccgagttaattagcgacctgaaagcacttcgtgcgcggcttgacggggatctgcacgacgtcgtgattcataccgccatcaacaaagctatcccaacaatgcctgatgttggcatcgatgcgcaggagctgaaagacataggctttcgcctggtactgtccggccattaccacaaccacaaggaggtgatccccggagttatcagtgtcggcgcgctgacgcaccaaaactggggggacgtaggttcgctggcgggctacatgattgtgaaccctgacggctcgttcagtcatttcgaaacctcggcgccgaaattcgtaaacctggaagacgatgtggatgacaagcagatacgcggcaattacgtgcgcttccgggccgtcgtcgaaaacgatgaggaaggcatcaagctgcagaacgtcctgaagtccatgggagcgaaaggtgttgtatgcaacttcatccgcaagggctcaatgatggagggtactgccagtacctcagagaccagcaaaatcgacagccttggcgagtctgtttctgcttactgcaaaatcgttcatgacacagacggtggatttgacctgaccaaactgaatgccttgtgtcaggagatcctcaccgaagcggaaagtgcggaggcggtgtagtgacttcctcccacaataatttctgggatttcatccagatgattaaacggcttgaaagcgggaagcccgttttattccagaagccctatccgccagaaggaaacccacaggcgttttaccttggtcaactaacgaaacgtggcctcctgtcacgcaactccttcccggcacatacggaataccgccttcgcaaagggcagaaattgactaaagcaattcgaggcaaagcatgaaatttttaacgctcgaagtggaaaacttcatggcgctggcaaacgccaaggtcgagcttgatcagcgtgggctggtgctcatccagggtgttaatgccggggactcatcggccgccagcaatggcgctggcaaatcaaccctcatgaatagtttgatgtggtgtatttatggcgagacatcccatggcgttaaaggtgacgacgttctctctacgggccatgagaagaactgtcgagtaaaagtcaccattgaagacgaaggtaaacgctacgccattatccgtcaccgcaagcataaggaatttaaaaaccggcttattgtccgtggcgaagacggcgacatgacaaagggtaaagattcgctcacccaggagtttgtagagcgactgatcggtgcgtcaaaagaagtatttatggcatcgatctatgccagtcaggaggcgatgcctgatttgcctggcatgtcggataaaaacctcaaaaccatcgtagaagaggctgccggcgtcgatcgtctcaccaaagcctacgctattgctcgcgaacgagccaacgcagctgccgcacgcatggagaccactaaaaccaagatggacgcctgcttgtctctggtcgaatcggcccagaatgagctggagtctgccaaaacctcttctgaagcctgggagcgagaccgcagcgaacggcttgatgtcgcccgtgccgatctggttggggcggaagtcacgctcactgaggtcgaaatggagttgcgcagtctgccagagcagatccgcgatactgaaaatgccatcggtaaagagcgggaaaaacttgcgtccaaagaagaacatgacgccaagctggttaaggttcgtggagcgatcactgatatacgtgccagcatccgcattaccgaaaacatccagaaggaagcgatgcaacgtgctcgcgcactcaaggtgaaagcggaagaagtaaataccaaagtcggagagccgtgccctacctgtggcaaggcttattgcgttgaagatctgtctaccgtgaaggagagttttgttgaacaggcgcgcagtgagatcagccaagcgcaggcatctgcaacgtcagtggctaaataccaagagcatcttgagaaggcgctcaaaattgaatcatcacttgtcgccagtacaccagatgtgtctgccattatttcccgaatcgaacaactgactaaagagctgggaacgcttcgtcatcgggaaaaagaagtcgtggctgtagaagctttggttgcccgggcgcggagcgaagtagatcgcattaccaaagaaactaacccatttctggctgtcatcaaacgccatgaagaaagcctggctgccaataaatctaactatggtgtacttaaaactgagttaaagaatatacaggagcaggctctgctgcttgataaagcgcgccaggtctactctcctgccggagttcgctcgcatatcctgacctccgtgacgcctttcctgaatgcccagacagcggaatatctcaatacactgtcagacggaaacattgttgcggaatggtcaacgatggaatcaaccaagaagggcgagtggcgcgataagttcaatatcagcgtgcgcaagatcggcgccagcaaaaccttccagacattgtcaggtggcgaaaaacgcaaagtgcgcattgcgtgctccctggctctgcaggatctggtggccagccgcgcgagcaagaacatcgagctgtttatcggtgatgaaattgacgatgcgctggatactgccgggctggagcgtctgatggggattctggaagcaaaagcgcgcgagcgcggcacggtgatgatcatttctcacaaagaaatgaagtcatggttccgggaaaccatcacagtggaagtgaaagagggtcgcagctatgtcgtttaatcttagccgcccgcagtttttgcaaatgtttgctgtgatgcagtcattcaggctgattaacagctataccgctgctggggcggctcctggtgtcggttggcaaaatctcaatattgagacggagcagtttacggctctgaaagatctacttttcaagaccccgttaatgccaagtctgaaatcgatgccgtcaggaagtacagcgcccattctgatcaacccattttcggaaggtggctatcttccacacactgggcctgggttcgtggtgatcccggaatcacctgagatggttatcaaagatgatgcgcagtacggggctatagaggcgcataccagcagcgcgtttactaacctgactcgactggcaaatgcacgtgctgggcaggttgcaatgccaggcaaggcatttgctggcatcgatttcaattacgatacacttgagacatttccaggaagaggcaaattaagctttgagactgaagatggcgataaggcaatggttgagctctctgtcccctatgtacttcgttttaacgggatggttgcgcgtaagctgatagatatcatgtcctacttcatcgggcagagcatgatcgacgcagacatagaaaatggtgtgctgaccagtgacaacatacatgtggtgagccgcattccagagcccgttcgcaagtctccagttaaaaccctggaagagaaattaatggaatgcccggtatgggcaacatggtaaggaaactctatgagtaaagtgatcaaagtagttggcgtcgacccttcaatgagcaacttcgggctggccattggtacgctggatctggatacagacaaacttgaaatccacggtcttgaactggttgaaaccaaagccggcggaacgaagaaaaccgtcagagtaaacagcgatgatctgcgccgggccaaagagatctggcgcaccgccaggcccatcattgaacaggcccacatagtgttttgtgaactgccggtaggtagtcaaagctctcgcgcgcagacttcttacggtgtgtgtatcggcgttcttgcttgcgttgataagccacttatccaggttacgccaaatgaaattaagcactacgtcgggaataaactgaccacatctaaagaagagatcatccagtgggcgattgcaaaacagcctgatgccccttggttgcgtcggaaacaagcgggaaaagacgtactcgttgccaagaatgagcacctggctgatgccatagcttcgatatattctggaatgcagacagaccagttccgacaagtgcgcgacgttcttaaagggattttataatcctcaattgataggtaagtacttatttaatactataggccactacatttagtggccttttttgatgggtgatacatgataaggattgtcaaacgtaatggctccacagagccgctatccgaagagaagtacaaccgcgtcgtgatgtggggggtagaaggtatacgtaacgtaagcgcctctgccgtagccatgggcgccgccgcgagcatctttgacggcatgacaacttcgcagcttcatgaggcattggttaagtcggctgcagatcttatttcgcctgaaactccgaactactcccaggtcgcagcacgcctgaacatgttcaaaattcgcaaagatgccttcggcgaatacgcttacccaagtttctatcatcatatcgtcagcaacgtcagccgcggcgtttacgatgaggatttgcttaagttttactcccgcgaagagatcgctgaacttggcgtgtatatcaaacccatgcgtgacgaactctttggctatgccgcgactgttcagctggcgagtaagtacctcgtccagaaccgagtcaccggcgaaatctacgaagccccgcagcagctgtatatgctggtgggtatgtgtcttttccagaattgggaagatggttgtgccggcaaaacacgtctggaaatggtgaaggggttctatgatgtcaccagtacattcaaattgtctctgcccaccccaatcatggccggcgtccgtaccccgacgcgccagttctccagctgcgttctgattgagtccgaagacagtttgaaagggatcagcgctgcgtcatctgccattatcgattacgtgtcgcgtcgtgctggcattgggattggttttggccgactgcgtgcattggggagtgagatccgcaatggagaagccacccacactggcgtaatcccctttctgaaacacttccagaccgctgtgaaatcatgctcgcagggtggcgttcgagggggcgcagcgacggctttctaccctatttggcatctggaagttgaaagtctgctggtattgaagaataaccgcggcatcgaggagaaccgtgttcgtcatctggactatggcgtaatgatcaaccgcctgatgtatcgccgcctggtacgcaacgagaatattacgctgttcagcccgcatgatgtaccggggctctatgatgctttctttgttgatcaggacaaattcgaagcgctgtacctgcaatatgaagctgatgagagcatccgcaagaaatccgttcccgctgttgatctgttctcaaccctgatgcaggaacgagcctctaccggccgcgtgtatattgcgaacgttgaccacatgaacgaacacggcgccttcgatccgaaagtcgctccagttcaccagtcaaacttatgcatggagattacgctgccaactaaaccgctggcgtttaccgatgaccccgatggtgagatcgccctttgcacactgtctgcgtttaatctgggggcattacgctcactggacacgctgaaagaggttgcattctatgcggtggctgcgctcgattccctactcgactatcaggattacccgatggccgcagcggaaattccggcaaaagcacgtcgtagtttgggcgtcggcgttaccaatcttgcgtactatctggcgaagaacggatttaactactctgatccggccggcaaccagctggtgcatgaaacgtttgaagcgatccagtattacctgcttgatgcaagttgccggctggcggaagccaaaggtgcctgtgattggttttcccaaactaaatatgcccagggacagctgccgattgaccattaccgcaagtcgcttgacgctaaccctgatacgtcctttgagctgaaaatgccttgggaagagctgcgcgaccgcatacgcgaatatggtctgcgtaactctaccctgacagctcagatgccgtgcgaaacgtccagccaaatcaccaactccacaaatggtatcgaaccgccgcgtggccctgtttccgtgaaatcatccaaagacggcattgtgaaaatggtggttccggactttgctgagctgaaagatcagtacgagtacctttgggatatgccggataaccgcggctatctgaccaaagttgcgatcattcagaagttctttgaccaggctatttcagccaacaccaactatgaccctactcgcttcccgggcgacaaggttccaatgatgaagttgcttgaagatctgctcttcgcttatcagcaaggcgtgaagacgctttattaccacaacacacgagatggtgccggtaagcgtgaagacgatgatctggcctctgttgcgttggttgagccagaagatgagtgcgatggtgcatgcaaaatctaataagcgtggggagatatccccacctttcacttcattgaatgcctcattttaaccaataagataataatttgtttagaagtgcatctaatcaaattgtttaataataccgataacattcaaagggaaacacatgagttactccactttccgtttgggcgctaacgacgcaaccaaagagcctatgttcctcgggcagtctgtcaacgttgcgcgctacgatcagcagaagtaccgcgatttcgaaaagctgatcgaaaaacagctctccttcttctggcgcccggaagaagtcgacataaccaccgatcgcatcgatttcaatactaagctgcaagagcatgagcggcacattttcctgagcaacctccgttaccagactctgctggattccgttcagggacgcagcccaaacgcaacgctgctgccgcttatttcaattccagagctcgaaacgtgggtggaaacatggtcgttctctgaaaccattcacagccgcagctacacccacattattcgcggtatggtggatgatccgagcattgtcttcgatggcattgtgaccgacgaggaaattatcagccgggctatcagtatctctacagagtacgacaagctctatgagatgacctgcgcgcgccagcacctgggagaagatgaattcgaacggctctacgtctccgaatttgacggaaagccctaccctctccagcgccagctgttccgtactttggtatccatcaacgcgctggaggccattcgtttttacgttagcttcgcctgtacgtttgcttttggagaaaggaaattacttgagggcaacaccaaaatcatgcgtttcattgcgcgcgatgaggcgcttcattgcgaaggcacagaacgaatgctccggtttatgcgtacaggccgcgaaggcttgctatgggcccagatcgctgcggatgaggaaccattcatctatcagaccatgatggacgttgccgaacaggaaatgcgctgggcagattatctgtttaaagacggctcaatgattggtttaaacgccgatatcctgaaaagctatgttaaataccgaaccaatcttgcgatgcgccgtcttggcctgaaaccactgtacccggagataaaagatgacccgctggtgtggatgaacaaatggctgttgtccgacaccttgcagattgcaccgcaggaagctgagcaaagcacttatctcgttggccagattgactccgctgttgatcgcgctggcctaagccagtttgccgatttgtaagcctggataaagattttgtggcctggtcgctctgggccacaatgaacgcgaaaaaaagcactaaggaaagataaagcatgaaattaacgaaactgaccgaccatctcaagctggccaccgataaactggtgggcttcaaaccagagccatatgagctgaaccccggttttggagaagcgacagagagtatttacaagatggttgaccagttccacgagctgtttcagcacccgcgtcgtgtaatgcccactccggagctgctgcgcctgcgcgctaagctgatccatgaagaggcggtagaagaagggctgcctgcagcgaaaaaaggggatatgcagggattgctggatgcaatggctgacttcctgtatgtgggtgtcgggacgatggtagccatcaaaggtgggctatcaactggcatgagctactacactcaggagcaaagcgtcgatcgctttattcataccattatggtgcctggaaataccgtcttcgacgatatggccatccccttcaatgaagcagaagaagctgcgcttatgttggccgcgctggccgataaacttgaacataacaaggtaggtgatgctgagctgattcaggatctgcgccgcgtgatgaacaaaatctatgtggcgtgcatgatggtgtatcgcctggctgaattccttggcgtcgacgtcgtggagctggtggcggagatccaccgttctaatatgacaaagctgtggccggcggatgctgaagcgcgtcgtcttgccgttgagagatgtagatatgataagaatgacctcggattccgccatgctgacggcactgacatgatgatcggctatcgcctgtctgatggaaaaatccttaaatcgccgacatatagcgatgccgatctgtctcgtttccttgagcaagcacaggcatcttcgctgtatgaagtggttaaaaacaccttgtaagtactaacttatcaatatatattgaaatggacgtgtgatctattgtctatttctatccttatcaatctttattttcgataaagttgagcgttggtggccccgtggccaccatttttttacttaatttctagcctggatgtcttctctgtgtttaaaatgataggtatgtacttacttattatttgaggtcatcttgtcttttttacttaatcgagaattcagtaacggtcagctggcttcgagctcttatggccgtgtcattcagaccgttgttgataccggcgttccttccgaagatcgcaccggcaccggtacgcttggcgtttcttatgtgccttcctactacatgcttaccggcggggctgttccgctcatttcttcaaaacaggtaaaccttaaaccgctactggttgagcttgaatggtatttacaaggttcaggcaacattgggttccttaaagagcatggtgtgaagatctgggatgcttgggccgacgataatggcgatttagggcctgtatatggcaagcagtggcgccgatgggaggacaccaggattgtcccttacagcgagtatcgccttaaggaggacatcttcatggaacgtggttatcgcgttgaaggttacattgggctgaatgaagaccgcgtcgttatcacccgtgaaatcgatcagttacaacgtatggttgatcagttgcgcaacaacccgaccgatcgccgcatcctgcttaatgcctggaatgttggtgagctggaggatatgaagcttccaccttgccactttgtgttatccgtatggagtcgtgagctcgatttccagacccgtttgtctatggccaccgatattggcatccagcataaccggcatggctatgaatcgatctatacccagatgctttgcctgatagagcagcgaggcagtatctctgagccaatgctggatgagcttggtatccctaaacgtatcctgaactcctgcctggtgcagcggagtgtcgatactttccttggtatgccattcaatattgccggttacggcatcctcacgcagttcattgcgaagattacgggtcacatggctggcgccttcgtccatttcggctttgatgttcacatttacaacaaccacttggagcaggttgaagagctactggctcgcgaacatccggagtcgtccgaccccatcgtcgtcttcccgcacgaatgggaagagctggatgacttcaaatgggacggcgtgcagatcttcggctacgaaccacttccatggattaaggctccagtggcggtgtgatatggccagaggcatgtatgtgttatgtgaaattgaagatgtgctggcgagagccggccatcgtcaagccgctgctgatgaaaacgcagacactctcgttgcaggtgatgagctcatattccccaccagccgcatgttgcgtggctttgctcgctccggtgctgaagtggtgcttatcagccaccgtccggaagcgctcgaaagcgcaaccaaaaaatggctgagagatttcggcattgattatgactggctgcacctggcaccacgtggagtcaattacgaaacccatataaagcgcacgcttgccgcgcataaagatgatctgatgatcgcggcactggtgagttcatcacgtctacgagctgctctgtctggttttcaccagcgcccggtaatgtatgaggtgtctcaatgaagatgattgcagctgtcggtcgcaattatgaaatcggcattggcaacgaacttccctggcgttgcccgaccgatctgaaactgttcaaacaactcaccaaaaacgccactgtcgtgatgggacgtaagacgatggaaagtcttaaacgcccgctgccagagcgccataacctcgttttgacgcgctctcgtggctatatccccaatgggttctaccccgctggcatcgatgacgttttgagactaccagatccggtctgggtgattggtggcgggcagatttactcgctctttatgccacacgtagaagagatatggctgtcgcatattggcgtggatgtgccgggcgcggatgcgttcttcccggcgccaatgatgcgttctttagggttcgtaccagtcgaaacggcttatacccaacgtgcaaatgaggatgagcttggctttttgcagatcgtatacagaaggtcgtaatggattaccggattggaatcactggcgcacagggcagtggaaaaacaaccctggcaaggtacatcgatgcgcattatggcattccgtatgtggatgccggcgttggcaagctgatgagcagtctgggggtgaaggttggcgagcgtttgcccctttacgaacgtcttcaggttcagatggagattgccagacatatcgagatgatcacccgcggcgttgaaggttttgttatcgaccgcacgccagccgatgtcatggcttatacgcttgacctggtcggccagaccaatgaagaccgctgcatcgagctggctctcgacattgagcagttttgccacaaagcggccatttccaacttcaatgctatcgcgggtcttcgcccgggcgttgagctttccagcaaagatctcgcgcgtccccagcgaggatcgcttgaccgtctctatgttgctcgcatcgatgcgcttatgtgcggtgagctgacgaaaatcaacacccttccccaaaccggcgatctgcaggtgttcgttatctctgaaaagtgtcgcacggttgaagcgcgagccagatcggtattgcgagtgctggacagagctgctgaaaacatcgagcgccgtataacaggacgagtgaccttccactgaatgttgctcccctgttgggcagtgtgacaataagacacgcgaaatgaatcgaggaaaaacagaatgatagacgaacttcccctctcggatgaattagatcgtaaagcgattgaagcactgatccgcattgctgacgaacaatcccgctctttgatgagtgaacgtgaagcacgtctggctatccgcgcagtgtttgagtccgttcaagggcttgttggggaagaggtaggcgaagccatcaatgtggcgatgtcgcagttcaatggcggcaccaagcgccctctgtttcctatgcacctcaaactctcaggcggcacggttctgttcgtatccgtttgcctggagaccaaccaaatccagatcctcaacacatcaacgggcgaatggcgcgcgccggtcgtctgcgaaagtggcgaggacgcactgaaaaaggctgctcagtttgtgcgtggcgcactgctgaaaggcgcgaagaagctgtaaggagtaccaatgaccacgattgtcggtggcgtagatattgagtccacagggctggacttcacatccggccacaaaattatcgaaatcgcgataacccgttatgaacttgaaacccagaagcacatcgacagccttgagatgcgcttcaatccgcgtcgcagtatcgatccgaaggcgcaggcggtgcatggcatttcactggaagatctggcgacggaaccgctgctggctgaccacgcaggcaagattgctgcgtacatgggcgcatgtagtgcgttagtcgcccacaacggagaggcttttgaccttccgtttattcgccacgagttcggtagctatggggtgaaattgccaaatatccccatcgtagacactatgctagatgggttgtgggctaccgaggatgggaagcgtccacgtctggaagagctggccttttcacttgggttcacttacgaccgtgataaggcccatagtgctctctatgataccgagctgatgatgcagtgtttcttcaaagctcgggaaaaatatggttttttcgacttttaatataattaacggtgcaatttattgcaccgtttaactttttagaatgaaacttttgccttcagtaacttggctgccatttcaaaatcaatttcaccggttttagactcagttgcaagcttgtatagaaccagaacgtatgtatcgcctagaacttttgtgattgcacttgccgttgttgcagatattgcccctccaacaaggctccctacaccaggtatcatctttaatagccctgtgacaattgttcgtcctacaaaaactgcaccaccagcacctattaaagacgttaccattgttgttaaggccactttagatacatccattccaaaggtgtaactgatttttgcaatcattgcgacttgaattggcactaaggtaaatgcatctgaaaatgggactggtgttgctgcggccgcagctgcgatggccgttgcggcaataacttctttactggcttgctccttttttatatccaatgctttcttgtttttaattgaaagagcattggaaaatgcctttttttgtgcttctggaataacctcatacgaggtttggatcaaatcatctatgcctctaacctttcttttacctatgatctcatccggttcatcttcatcataaattgtttcttcaatagcacgagtcagacatacggaatggctatagtttttaaatgcgacctcaacctctttcgcaaattcattgtttgtgaaattatttgtttttgttagtactactatgactggtatccctttgtttatcaggaatttagctatatccaattccgcattttcataacgtttaccggtgtcattaatacatagccaagcgagatggacataattctctgatttttcactattgttatgttcatttatatagttttcaatttttaatctggttttctcgtaatccgcaacttcaagtccctgagtatcaatgatttgtaatgggacgccttctttcttaattacatttatattttctgttacggggcgccctactccagttctcgcaaagtctccacgaaatacactattaatgagagaacttttccctacaccagtctttcctatcacgatgatgttagctacgggcatatctttgactgcatcgtttaaaatggcatttacatcaatgttcacattaatcactcctttagcagaagcctttcatcatagctgatgcttttaaatttggaaaaacatatgagctttgtagggaaaaaaatcttcaaaagcgtgagataaatctcctgtaatgacctgaatttacttgttttctgcctgataggttttgtcagaatacgctcaaccaaaacgcggaaacgcaccaacgaaaacataaggagttaaaaatgagcgcagttaccaacaatgttaaaaacgatgacctggatgaactgactgcgatgctgcaatctctcgacgaaccagttcagaacgctgcgaaaatgagcggtgtcgacgagatcgacgatcttctctctggtctggatgatgcaatcgcaaaaccagtcgaggcggtggcggatgaagtaatgaatgccagctctaccggggatctgagtagcgtgctggaagagcttgagattgagcacgaatcggtgaagatcgaagaacccgagcgtgacctgattgcggagattgtgaacgagccagcgcctgaacttgacgctcgaagtactgagactaccggtacagatccaactcctttaccttcagtggcgtcagagcctaaacctgaagaagagcagccaaaacgccagaaggcaaaatcagagcgtgcgccggccaaacctcgcttcacgctggaaggtaaggacgaatcgttctatgcgtcagccggtctggaaagtgagagctttactgctgcattcgaaggggcgccagtcaaagcgaaagacaagatcttgaacctgttgaactggtttaacggtgggccggaaatcagtgtctacacggtaatcgcaatgcgctatatccttgacgcgaacacggtgaccagcaatagcattaaactggcgctgatgagcaacccggagaaaccatacccgctcaacactgcttcgactcaggctggccagatgatggctgtgtttccagcgactggcatcgcaaccagagaaggtgggaatttaacacttaataaagagtcgccgatcgtaaaaaaatttatagcggagtattccattggatgatgtcccccaactcgatttaaagccatctgatagcttaaagatgctgggtgagcatatttcatatccagcatcgaaaaaacgcgccagagagcttcccttttgcgattctggcgcgttcttctttgtttgctatccgttggattaaatgaaaaaataggtaagtatttatctattagaggaaagcaatgatcgcagccgaaaaaatcaaaaagcgagagcgtgatgcctctcttcgcgacctttggcgcacaccgcagtggttgtttgtcgccatccaacgttacataggcgtaaagttcgatgtggacgtcgcctgcaacaaagataatgttctcttgccgaacgttatcggtgttgagcgtgatgcgctcaagtgcagctggggagaacctggcacagtggcgttccttaacccgccctactccagaatcaacccctggatagacgcagcaattcgcgagcaggcgcgcggagtgacgacagtcatgctgataccacaatccctcgatacgtagtggtgcgagcgtgcggctgaatgcgccaacgaaaccatcatcttgtctggcggccgcgtggcgttcatggaacctgacgtcacattgggtctggttgaggtcaatatcaacccaggcggaagtatgctggtggtcttccgcggattctgtcagaacgttggtcacttcatgaataaagtcccgctgacggtgatgaaaagtctgggtggttacgatcctgccaaagtgatcaggaaaaaaagaccacggaaacaggctgcttaatccgagtctgggagcgtttcataacctgctttcgtatatataaataactaagtactaattataaacatatacgaaagcaggcttttccttgtcgatttcaaaccactcccagaccgaaacaagacgcccagaccactctggaacccctttccagaagctatagaatcgtttttgtgaacacaagtaaggaaaccatcatggcatacccgaccaacgttgtagcgctcgttgagagcgattttttggctaacgctcgcgaactcatgaaggatcgtgaaaaggcattcagtctttacgagtggtcactgaaatgtttgcacactggcgaacacaaagacctgattgagcagctccttggcgagctaatcaacgaggtttttgctctgcaagttcagcttcatggtagacaaaatgatcagtcaaaaaagtaagtaagtagttaccgtttacgatgtatcatagtggttgtagaatgatgtcgatttcgacctgaatcgaaatctcggtctggtgggtggaggatagcgtcactggcaccagacttaaaaaagcccacaaccagcgcagaaccagcccttttggggtttggggaagggggaaccaaagtgggcagagagaagggtcactttatgattgtcgagtctgggtattttgagaggttgaatccagtactccccttcatgaagtgtgggaagatctcggttctggggtgctgtcatccataacttcccaagcctaagctggcagtagacttaggtcataacttttcaggttatgaaacgaccaggttggtgaggattttttactcacctccctgggagagtattacctgaaaagacaacctctcacttcgttcgaggtgaacttcactcacttcgttcgctcagttcaggtaaaaataaacccgatctgggaagtaattcattgaaaataaatatgtataaacacgcgtgcgcacacgcgcgaggaaaaacgggcggcggcgcacgctttggagttagagatgacgacaagcacacacgccagacgaaaaacggcagccggccgtgcgcagcaccagtatcaaaaacacccccgcaaaaacttcaaaacgccagttgtcgaatttaatccccggtttaagacggtcaaagttttcagtgatggctcttgtctcagaaacccaggcgggcccggtggatatggcatcgtctttcagttccgcggcgaagaacgcgagttttccgacggcttccacagcaccacaaacaatcgcatggagatgatgggcgccctgatagctttggaacgccttaaattctcctgcaacgtgatcctgcactcagatagccagtatctcaaaaatggtatgaccctctggatgaaggggtggaaacaaaatggttggatcactgctgacaagaagcctgttaagaatgtcgacctctggaaacgactcgatttagccgccagtcgccacaatgtccggtggaactgggtaaagggtcacgccgggcatcgagaaaacgaaatatgtgacaggctggccaagatcgcagcatatgcggcagctgatactccacacaaaaaagatgctggtttttggtataaaatgataagtaagtatttacctataattttgtatcatgtatcttacccatcgtcaggatgacaacgtgctggttaggcacggttccaaggatggaacgcaaaaaacggcggctggacattccagccgcaactctttctgacattgaaaggatttcaaatggcacatcaaacgccttcctcttctcttaagaaacacccccgttcgctacgactcatcctggcggagttattctccggccgtgtgtctgcacgcctgtccgaactggaagagaaagtaggtcaaatggagcatcgtctggatgaccatgcggtggccatctctaacctgggggctcgtgtggcaatgggggaagtgatgaagacccgaaccgcaaaaatcctgcgagacacctggggcgtgcgagccaatcaaacgcgcatggagagctcagatggatcaatttcaacgaaaaagactacttccaatggcctacgggctgatcacgatttgtctggcagccgtagcaataccgtcgactcaggcgttgctgatgccggactcatgcaaaacggtttcgcagcagacgccggcaccagtcacggaaagcacaaccagcatcaccaccatgccccggtctgccactctggatgggatgcggttggattcgattcctcaagttcgtcctgcgactccggatcttcctcctgctgcgactgaggtgatggcgtgatcttcttactcaaaaactggtcattcatttggatagccattctgcttttggcggtgggtggctggatctcaaacatcgttaagctggcactacacggtgatttatttcttcactcaggtatgacgatcgctcgtgttgtggggatttttgtcccaccgatcggctctgttctcgggttctgttaatgggcgtaggggttgaagccttggaggctctctttgctgccttaatgtttatttgtatacgaaaacaatttgtttaagcacataacatatagggaaaaacacatgttaggtttcttcaaaaagaaaactcgtaaagcggttattgaagttaaaaaaatggagaaccgcgatgcggtcgaagctactgtctggggcgcatacatgatcgcttatgcagacggcaactgtgatgcaaaagaaatcgctattctggagaagaccatctccgcattgccagctttctcaccgttcgcgggtgagatcgcccagatgagcagcaatattcgtgctcgctatgaagcttctcctcgttccgccaacgcacaggctcttcgggagctggctgatgtcgccggcactccagaagccgttgatgtgttgtgtctctgcctggatattgccgatcaggatggcatcggcgaagaagaagaggttgtgctgaagaaaattgctcaggcgctgcagttatctctggatgcgtacatctaatggcagagaaattaaggctggccgtcgtcgccattcttctcgtgctggtcgtgctggtggacttcactggcaaactgatgtctatcgcggcagatggcgtgttggttggattggctatctactttgcccaacctctacttaaaaaatcgaagtgatcgccgagggccacctggccctcgattcttctggtttaaccgttatgacgcgtttgcccccctcttctgaattgtcagaataaagcaatcaagaaaacaaattattttaacaattaaggaaaaacacatgtgtgataaatgcaccgccgctaacgctgaagtaaagaagatcattaatgaagtcggggctaaaaaactcgtagggatgcttgattctataactggtcatggtgacgctcatccgctggaacgcatcatggccatcgtccaggtcatggacttatttgacgaaccaatgaaaatcctgatgcttgctcgtcactttggcggggcgtatgtggaagagcatgaacgtgccaataaactgcaggcaactctggacatgatgagcgaaccaaaatgcgcgccggcgccagagctctccggagacaatatgggcattgaaagcaaagagcgggagatcgccagccttaagtcttctttaggcatgttaattaccgcctttaaactaatggcaacccataacggtttcaaaatgccagagctaaccggcgatgaacatcccgctgctattcgccagctgcttggtgtgatggcggataatatggatgaagcgaagagccgtatcgaagacatgatgcgagaacttgcccaccgccacgatctaaatgaccagccgcacaagatgcagcaagtcagccactgaacctgaaatagcaagggggcgaaagcccccttcccctcctccgtagccctctggatagatctttaacgccttttcttatctaagataataaaaccaataataaaacaaattgtttatatggtgggattatgagtgctgcgctttctgtccttgagtcttttgcttcgaacaccggtatcgaccacagcaaagagatgaacgtcatccatgcaatcgtggccgagtgcgagaaagggatcgcgttcatgcaccaggttcacgacttcacttatggcgacgaacgtcactggaataagtgtttaagatttgcactacgtacattggaagtggaaattatttggtagggatataagatcatatccctaagctcttttaagaaaaaattgcttaataacctaatgtaatttaaatccttcctccaacccctttaaatttttcgataaacgccccaattttttggaatacggtctgctttttcgttttgtactgaggattcagcggactgagttttggtagcgtctcatttaactccgtcccattttcggtagcatattcccgtttgagtgatgtacggatatagcgccttgccgcctcttcattgaggttttcttccttaatcaacgcttccgcttcccgttgctgttcacgctgagcataggtaaagaatgcatcaatgatactggccttatccggcatgtcatcaaggttagtttgctgaataaagtcaacaatcagaccttctttggcacggttgcccagacttgagcggattaagcgtcggacctcttcagtcagggcttctttaccctttttctgacggttgtggtcaaaaatcaggcccagaatgtagtccaggttaatctcttgcgacttgagcaggtcaatttcaaacaccacgtcatcccagtccgtggttgatgtatccctgtcgtttgctgctttttcacgtcgctgccagtcccggatatcattgtaagctgagcggtagtcctgaactttacgttcggcagggaggcgaatggtttgtaattcagcaaatttttcatcatccacgtagtgctctgctttaaaggtttctaccgcttccgggtcactaatatcaaccttctgcagggctttcagcgtggcaaattcatcgtagttttgcaggatgttttctgcccgcagatattcaccaaacagtttgacgaaggcttttttctctttttcactgtcgatactggcagggtcagggaagcgctgctccagctccgaaacaatagacataaaacctcgtttagcttcgccggttgccgcatcgctaaagccctgcatgtactcttcgtagcttttttccagtaccacattcttggtgtttttgtcgccaaaaagtgtaatggcatcaatggtgggacgctccaggtccctgaaagtcacgatattgccgaaggttttggttgcatcatagatacggttggtgcgggaaaatgcctgcatcaggccgtgataacgcaggtttttgtcaacgaacagagtgttaagcgtcggggcatcaaagccggttaagaacattcccaccacgatgagaaggtcaatatcctgatttttcactcgttgagctaaatcgcggtagtagttctggaagccgttactgtcggtactgaaattggttttaaagtggttgttatagtcatcaatagctgaatccaggaattcctttgcgctgctgttcatcgcgctggtatcaaagctttcgtcagtaatatcaccaatggcgctttgctcttcatttgcagcaaaggagaagatggttgcaacccgaaggcgtttatagctgcctgatttttttgctgcttcttcctgtagcattttaaacgtcgagtaataagcttttgccgcttccacactgctaactgctaacatggcgttaaagcccttagctcccgggaaggttcggtgcgttttctgacggaagttattgataatgtattgcgttatttcctggatacgtagtgggtgcaaaaatgcctgttggttttcagccgcgctgagttttttctcatcagtttccgtttcaagagacttaaaccgtgggcggacatcgttatagtccaccttaaacttcagcaccttttcatcacgaatcgcatcagtaatgacgtaagaatgtaattcacgcccgaagacgctggcggtggtttctgcccccagtgcattttccgggaaaataggcgtaccagtaaaaccaaactgataaaagcgtctgaatttctttttgaggtttttctgggcctcaccaaactggctgcggtgacactcatcaaagataaacaccacctgctgctgatagacgggcaggtcagcttcggctttcatcaggttattgagtttctgaatggttgtgacgataattttgttatcgtccttatccaggtttcttctgaggcctgctgtattatccgaaccattgacactgtccggagagaagcgctgatactccttcatggtctggtaatcgaggtctttcctgtcgaccacgaagaagactttatcaataaagtccagctccgtagccagtcgtgcagccttaaagctggtcagggttttgcctgacccggtggtatgccagataaatccaccgctttcgggttttgaccagttcttcgctttaaaagagctgttgattttccagagaatgcgctcagtggctgctatctgatagggacgcatggcgagcagagtctggctgctgtcaaacacgctgtaattaaacagaacattcagcagggtatgcttctggaagaaagtggcggtaaagtccttcaggtccttaatcaaggtgttatccgatttcgcccagttcatggtgaaatcaaagctgtttttatcccgtttagtggtactggcaaagtaccgggtatcagtcccgttggaaatcacgaagagttgcaggtatttaaacagggagttatcgctgttaaagctttccttgctgtaacggtgtatctggttaaaggcttcacgaatcgccacgccacgctttttgagttcgatttgcaccagcggcaggccgttgaccagaactgttacatcataacggttagcgtgtgagccggtctgttcaaactgctgaatgacctgcaccttgttgcgcagcaggttctttttatctatcagatagatgttttccagacgaccgtcatcaaacgtgaaatcacagatatagtcgatatggattttacgggttttgtccaggctgctgtcactagggctgtccagatactgctctgcgaagcgccgccattcactttcgttaaacaccacaccattaagatgctgaagctggtcccgcacattcgccagcatcgcagtccgtgactttacagagataaactcataaccctgattaagaaggtcctgaatcagctcccgctcaaggtccgattcgctttggtagctgtcgccagcatcctgaactttggagtatttatcaaggacgataaagttattggattcagcaatggtatgtatctgttgtgtcatggtgcatcctgtgcgtcgtctggcaaagtccggaagggtatcagaagcatcttccggcattcataaaacctgataccgggcgggtgagaacaaaccctgccggtatcaatggtccgtcagttgctggcggtttctggtttcgggaagctgaacagtaaatcacgatagtactcgtactgtttctggcgcagctcgatttcgcgccggaggccttctgtgattgaacccgtcaatgtgtcaaatttgtccagcattttagcaatatatttctgacgctctatggaaggcactaataatttcaattcctgcaatttccccacagcaagacccggctgtgcagatttcgacgcatattgatttagattcattgttgttaacatatgaaatgcccagtcaatatcaatcccctgcatggctgagactacaactgcatgttctgtagcgtagaactgacctttcattctttggacattgccacacagagcaccttgtcgccctattaatagatgttccccatcatgacttttttctttaacgtaaccacgaataccgtttccgccaaaacaaggatatacaaaatctccttctttcccatctactatatttctcgccgaaatatgctgccctgcacgcatcttcacaatctcacccaatgtcttccactcaaccccaccctcttcaaaactcagcaactggtcacgatagtaattgtactgctttttgcgcatggtaagctcagcggtaagctcagcggtaagctcagcggtaagcgcagtaaatttatcaagaatccggacgatttcagcttggatagcaagggacttttccggattttcggggctaataacaggaatcaaaacttttttgaatcgagactttgatatgttgaaacgagttacaccgcttgcggttttagctatctccgcacgcattaaattggttctgaaaaggtattttgagaattctggtttgattttaaccttttgattgaaccgaataccgaatgaaaaactatttaaataaacgggctcatcaaaacgagatgtgattgcggacgaaatgccagcttcctcagcagtttcagatgagccagtaaaaagcacatcaccatacctaacagcgtgctgttgctcaccatttttgacattaacaaaatctgttggtggttcatcaatatttatattgctaaatatatttttgtatgaaacatatttcgcattgccattttcaaaatcagccttggtcttgccggtaagtccaccataaatatcagcaatttctccaatcggcaaccactcaatttcaaccccatccagtaacttttccagataactcagctcactcatttctgcacctcgtcaccttcaatctcagccacaattgtatcaatgtctttacgtaactgatcgattttgctgacggtggtttttagctcgacattcagctctgcaatatcgacaatttcgcgggtattcaaggcttcgacgtagctgctgacagacaggttgtaatcattcccagccactttctcgaaggctacagatttcgccagatggtcaacatctgctttgctggcaaagacctgcataatcttttcgatatgatcatcagtcaggatattgttattggtttctttcttaaacaacccgctggcgtcaataaattgcacgcgggtatctgttttgtgcttggacagcaccagaatgttaacagcaatagtggtgccgaagaacaggtttggtgccagagaaatcaccgtttcaacatagttgttgtcgaccaggtactggcggattttctgctctgctccgccacggtagaaaataccggggaagcaaactattgctgcacgtcccttagcagacaggtagttaagcgcatgaagcacgaacgcaaagtcagcttttgattttggtgccagcacacctgccggagcgaaacgctcatcgttaatcagggtcgggtcgtcactgccaatccacttaactgagtacggtgggttagagacgatcgcgtcaaacggtttttcatcgcaaaagtgaggctcagtcagggtattccccagtctgatatcaaatttgtcgtagttgatattgtgcagaaacatgttcatacgcgccaggttgaacgtcgtatggttgatttcctgaccaaaaaagccttcttcgatgatgtggttatcaaaatgttttttcgcctgcagcagcagtgagcccgagcctgcagcagggtcatagattttgttgacgtgagtctgaccgtgcatcgcaagctgagcaatcaacttagagacatgctgtggcgtgaagaactctccgccagacttaccggcattcgccgcatagttagaaatcaggaactcgtaggcatcaccaaacagatcaatctggtgctcgttaaaattccccagcttcagcccctccacgcctttcagaacggcggcaagacggctgtttttatcttttacggtgttccccagtcgattgctggtcgtatcgaaatcggcgaacaggcctttgatgtcggcctcggacggatagccgtaggcagagctttcaatagcaacgaagatactgtttaaatcagcattcagcctgtcgttggtgttagctttagcggcaacgttgcagaacagctggctcgggtagatgaaatagcctttagtcctgatggcatcgtctttgatgtcatcggtaatgatgctgtcatcaagtgcagcataatgtatgctctcatcccctgcttccatgtagctggaaaaattctcactaatgaagcgatagaaaagtgcaccgagtacatactgtttaaaatcccatccatccactgagcccctgacatcattggctatggcccagatttgacggtgtagctctgcacgctgctgaaggcttgtcatcttgtatcctgttgtatgattcttaagtactgttattggcccgattttatcgcaatttcatattgatgacaggttttgtatgtcatgcgttgcactgagagttcgtttgcccggttgtgtagccaacgttctttcagtcaggccagtagaaacgttgcgctgacgataaatactgaagccccgatactatcggggctgagcgttcagtcggtgagaatttcttcatccgtatctattgtggatggtgatgaatctatttttgttgtaagaaatacccgattcagtagtctttgctttagggcgtttcttcgctcattgtagaattcctggaagcgactaaactcaatgttttcatctgaaactaacagcattgatggagtatagttgtttgatgagtgagatagccattgtttcagggatgtattctgtttacttgtattctgagagtgattcagtaaatgaagatttggtatggtgtcccagtgttccggattttcgtaaaagctgagtttctccggtgaattcgcaatataatctaatttttcaagatatttatttgaaaaatgatttcttggatgaaggtgatcaatatgaaacacctcggtcggattcatttcagggaacagaagatgcaatagtgcgcggcagcgaccttcgccatatctgatattgagaaggctttcgatgtattcgttgtcaaatctgaggtccttattcgagcctttgtacctgtcaataatcttctcaagaggaaaatgaacatctgaaagactattcttcattacgtctctgatgctcgtgagtagcgcatctgcctggcttccaaagatccctttcagaagtaccatgtaaaaccactggctaattactgagcgttcattgtggtttttattcaggagattaatcgttgtatataatgggtgtccattggtttgctttttgtaaagccagtagaccacaggaatgactgcatttttagatatcagtgactgtggattgatgccgaatcgcctgataagaacaaaagtctccttgatacaggattttatttcagaccattgttgttgtatcttaccgacctcttctgaagtgaaattttttactttgaaccggacgtcagagtcaataagcatcaggctggtttttaagaaccagtctctttcaatataaaaccccatttcattattctgatgaatgttttttgttagttcatccagttctcttctgaaatcaccctgccagtgtgctacagctattgacatcagtaagtcggagaactcaagttttgtccccccgctattcgtgcggatgaaaacatccaacacatgatcaatgtcctggctgctctcattgaagtagtggataagactctcagttcttatcttggtataaagtttaagcagggtttttctggagaattcactggaaatgagtcctcttttttcgagttctggtacgacaactttaaataagatatcatccggagaatcaatttgctcgtatttgaatatttcgtgaaggcagaaccagtgatgtttgttatcggtaagtgaatcagtgtattccttgtcggtgaggaacctgaagttgtacttcatcatgggctcatcgtctgagtcaagtggcgctgttaaatcgacgtaaagctttctgggcggcaggaagcgatcatcctgtgccgaaggccaccacacccggggctttttatacgcatacgttccacacagtccaatatataaagatgtgagacgctgctgaccatcaatcaccgccttaaaatcatgaaatcccgcatttgttggtacacatgggttttcttcattaaatcgctgacagtattctttcaggaattcatagaatttgtaatcgtttttaatactggcactacggatatcccacatcatgaaagagtttatcgggtagtctcgcatgatggaatcaaatagtagacatatctgcctgtaactccagacaaactttcgctgaattgcaggcagaaggtagtggcgtaaattaatcgaatctatcgcttgttttatcgttattgctttttcatactggccagccatcataaacctcatgtgttatattagctggctgattttaatctaaagggtgtaacgagtacagtatttgcacaagcataatttatgcagtggaaaagctgactgctcggtttgtgtttttcgttcgggtagactcgcattgcggacgcacaaagtgatgaaacctgtcttgctatgtttttaccaaagttaacaagaagtccatgctttatcttctcgccatctgttatgtctgccaggtcattaccaaacgttacgctggcagctttgtgacgcgtgatttggggggggatgaagcgtggctacgcgtacagactcccaggcgacagactaattaacgcgttgacattggcggtcactaattgaggatttctataagaactcgttgatcgccctcttccctactctccaacttcatacactccaggcgtggcaaggcttttacgcacattacacccacaagaaaacaaataaataacacatcaatgaaaagtcaacgctttaccctgatttggtctcaaaagttgacgttttgccatgtcacttcttatatccgttaagaagcgtaccagaaaccaacaccctgcgacgaaaacgccaaaaacgactcctgatagcaccacaaaacagacacgctaagaatggctctcgttgcgtttaatgagtatataaacaaattgttttaagcaataagaaaacaacaaaacaagataacgaagaaaaggaactgccattaccccacacccaggcaatacccacctcttcctgccaggctaccgaaaagaccaacctcattgccccaggctaccgaccccatgaagaaaatctcgaccaccaccaaaaagcgacgagacaaaggcaatttctctgaaggccattccccaatacacggaagagaatacccgggaagaaactccagacaagaccaggccagaacagtccccggcgccatctcgtttacccactcttacctcgaaagataacgcaaattcctgataagcagagaacgccattacttcacatgcggagaacgacaacagaccagaacccacatcacccacacttccacctctcaagatgaacgaaagaaattgcgcacacgccattactccatacccagagaagaactatccccacaacgaagaatacagaccagaggaaaaccacaagacaaccacctctacaacatctgcaaaaccacttaccggcagagagaagaaagtcgccttttctcccatacgaatggtcaccgtatagagcgctaataagagagatacgagtcccccataagagaggttgttcgagtcaggaaagagcacagatataagacagaggggatggagggggatcgctccctttcccgtatttattcaagtcctgattttatcccccgtaacatccctgcggtcgaacgagtgaaagggccaccgcgaaaatctatcgggagcgtccccgcagggggaaggctggctgcctgagtggaaacggctgggttcccgtcatggaaagggtgcgtgccggtatagagacaaaatgccgcggggacggctgatttcctggcggtacaccgtttggtgcgcggttggctttcttcccgctgcgcgcagctgctgatacgtattctgccagagcgttcgagggtcacaagctgtttcagtaggttttcgggaagaggaaaatactacccacaagccctgcggtgcacgttgagaagaataatgtaaaaagtgctcccgatacgttcccggatactcactgcttttccagcgcttcccgatacaaaatgctttttcgcctatgtcttattgcgataataacaccatcaagaaaacaacgtgtttagacaaaggagaaacacatgtacaagcatttgaacatcagcatcaccctttgcggagaagagacgtgtactgacgaactccagatctctctggatgacgttatccgctctgcggatgtcgctgggcgcattggtacgctgattggcgaagggtatcgcgagggcacgtttgattttcatatcgaggacaacgcaatgtccgtcgcgtggaactgcacaacgtcagagtccagataaaggaggaagacaatgaatatgcctgtgattgtggaagtatggagcgtggactcgctggccgaatgtcttgatggcgtagggccagcactgacccgtaaattatggtcatttgtaccagctaagggagagtcacccaaagggaaggatgtttggcacctgctgactgatgaagagaagcgggagctggtggccgcagtgaaagaggagttccctgacgaagattaacaacggccaccagcaggtggcttttgagtgattgtggcctgcggccagctgaatgccggaacgcttcgcttggtggccgtttacacactggtattatttacaccaacaagaaaacaagttgtttacggagtgtgtaatgaataccgagatgattttgaaactggataagctccagcctcgcaaagacaaacctgcagtactcggttcgatcactttactggacatagtggccaacggcacagccatccgacttttcaaagagaccgttgtcgtcttcggcgaaacttctcgcaagcgcatcgtaatgagcgtcaggcgctatagtgcgaaagggtgggtagctaaacaagttatctggcctgagtcagaactggagttggctttactggaagttaacaaggtcgcccagcaggaaattcaacgagcaacaaccctcgccatagcatagtcatgtgcaacacagattagtcgaatttacgacagccccgttgatccttcggggcttttttgtattgtaagtacttacctacggcgatagtattacgacgcatttacatggaggtaaaaatgagtttgaccaaagaagatttagtatttgacctttactacgcatccagcactgacgaagaaggcaataaactggcccagctgaccgttcagttccgtgatgcatcggctgttccgcatgtgaccacccagctggcccgcacaactcttaagcgagatcgctcgaaggtttatgccgtcggcgagcaatccgtgaaaaatggttcggacactctgctggccgccattgaagcctattatcgaacagacccgaagaccattttcgaaaacctgatggcacaggttcaggatatgatcgagggcaatctgggcgccaacaatacctgggttggttcatacggcataaccattgtgtctggcggctctctggaagagtatctgcctgagtccgtctacaacgtccagtaaaccagccaatggcgcgtaacccgcgccattttccccatcccgtaaacaagttgttttatacattttctgagttgcgataataacaccaacaagaaaacaagttattaacgaagttgaggaaatgttcatgggacttgatatctatattgagacgcagccaaaaaacgatctgaataacgaggcatccagaaagcaagttggctacttccgtaagttcaatgctctcgttgggtggatgaaccgcaacgtaggtgaagttgtaaattgtgaacttttagaagttacgatgaatgatatttgtgctctcaaggctgatttgattcgtctaaacgaaagtaattgtgaagaatatctgcctacccaggaagggtttttcttcggtagtcaggagtacgatgaagggtactggaatgacgtggaagagctgaaagagcttgtggatgagctgattaaaaatcacgacttctacaataacagactgacattttgcgcctggtggtaaatatgactgatttcaccatctccccgaaagcagaaaacgtatggctggaatcctggcttgacctgtcgccggccgagcaaaaagaaatggatcacgtcgaaccggacgaacaaaccagctcccgcttcttccattatcaggatagcgtttatgacattgccgatttcatgcgcgatgaccgcttcccggaatggaacgccggctatccactgaatgccttcgctatgttgatgatccgcttaactgattcaggcgacaccatcgacatcggattgcttcattgagagaggagggccaccgatgctggtggctcttaactaccacctgctttcccgcaggctaaaaacacccacctcttaccgccaggctaccgaagcacccaccgacttcccgacggccaccagctgccgaaacagaacgcttggacgcctcacacccactgcgataattaaaccaacgagaaaacaagttgtttaaaggattatcacaatgaactatatcgccactgtaaacactcccgcgcatggcaccatctctgttacatactccgatattgaaaagaacatcctgggcgcctggcgcgaagaagagaccatccagctgtccggaaaagagaagcagcagatcgccaacgacatcatttgcaaccgtcgattcacgcgtgtcttcgaaaaagcttatgtcaccacctcaggattcggggtgtttatcttcccggttcgaagcgggcggttctgtcagtcaaaactcatcgagctcgcaacacagattgctgtgtggatcaaaacagagtcagggttcgactttacagaccaggaagcaacagcgcagggtgtgcggatcgccgacaatgctcttaagtgcaaaaacgtcatttacgaagccggtatcgactcgtggaaggtcacttgcggggagttcgtgaaagagatgcacgccagtaatcggattcacatactggctggcaagtaagaggggagggggctggaaacgccccctttctttccgtccaccagctcccgcagggaaattcagaaacgggcagaaagccatccgggcaaccgacgggaaacggccagaaaattttcgggaaacggcgggggtcgcctcatgggaaaaatttgtatagagggagacgccagaatcgtcgccagctggtggacgtaagctgtttttgcgccatacgtccagcgctgtgatctgcgctgcattgttagcgcgtacacgttgcgccaacgtgctaatgatacgtgagcgcccacggatcgcgccaatattgccgacacgccccgaaggatagcgcggatcgcgtcaccagacgatcacgcccacgacacgacaaaataagccacgcgctaaaacgcttttaaacgcgctataacgtgttttttactgtgtgtaatgggtatgtactaccacacgtaaaaacacgttaaattggcgcgtttatggcgcttatttttggtgtgaatgagtgaacgccagataaaagaaaacgcgccaacaatggcgcgttatggtggagatcctgaaacgaaaaaagcgcccatagtgggcgctggtggctaaatgctgttttgcaactttccgatcatttcagacaagcgcaaatattctcttttccgtttacagtctcgcttgctgttaagcaaatcagagaacgtaaagtttagcgcgtcacgttgggcgcttaattcgtcgatgagttcaagtttataagcgcgatatttagcgcgatactccgcgcggatctggtcatagttaatcatgatttttatccttaaaactagcgcccactatgggcgctgaatccgtctacttatgctttgaaagcgtcagccagatagttataaaaatcatttttgataaagcgatattgctgcgatccgtttttggcagcgcccattcctttaatcttctcgaccagtcccagacgttcacacagattgatcagctggttggcttgcgtatatcctgcatctaacttaatttcatttgcttgttttgcttcattcatcaaatcgaaaacagcaccatttgtgaacgtgtcgatctcatcgttaatcatatcgattaaagcgaatacacgagatccggacatatcagcgactgaatacacacatttaccagacttgatagacttaaccagataaaccagcttttcgagagagtagctatttgtcatcgcttcgcggaaaaacacttctggcgtttgcttgcttgctttaatcgcgtagtagaagacaccagacaacttatcgtcgtttactgcgtttacaacgttattcacgaagtatgcgagtttagtagacgctgcaagcatgttagctttatctgctttggtgtgcgtgccattctgataatgttcgttgtaagtctgtgtagcttgatctgcttttaattgtaattcgtcagtgataactacagcagcatcaatgatggattttttagaaatggttacgttagacatgattttaatccttatgtaatattgaaaacttattttgtttttcgtctatcgtcagcatgtttgctttcgatgtaagtaattatcgacatgcaaaaaataaaatcaagcgtttttcgcaaggagtgataaaaaatttatttcacaaataaatcaaagtcttagaaataaatcgcgttttctcgaaggtgttgcctaaataaattctacactcggtgtattacccttatatatttagcgctgacaatactttttgtgatttaatttatcggggagtgacctataaaataataaccggacatagccggctattacccttataggcatttacatcttttttgcatagttcctgatttcttttattatatactccccaaaacgttccgagttttcgcatttgtctttcgaaggctcatcaagccccagcttgcatcccgaaacgatcagtctatcttgatatgcagcgcctaaagccatgcttagctctaacatgcacaaatcgtagtcttccgcctttgaacacacctttgtagagacacgttgagctcgttcaatgctattttcttgagaaaatgcggaagagctaaaaatgaaagttaagaatgttaatgctgctacagttttcacatcaatatcctaaaacggcagaattcgttcaacccaatcaaacaggacgatcatttttcgcccgttcccaacggcaagtgtgacctgacaagcgtcgacgccaagtgacacaccttcaatttcgcggccgtccgccatgtagacccttacagatttatggttctcgtgagcctggcggcaaattttaaagaaatcacggcgggatggccggttatcaacatagtctggatgtacggttacgcgaccaacgaaatcatgggtgacagcgtcatttacacctgactcgatagtgctgattcgctcaagtggcaaccttacacgattgtctttgtcgaacggcgccgggcatagatctaccttgttacgggaggacatcgtcccctgaacgtacatgcagaacacctggccatcttccatcgtgacctttacgggaatttgctccttgcgccagaacatcaacgacgcctctacttttgagtaatcgcgcggccagacctcagcaggtatcccgtaggtgatatcggtaatggtattgggcatattttaaacgcctcatgttatgcgataaaaattaccagaaggtacgagtcaccattatcttctatttccttagttttgacaggcgaaaaagcgttaccttgttgcaaatacttagaattgttatagtttgcaggcaagtttctatatggtgaagaatgatgaataagtgcgcattaatagctttgataacctccagtttactggtggctggatgttcaacccaggcggtcaggacgagtgctgccgacccagtcccagcttcgagaatactgtcgaccaaatacaatacgccgtcagagaatacgcaaaaaatcatcgtgaaacgagactctggcagtaagggcgcgctttgtaccagccggctttctgttgatggtgagccagttgctgatatcaaaacatctgagaaggttgagttaaacctgccttatggcgagcatattctgtctgtagatcagcagggtatgtctattatgtgcggcaagatgaacaccgaaagagaaatcatggtgtcaaaagataagcaagacgaatatcggatcggggtgacggtgtcggcagagctgttcatcatgaaaacagcctataaataaatggtagaggagggcgagagcgtttcacccacgccctccgtaagtacgcgttagagacgtttgaggatatcttccaagtcttccttggtcatcccggagttctcgtagatctgcaacactttctgtctagcgttctcagccgctgccatcgaggtcgcgatcttctcaaactctgctgtgctcatcttggtcagaacaaggttgatgatgtctgacttcgacattttgatgttgcgctctttcaggcgcgttttgaacgaaccaagcttttcgttggctttttcggtgagcttcacctgacatgaaattgagcgattttcggtcataattaatctctttgtaatacaccaaagtcaaaactgctcccgacaggcaacacgccttccgcaaacccgggagtggtgtcaataatgtgttttcgttcgtatgagtgtgacatcaggtgtttgttgcttatatcgataaaatccgaaataaaacacacatttgcctgattcttcttggcacgaaggccgcgaccaacacgttgacgcatttcgacttcggccttgcctcctccggcaagaattacggcgccaacacttggcacatcgacaccgacatccagtatcgtagagccgatcagcacatcaattttccctgtagccaggctgttaagcttagcctgtctggtactctggttggattcaccgtaaataaaatctacccgtaagccgctctctttcatcatttccatcagtatctgaccgtggcgtttgatcctcaccagggtcatacagttcagtccatgatcacggtacatcagcgcgtcgcgaacgacggcctcgttacgtccaatattgtaaacgataccgagctgataagctttctgatacggcgtgctcataccaactctgaagttcagatgcttggaagcgagctccgctcgtatacgagcctcatccggagtgtacgcgattttatggtatacgaagtaaggtttggccaaaatacctcgctcgatcagatatttttcagtgacctttatctcgatgcgtcctgcaaccgccatcagacgcatattggcctcagttgaagccttcataaacggggttgccgtcagcgccaggcgatagtctgcgttaatgcaaagcctggcgatgtcataaaagtttgaaccggaggattcgtgggcttcttcgaggattagcagtgagacgcttgagaggaatcgcttaaccagctcccggcgcttaagatgataaacctttttctccgccggcatatcgcgtggaggctcttcaagaaaactcgccagggtttgcactgttgcgacattgatatggcgagacacctgaaactcaccagaaccaatgatgccaaccttctgacctttaagccacggctctccattctcagctcgatagtcgatcgacttctggaagttatctgccatttgaaacataagaacagagcgggtggttaaaaacagcgtcatgcgtccaatacgcgccgcggctttgcaagctacgttcgactttcccccgcctgtggcgatctgcgcaatcatcattccttcgcgaaccagtgtctctacagcctgatcttgatacgcatagtccggattataggggaaggggttaactgccgggtttggtttaccaagcgccggaaccttgtctttgcgaatatgcacgcatttaatgccagccttcaccagatttgctgctaccgatttagcaaaacccgcggggaaggcatttttgctccagttgaacatagtactggtgcctttccagtcgccagcttcgacttcgtaactcagcatttcctggacgagtcgcttcacgttgtcatcagcgccggagaccatagcgttgaccgcgttcgaaacaatcctaacagtcataaatatctttccttcgtgccttttatatgttaattggctagaatagtaagtaagtaagtacttatgcaatggattgtatcaaaaagtatgggcgtaaaaattaccattctgcaggtagaagtggccagactccggccaaatccctggaacaccaactcggttggtgctcaaaacttcgaaaaactgaaaggctccatcgaaaaactgggttttttcaagccaattctcgcgcgtgagctggacggtggccaatttgagatcctcggcggcgaacatcgctggcgagccgctatggaacagggtatttccacggttcctgttatatcggtgggcaaaataagcgatctggtcgcgaaacaaatgtctctggtcgataacgagcgatacggcgaagacgatcaggtcgcattacagcgtctgatcgaggaaattcagtccgaactcgattatcagctgtcggaaattgccccttacgacgacgaactggcggccacactggctcgtgagtcggcaatcgacctggaaatgcttgaggcgttgtcgcgtggtgacgaagagcccgttgagaaggactctcgtgaaaaagctgagcgtgttggggcggaacaccagactatgcgcttcaaagtgacgtttgacgcttctgatcgcgttaccgaaaccatcaaatccatcatcaaagagcaggcgatcaacaccggcaacgacatggagaatgctggtgaagctctggtatggctggtcgataactacaaggagtgtatttaatgaccaaaacgttcgaaatcgtctaccgagacccggcagagctcattccctatgaaatgaacgccaaaaagcatgacgagcagcagatccgtgacctggccgcagccataaaaaagcgtggttttgaccagccgatcactgtcgataaggacgatgtcatcattactggccacggccgccgcgaagctgcgcttttagcggggctgaaaagtgtgccggtgatcgttcgcgacgatctgtccgatgaagaagtgaaggcgaagcgtctggaggataaccggctggccagcattgattacgatgccatcaagttacagaaagagctggagtctctggtacttggtgacgttgaagtcttcggctttgacgagcgtgagctgaacgtgctggtcggtagcatgaccgaagaaatggatactggcgcactggttatggatctgggggaggaaaccgagcgccagaaagaagagcacaccgaaatcagtcgcgaagtcgccgccgaagaggttcgagtggtcgatgttctgggctttaaaacgctccctgctggctctgcgattgtcgtgggggatttgcttgcccatatggaagaaatcacgggagagagcggggtagacgcgttcgttgcttatgcgcagaaagtttcctccggcggagtcgaagcatgagcacatataccatcaacgtatcgttccagacccgtgtcaacaagactactcgcacgcttgagatcgccgaatcgtttgggcttggcctggatgaaaaagactggacgctttacgacaatcttgagctggaagttgagcagggtgatgtggtttacatcactggccagtcaggttccggaaaatctgtcgtgctgcgtgagttacaacgccagatgaaagaggaagggctttcagtcgcctccattgatgactttacctttgacaacgacgtcaatgtcatcgaccagctgggtaaaaccaccagcgaagcgttagggctgctttcgatggccggcttgaacgatgcctatctctttgtgcgcaaaccttctgaaatgtcggatggccagaaataccgtctcaagatcgccaagcttattgagtcgggcgcgaaggtatgggctgcggatgaatttggcgcagttcttgatcgtgttaccgcccaggttgtggcctcgaacctccagcgtgccgcgcgaaaggtaggtgcgacggtaatggtggcgacgacccacgaagacctgaagaacgcgctgcgcccggatatgcagatcaccaagcactacaaggagcgagtgaaggttgattatgcagattaaaaagactttcccgatttatgagggcccagatctgcgccgccgctggactacagaagccgaatggcgagattggcttcgtgctcatggcgcgtatggttttcgcgttaccccgtatttcaatcgctgctgtgtcgtctttggtgaaagacgttatgtcgagacgataaaacagctctatggcctcgatgaaagcgagttcgtatatggggttggcggcatggtgacaactctgggctatattcaggccgacacgatgcttcattgcgtctacctgccagaaaattacgatgaaacagtctactggcatgaggcactacatgtggcgctgatgaccgcagaatatcacggcgtgcagctccatgatcaggaggcattgacctacctgcagggttatatcgcggaagagttcaatcgttcccgactacagtttatggccgacaagaaagctggtggactgcctgcgatcgagggaatcgtgactcgtccagcatccactatctgccgtggcggtttttgcaatcgtaaggtggtgatgcgatgactgacatcatcattaaacggtatcgcccggaggagttcccgcgccatctggactttcttgagcgcatgaccgtcaccagggggacggtagaagactggcacgcgcttaagtcacttcactacaagacagatgggaagccgttcgcccctacctactatcgttgtgagctagatggtcggttggtaggcgttgtagttatggccttccctaaactgctgctggcgccgcggcatcgcatgtttccaaaactgaaacccacaaccaacaccaccgtggcaaatcagtactggggacgttacgtaaacaataacttcgctgtgatcagccgctctgtagtggacacccagtatcgtggcgtcggggtatcgtatcgcatgattaatctggttagcaggatgcatgaccggccaatcatcgagatccagtcgtcgatgagcaaatataacccgtttgctatgaaagcagggttttgcttcatacgtcctgaacgtccgaagagctacgaaagcgcacttcgcgtctttcagcgccattttcgttctgatcccggcgacaacgaagcgattgtgaaggagctgtttgcgatgactgattcacgccggcgccgcgcactgcgagatctggtggcggactatcacaagaatagttctctggcaaaagcaggccgcaaccgtggcactaccattcaggatatcgcggatagcctggtggatgaggccagcatcgtgaaactgctcaaggatattcacaacctgagcttcacttcaccgctctatggggtttatcgcaaccctgattttggtcgccagctgccagacacactgccactgctggcttttgataaacaaccgctgaatgcaccactggatattgcgttaccggcataaggatttgccatgacactgactgataaacagaaagacatcattaagaccatcaacttaggccatgaacgtggacatttgctcgatctggacgagctgctggaagtgctgccttaccggacgacaaagcagtctatgcaattctccctgcgcgcgctgatcaagaaaggtttggtcgaaaagcacgactgccggccgcgagaggattctggctaccagcgtcgaactctggggctgacgacattaggtcgagccagagccaagttactggtgatgtaagttggtcgggggagtcagattaacagcctgcgtctgtatatataactaataagtcacttattaaatatatatacgaaagcaggctctcaaacggattccccagacctaattaatacaaccagaaaacaaattgtttaagagcgcaaggaagcgctctgtgtgtgttttagagggatctatgactgtcgaaaaagacgagagcaaaactcgcctgactccggctgaatgggcggaagccgaagcgaaatggacttcgggcgagtatacgctctcaaaactggaagaagagtacggcatccgtcgtgaaacgctctccagacacttcaaaaagcgtggattagagaaaggcgccgattctgttggaaagatggtgcgcgagtctctcaagtccgatgcagaactgcgcgctaaagcccgagccgaaaagatagaagaccgccggacacgctatgacggctgggcgtatgcccttggtcagatggtgatggtcgaggtcactacagcaaagcgcgaaggtaagccactggcctcgattgaggacgatcttaaaagcctgcagcgcgccagcggcacgctggctaaatgcttcgaaatttcctccaaggcattgggcatggagaaagaagaaggcggtgaagaggatattccgaaccttgtctttggcgagctaaccccatcacaggtggcccagctgcgcaaggaagatgatgagcccgaagtgattgatgacgatctgttggaatcacttgaagaagaagcgctgagcgaagctgagagcgattttgacgcatcgggcgaagacgatgatggagatgcataaccatgtccatcccgtcgtctctaagtctcgtacagctgcactccgggcagatgcaagtcttccagtcgccacatcgtttcaaagtggtgtgcgccggacgacgttggggtaaatcgaggctgtcgatctcaaccatcattcgcgctgccgctaaggaaagaaaacaacgagtttggtacgtcgcgccgacctatcaaatggcgcgccagattttgtgggatgatctgcaggaagttctgccgcgtaagtggattcggaagaagaacgacaccacgatgaccatcgtgttgaaaaacggttcggagatcgcgcttaaaggcgcggataaaccggatacgcttcgtggtgttgcgctgcatttcgttgtgctcgacgaattccaggatatgaagccagacacctggtacaaggttctccgtccgacattgtcatccacccgcggcggcgcgctgatcatcggtacaccgaaagggttctccgaattccataaactatggactatcgggcagaacaaagagctgcagcgcaaaggtcagtggaaaagctggcagtttgtaaccgctgattcaccattcgttccgacggcagaaatcgaggcagccaagaacgatatggaccctaagtcgttcgctcaggagtacctcgccagcttcgaaaacatgtcagggcgcgtgtattacccgttcgatcgtagcgttcacgttaagccgctgcagttcaatcctaaattaccggtgtgggtaggccaggacttcaacattgatccaatgtcgtcggtcatcctgcagccacaaccgaatggggagctgtgggctgtggatgagcttgtcttgttttcgtcgaatacggcagaagtgtgcgatgagctggagcgtcgcttctggcggtggaaatcgcaggtcacaattttcccagacccggccggcgcctatcgtcagcacgctcgtggggaatcggacatcgacatcttcaaggagaagggctttctgcgtgttgattatccgaaaaagcacccaccgattgctgatcgtgtgaactcagtgaaccgcatgttgatgagcgcctctggcgaaactcgtttgtatatcgaccctaagtgcaaacatctcatcgattcactggagaaagttatctacaaaccaggctctcgcgatatggataagagcggggggattgagcacagcgcggatgccttgggctacccggttcatcgtaggtatcccgtaaaaaatcgtgttattcttggtggttcaagataagtaagtacttacctatcatggaagagaagcaaatggaattgactgagaagcaaattaaggatcttgtggcaagacgccaccccgaatacataaagaaaaaagagcactgggatttcctcgccagcacatacgctggcgggcgtgcctggttcgatgacaacattttccgatacttcaaagaaggtgatcaggagttcaaggagcgtctggaacgcgcctaccgcttcaatcacaccagggaagtggtgaacctgattaataaatatctcttcaaagaggacatccatcgaaatgtagaagaagcgcctgagccaattcagaaattctggaaacgcgcgacacgacagaatgtttccatcgatggctttatgtccgcgcttgacctccagtcctccatctatggccgtgtctgggtggtggtcgatagcacgatggatagtgacgcagaatccgtcgctgacgagaagaagaaggatgttcgcgcctatgcctactggatttctccgcagcagatgttggatatggcgtgggacgatgacggtaatttgatctgggcgctgattgtcgaagtggcgcgcgatgatcaagatccttttacctcatctggccaggaatatcagcgttatcgtctatggacacgtaacgagtggtttctattccgggaagaggttaagaaaggcgccgggaatgccggtcgtcggaccgcaaaagttgtgcttgaagataaaggcgaacacaaacttggcgttgtacctgtgtttcctgttgattgcataggggagagcgaatcgccgtattttagcccgtcgcttattgatgatatcgcctaccttgaccgtgcagtagccaactatctgtcgaaccttgacgccattattcaggatcagacgttcagccagctggccattcctgttcagtcgctcctgccaggcgatgagaatcacgcaaaggtaatggaaatggggacaaaacgcgtcttcacctatgactcggaaagtggcaaccagcctttttatttgtcgccagaccctaagcaagctcagatgatcatcaccactatccagaccgtgattaatgagatctaccactccgttggggtcgctggcgagcgaacaaagcaggataacgctaaggggatcgataattcatccggggccgccaagttatatgactttcagcgggttaatagtctgcttattactaaagccgagcgtcttgagcgggctgaacgccagatgatgtttttggcggcgaagtggatgggggtcgatctcgatgaggagcattcgctgattgcctatccggagagctttgatatccgcggtctgacggatgaatttgccgttgccgagaaacttgggctgctggaagcaccggattctgtgcgtcgatatcagatggaaatgctcattgagaaaatcttcccgaatatttcggccgcgatgcagaaagaatttgagaaagatctcttgaattttccgccaaaaaatgctcttaacacccttgaaaataagtcagtacttacttatcatcgtgatacagtccaagagagcggacaagatctatcccaagggaatgggaactcatcaactcaagcaaccgagtgataagtaattaaaaggaatttttatgaatctgtggcaaatgctaatggcccgtcgtggcctcatggatgtcgccgaatcacatgaacgtggtggcgcaggtgctggagctcccactggtgcagaagagcagggcacccaggaatctggtaagcagaacggcgagcagaaagatcagccgaaaatcgaagacgatgaattcggagggatgactcaggaagagttgctcgctgaattgcgtaagtccaagaaagccggtgctgacctgctgaaagagaacatgaaacgcaaggaaaaagagcgtgccatggccgatcagctggctcagtacggtgatatcgatccggtacgagcacgccagcttcttgaagctgagcaagccgcagaaaacgcacgccgtgaggcggagcaagctgaactggaacgccgtggtgaattcgatgctgtgaaaaagcaaatgatcgaagctcaccaggctgagatggctcaacgtgatgaacgtttttccgctctggagagcgaaaacgccgcacttaaagcccagctggttgaaatgaccgtcggcgcttccttttctggctccaatttcctgcgtgaaaaagttctgatgactccggctaaggcccgcgttatctacggctctcatttcgaagtgggtgaagacggtaacgtcgttggctatgacaagccggcaggtcagaaagagcgtgctgttctggttgacggcgaaggtaagccgttaccgttcgaatccgcgattgagcgtattttacgtgcagatccggaagctgacgctttattgcgcagcgaagctaagcagggtgctggttcaattagtaaaccgacccacaaagtaacccagccgaagaacaagtcgacaatggataagttgactgccggtttagggaaaatcggaatcaagtaacatcttaaatcatagggaaatgaaagatgccattactgcgtgaagaagctgaaaagctgtctaataacgagcttgaacagggcgtgatcgagaccattatcgatcgtgacgacctgtttgccgtcctgcctttcatgaagatcaattcgaaggcatatctttataaccgcgaaaaaaccctgagcgaagctactttcattgatgtgaacgacaccatcaccgaaggtgcagcaaccttcgaagagaaagttgcgaagctgcgcattctggctggcgacgttgacgtcgacaaattcctggctaccactatggctgataccaacaaccagctggctatccaggttcgtcagaaagtcaaaggtctggctcgtgccttccgtcgcaatctgattgttggcgactccaccactaacaacaaagccttcgacggtattccgaagctgatgcatgacgatcagaagatcgacatctccggcgcctccatgactttctccatgttcgacgaactggtcgacgcagttaaagatctgggcgcagactgcatcatgatgcgttctgagcatcttcgcgcatatcgtgcgctgctgcgaactgtaaacgtaggcccgtccgaaatcatgatggaaaacttcggtcgaccaatgttgtgccataacggcgttccgtttatcgtaaacgacttcattccggttgcggactccaccaaagcggatatctactgtctgcacctttctgaagaaaacggtgtaactggtctgtatggtggtgaaaacgccggtatcgttgtggaaaacatcggtactgttcagaacaaagacgcagttcgtactcgtgtgaagtggtactgctctctggccaataagcacgacaaagctatcgcggcgctgactaacgtcaaaatttaatcctaataataggtaagtacttacctattatttttaaatgggtgggctatacgcccgccctttttataggagcgatatatgtcagaaaaaaaagtgaagatcactgaaaaggccttcaccgactttacgggggttatgttccgtacttctttcactaaatcggtgtccgatcatccagtaaacgagcgcatgcagaaccgtatcaccgcagctatgcgagcggttccgatggagcccactgtcgctgttactggtgtgtcggtaagtcctaagtcggcatcggtggaggtgaaaaaaacggttcaactcacggctaccgtggcgcctgctggtgctaccaacaagaaagttacatgggcgtcgaaaaatgctgaatttgcaacggttgacgcggctactggtctcgtgaccggcgttgcagaagggactgcaacaattgaagtcacgaccgcagacggcagccataaagcaaccgcaactattcaagttccagcagctgcagcctgattcagtaacaaagggtggctctggccaccctgttcagaggaaaactcatgaaaccagcaaaaattcatcttctggaacctcagttccttggatacacgggcatcctgtgcggcgtttactttaaagacggcatttccgtagcagagctgccattcctcgatcaacagcggatctgcgcctcaatgcgtgccgaaacgattgatgggcaaaatgtctctccatcagctgccttcagcaatcgtaacgagctggtggccgatcagattgtggagcctacggcccctgatattgtccctatgaaacgtggcgtcgcgaatgaggagacaaaacatgtgcagcgcttcacccgagaagaactggagtccattgctgactgtgaaggtatcgccggcctgcgccagatcggtaacacgcttggcgtgaaagcgaagggcattgttgaaatgattgagggcatcctgaaagcacaaggcggtgagtgatggctctgatcgacacgtttcgtagcggagacatcgtgtctctgaccttcgcctttaacgtactggatatcgactccgcctcttatacggtgcgagatagtgcaggcacaacacttgtggacgaagagcctctcgatattgcagaaggccaaatgtctataccggttgtaatctcagcagagcataaccagctggtcgaaaaagagcgtgatctgcgctacgtcatcgtgaaggccacagcgggtgggctaacccacgaagagcggcagatgtatgtgctgcttaatagctttgaactatccgtcccggctcagtcgtttgccaccgtagccgatgctcaaatgcaggccattgatatgatcaatggagatacattgctggctgatggagagggtttgatgcgcaagcggctaatcgaagcgacacggcgaattaaaaccttacctttctctatccggaggatcatgcgcatcgatttcgaccggtatgaccgtccccaaaacatgctgaatgtctatgacatcccctggggggctgacggcgtgtatcggcaagatttggtggactgggaacggatcacttcggagcagtttgcggatttaccagactactttaaagaggcgctgcttctggccaccgttaatgaggcatgcgagatcgccaatggcaacgatattgcgagtgcgcgagaagacggcattttgtctgaatcgatcggtgaaacaaccaatatgtaccgcacaagcaaagtggcgaatgtccgtgtggcccgcagcacctggcgattgcttattagttacatcaacaatcggatgattgttcgtcgtgcgtaatacacgtcgtgctctttacttctggtcgacaggccaaagacgggaaaccgcgcctccgcctggtaatgagtgcgacgacttcacacaaggagagtggatgaatatttcgtggcaagccgaattgtcgatctaccggtttggttccaaaaacgtctacggtgaagcgcaattgcagttcgtcaggaagacgaaagtaggcgtcgttaaatttgaacagagcaatgaaaaatcgtccgtcagggcagatagctctggaagccgcggaaaggcagcgctggagttgtttgacgcagtacttattgttccacttgaagccgctgttcaactcgatgacgttcttgtgctggaggggcagaagctgaaggtctcaagcgtacatcggcgatggggactacgtggccgccctgggcatcttgagctgggggcgaatatatgggtttgaaatatgacgcacaccagtttaagcgtgccggcgccagacttaataacagccagaaagcgttcaagcgatacctaatcagggacatggaaaagctggcgcgtctggttgaacgactggcacgagccatggccccgcttgaaaccgggtcgctggagagcgccatttttgcgcgggttgtaaaagaaggatacgcgggacttcgtattgagctttccgtatcaggcgcaaagcagcgcgaaggacatccaggcgttgaggttggggactatgccaaatacatggagcttggtaagtaccgtcttggttatttgtctcgtatgaagaatgttaccaaccctcctgtcgccggcgtgaagcctaaagtgggcccatatttccttgagcgagcgactcagatcagcgaaaagcaattttcgcagacgatcattgaagctgccagaaaagcaggatttacgcgagattgacatgtttgtagaagcattcgcaaaattgatacaaaaaaaggggcttggaaaagtagggacggacattttctgtcactatatgccatcaaaagttaagtctggcatcttgctgattaatcccaatacaggcatagccatcgacccggatttgcagggtttttacttcgactcattcacgatagtagttcgcaatgcgagtattacaaaatctgttgaaatggccaacaaaatcatggatatccttcctgttagcaacgttgagtctgaccgggtattcttcaaaatggttaggccgatggcgatgccaataacgtatccaataaatgacggatcgcttattgaaacggggattccacttgaatttgccgggtactttattgaactgaataaataagtaagtatatacttactattgtgtgtcggaatgacactgttttaacggaaaaaggagttttccaataatgtccaatacccatgttaaaaacatcaagcttggcgcctgcaaggtgtcgtttggtggcgtggatctgggttacaccaaaggcggtgttcaggttgaaatcgcaaccgaaacgctgaaagtgaccgtagaccagctgggccagaccacgatctccgagctgatccaaggccgcaacatcaccattactgcgccgctggctgaatccgtgttgaaaaacatggtcgatctgatgccaggttcaacgctgagttctggcgaagataccgtaactatcacgtctgcgcagggtgtgaacctgatcgacgttgcaaaagagttggtgctgaccccgcaggatgcgacggattatgttctgaccatccctaaagcagcaaccgcgggtaacttcaccatgacctaccagtctgacgacgttcgcgtgttctcagttgagttttccgcttacccggacgacgctggcgtgttggggaaaatgagcctcccaaagccggttgagagcgtcacgctgaccccgtcttcaccgaccgtaaaagtgggagctaaagttcagttgagcgcaacctttaccccggccgatgcaaccaataagactggcatgtggagctctgatgcgactgataaagcgaccgtagatcagaacggactggtaactggtaaagctgtcggttcagccaatatcaccttcacaactaatgacggcgccaagaaggcgaccaaagccgtctctgtaactgccgcaagctaaattgtgataacccaagaggcccatggatgggcctctgtatgagtttaaaaggatttaaaccatgaccaaattactcgatctcgactccattctgccgccgaaaaaaagcatcaaatttggtggcaaagaatatcccatcgttgaaatgaccgtcggcctctttgtttctatcaagcagatggaagacaaagacctcatgaatatgtctcccgtcgaccaggtaactgcctacgcagaactggtacgcaaagtcattccgtcagtacctgactccgttctggagaaactgactgtccagcaactccagcagatcttcaccttcgccatggaagtgattgatgaagagaacgaaaaagcggctggcgaaggggcaaagtaatatcccgcgatgaatccggggtaaagaccgtttcgatagatctcggattctatttcagtcgtgtagttgctcactacgccgtatcgccaatagagctactgagtgtcccgttaaccatgttctggatgctcagccgcaatatcgatcgtctgcgagcggaagaggatgtccgcaatctgcaggtcgcccgcgtcgcccaagcggatggcgatggcgttaaggcgttcatggagggtttgcaactcaggattggaaggccagtcgttactgataaagtctaccgtccgcatatggataaggcagaccccgacgccaaagagcagctgatgcaaatttttggcagaggatgacaagggaatgtcacaaaacgtagagtttatcctgtcgctggaagacaaacagtttacggcgtcaatcgaccgggcgggtaaattacttaccaaatttggcgagcgggctaccaaaccggctcaaaaaattaaaaacctcgagcgctctctgggttcggtctccagcattcttggcgctcttgaaacacgactcaattctacggcagacaaactgcaggacgtagctgccggttttgagctcgtttccaacacctctcgaaaggcacaacgtgaactgtccgctatcagcactgatttgcggacattcacagatcgcgttgattcggccacatcgtctacgcacaagttcctggcctcattgcggaaggttcagtcggaactcaatgagttttctgattgggtcaaatacgcaggagaccatgccggcaaattcaacactgagattaagggagccactacttctcttggtggaatgaacaccagactaaatgcgaccagcaagcgtctgagcaattgggggacaacgacaagccaggcggccgaggggttaaaaaaagtcaaagatcagatggatggcgttattcgaagccagcagctgatcagccgccctgtcagggtcagaacaaccacaacgggtgggggaggcagcggaggtggcgctgatcgatttaccgctgcgccccatcgcggtggcagtcgtgaaaatagcgtcttctctgggttacgcggcaatatttttcttctgggggaaattggcgatgcggccagaacggttactgacatcctgtttggttggcagaagccgatcgtagaggctgcggccgagatgcagcgtatgcgtgtcatgttgcgtggcttgaacaaggataaagtcaatcctggagaagccgctgctcaagatatgcagtatatcgtgaacatggcgaaaaacgccccatttgcgatgcaggccttaaccgactcatttgtgaaattccgttctgctgggctcgatcctactgatggctcgttaaaggcactggtggactcagtcgcacgttttggtggcgatagtgaattgcttaagcgagcggcggtggctgtccaacaaatgtctggtaagggcgtcgtgtcgatggaagagctccgccagcaattgggtgaagcggttccaaatgcgatgaaggcgatggcagatgcggccggtatcacgatgggggagctaaccaaagccgtctccagtgggaccgttgaagcgaaacaggctctttcgttgatgtttgttggtttgcgtgcggaaaacgaaaatgccgccaaagatatgatgcaaacctataccggtgcgttggcgcagctgcaaacctctttcactctgtttgctgatcgagtggggcaggctggataccttgactcgctgaccaaggggatgaaagagctggcggccataatgaacagcgcagaaggcatttcgttcgctaattcattgggagaggggcttaccaccgcgattgatggcctgcgcgagctggcgcaatggttggctaagaatcaggagttggttattacgctgggcaaaattgtcgccggattggtggcatttaaaatgctcagagcgggcattttaggtgttgtcggcgccggcggccagatgctttccaccttcatgaagatgtccactgtaatccagacaccattcacgctgggggcgacggcggtcactcgtttcaatcgtgctgcacgcatggggctggcaccaatcccatcgctcatttttgccattcgtggcgcgattacggggctgaaaggggcatttgctgggctgactgcgtttatcgcagcaaacccgattggtgctgcgtttactgttgcaacagtggctgttgccgggctgatcacctacatgaccatgcttcgcaacgaaacgtccaaagttgttgaggagattcgcaaaatccccgaagcgatgacggcagccaagcgagcacaaatggcggagcgcgcatcgcagctagagaagcaaattcagcgggaccagcaagcgcttaaaactggcgaaagtgttaactacatttccactgtcgccggccctgtcgccgttaaggagtctaaagaggttgttgaggctcgactgaagaaaaatcaggaagagtacaagagaaccactgacactatcgcgctgggggatggcgctgtatccaaacgtctggcgaaagaggctgctgaatcccagatcgagaaaatccgggcggataatcagctcttctcagctacgtttgttaaagcgcgtcaggaggcactggacaaaatccagaagatcaatgacgacaaaacattgtccgatgatgagaagaacaagctgcttgcaccgctgcgagagacagtaaacaaatcttatctgcagccggcccagaaacttgtcgactctttatcatcgcgtaagaccgcaactgaaaagcagatcgcacattttagcgatttgctggaaaaggcgaaaaaagaaggaaacacagaacaggtacagaagctgcagggcagtattcgcggctatcaggaacacctggagacgattgctcaggaactgacacaggctgagtttgaacgcgataacgcggcgaaaaccgggaagggcgtgaagaccaaccaaggaacagtgcttgggttgggcaccagcgacaaaggcgctgacaaagcgctcgcgcagtacatgcgcaaccagatggactctgcggtttaccagcgaacgctacctgatggcacaccaatgatggattttgaaggaaaacctatcattgggccgaagcagcttaaaactcagcttaacctgcagaaagcctcaactgcatcttctctggaaaagatgagcgagaaggagcgtgcagccgccatagccgcattaaccaaagctcgtgaacaagatgccgctgctgccgagagggcagggaagcgtactgcgaatgcctctgaacgcgcagcgaaaagggaggaaagagcgcaacagaagctggctgccggctaccagaaggctctggataaagctgatcagctcatggggcaaatgggcgaaagttcaaaggctactgtgtcgtttgatcagtcgctgcgtgatgtcaccaagtcactaaccgatcttgcaaacgccacgcctaacgagtttatctcgcaggagatggttgaccaggccaaaaaacgtctcgcggatttgaggaacgctacccccgaataccgcgaaatgtttaatcgccgcaacgtcgagcaaatgatcagcgcttgggcgccggaatcggattcgattatcagcgcaggcttgatgcaaagccatgaggagaaggctgccgagttttcggatacctacaatcgcaatcttaaggcgctgatcgagctgcgtgataaggcgactgacccgaaaatcatctcgctttacaacaagcagcttaatcagctggtggccgctggcaacaatgcgctgattaagcaaacaggtacagcgacccagcagttggctctggagtatgagaacctggctgaacagattgagggcacatggacagatctgtttagcggcttaactgacacgcttactgactttgttgttaacgggaagatgagcttctccagtctggccacatcgatccttaaagacatcaccaacatggtcgtgaagacccagatcactctgcctctcatgaatatgttgggaatgggaacgacaaacgccggcaatgcacaaagtggaaatctcatgaatggcgtagcgtctgcgatcgctaatcaaggggttcagctcggtaattctggtggggcggtggccaatggggataaatctgtcggcgaggccactaaggagacagcctccggcgtgaactctatggggcaagcgtctcagaatgcggccagcggtttaagccaggcggtgaatggtgtctgggactggacgaagtcattgttcaccggtactgacgctacgaaagatcaaaccaaagcggttaacagcagcatcctcagtatggggaatctgtctaccgcggcgggggcactggcagcaacattcgccatggtaggtgcttcgtcgtcgagttcgtccagccgttggctgaatttcggtctgtcactggccagtaccgcagtgtccgcttgggctgggtcttcgacgccatcaggctcaaagccaaatgtgaagaagcacgccaatggcggcatctttggcagggaaggggttgtgcctctgagagcttatcagaaaggcggaattgccacctcaccacagttggcgatgtttggcgagggctcaatgaacgaggcttacgttccgttgccagatggtcgaacaattccagtcacactttctgcagagtcggctggaaagagcacgggtaacgcggtgtcccctgtctcaattcagatcaatgtgaccaaggatggacgaaccagcgagagcagcagtggaagcgagagcaatctctggaacggtgcagcgcggcaaattaagtcgattgtgcttgagacgattgccgaagagaaacgttctggtggttcacttaatccgcataccaccagagggtagtaaagccggccgccttagcgggcggccatcacaaggaagtgatatgtcgaggaaagtatttaattggtatccagattatgagtctgagaaaacggtaaagcctaacgtgaccgtgctgaactacggcgatgattacgagcagcgccagtcgcaggggctcaatcggattaaagaagagtggtctctcacgttcacccgtagccatgacgtggtaaacgacgttgatgactttttgactgcccgcgcaggggtggagtcattcgtttggactaacccaagaggcaaagcaattatcgtggtatgtgatagccatacggtaaagcgttacccaggttatcaagtgcttacggcaacatttagacaggtttttgagtcttaatttgcgactatagataagtaagtacttatctattattatatatcaacgtcacaggatgtaacgttgagtttttcaaggatgaagtgatgggtattagagctgatattcagagtttatcgccttctgcgctcattgagttgttcgagctggatatgtcggtgacaacctccggcggcaagttgtatttccatgccggcaccaacgggcttagccagccaattgtctggcagggagtttcctatgagccgtggccaattaaagcgtctggctttgataaaagcggtcagggaacacttcctcgtccaaagattcaggtttccaactacgacggtgtaatttctgccgagctgcaggccaatgacgatctgattggctgcaaaatcattcgcaagatgacgctggcacgttttctggacgcggtgaactttcctgatggaaacccgaccgcagacccaagtcagcattttgctgatgaaatgtggttcgtcgaacagaagaccctggagacgcaccagtatgtcgaattcgagctgtccagcgtcttagatctgatgggcgttcaactgccgtatcgtcagatcatcaaaaacagctgcccgtggaaatatcgcggaacagagtgtggctacaccggcccatatttcgacaaaaacaaccagcaaacctctttggccggcgccgactactgcaccaagcgttacgacgcctgtaatgctcgtcgcaactacttcgcgaatggcgttattcattttggcggatttattggggcgacacgatatgagtaaccagacgttacctgagctgggctcagaagtcatgcaggatatctatcgctgcgctatccaacgttacccgaatgaagcgtgtggctttctggtacgcacacagggtgagaaatatcgctttatggaagcgatgaatgtctctgaaacgccacgtgaggattttgtcatgcgtgccagcgacattattgcggccgaagatgctggggaagtgatcgctatttggcactctcacgttgagcgcagcgcagaggcgtcagacccggatcgctccgggtgcgaggcgacggaactaccgtggatgattctggcaattcgcaaaaatgtggaaagcgatatgccattccaccttagcgaaatgaacgtcatttatccgtgtggttttgagatgccctacctcgggcgcccatacgtattcggtgtgtttgattgctggatgctgtgccgcgattacctaaagcgtgaatttgacgttgagctgaatgcaaacgcccacctgcatattccttcctggtacacgggggacaacgacatcctcgaccagaactaccgaaatgaaggacttgtccgcatggcgccggggacggaaccccagcgcggcgacatcttcttcatccagtacgggaaaatgccagatcactgcgcggtatacatcggcgacggcatgatcatgcatcaccagatcgaccgtctcagctgtcgggcttattacggtgggatgtatcagaagcacacgacgcatcacctgcgtcacagggatttactcaagggagacgagacgtgtctgaattagttcatgttcagctcggcggtgcgatggcaaagaactttggccgccactggaaattgaaggtgcgcaacaccaaacaagccatcgatttgattgaggcgaatcgcccgggctttaaagcctggattaagcgtaaccgtaaccacttcgataagtaccacatccaggtcacaaataagcagggccacaagtggtcaatggacgacaccgaataccagatgatgggcgagtcggaaaatatcgcaaaaatccgcattactcccgtaccacgtggcagcggtggtaaggcgtttgggtggttccagactttcgtgggcgccgcgatgatcgctgtcggcgctctggcctctgggctgacttttggtgcgtcttccgcgctggtaatgggagggatgtcattgatgatgggcggtgtgtccatgctgatttcgccgcaggcatcaaatgcgtctgtcagacaggcggataacacggattcgttttacttcgatgggcctcaaaacaccagcaaccagggaaacccggttcagcttaattacggcgaggaaattttagttggctcacagattgtgagttcttcaatcaccatagaccaactgtaagggaagttttttgaacatggatcagttcaagaaaaagagattgcccctcctgattgcgggagcgggcggcaaaaagagctcaggctcaagccgtacaccagttgaagcggatgataccgttaattctcgcaccatggcgtctatcctcgatctgctcggggaaggtgttgttggtgggttgattgacggtgctaaatctatcttcgtcgatggtgtggcgctacagaacgaagacggttcattcaaccgttccggtgtaacttgggatttccgggatggttcgcaagaccaaagcccgatgcctggtttcgattttgtcgaaacgccaaaggccgttaatacacagctgaaaaccacaaacgcggttacggttgccatcgataacgacgatgctgatcgtgtccgagtgatcatgaagttcccgtcgctgcgtagcattgacaagaaaacaggggacacaaacggtacttcggtccagtttaagttccagctggccaacggcaatggctctttctatgacgtgattgctgcaggtgagagcagctctgacgtgacgctgactgcgaaaaagactggtgtctactaccgcagttacgaaatccagcttccaaagcctgggcgtgcctataaagtgcgcgtgcttcgtctctccgccgacagcaacgatcagtatctctttaacgatacctgggtcgactctatcggtgagatcgttgacaccccaatgaactacccgaactccgttctggttggccttaaggttaactctgagcagtttggtagctctatgccgtcacgttcgtatcttatccgtggcctcaaaatccgtgtgccttcgaattatgatgaaaacacgaacacttataacggcgtttgggatggaacctttaagcttctgtcgtcttccaaccctgcatggattctgttcgatctgctgaccaatgctcgttatggcctcggcaaatttgtttcggagtcaatgattgaccttggccagctttatcagatcggtcgctactgcgacgaagaggttgatgatggctttggtggcaaagaaaaacgctttgcaatcaacacccagatcaccagtcgtcaggacgcttatcgtctgattcaggatattgccggcgctttccgtggcatggttttctgggctggtggcatggtgaatatcatgcaggacagcccgtctgaccctgtcatgctgtttaccaacgcaaacgtaaaagatggcctgtttacctataaaggctctgctcgaaaagaccggccgtccgttgcgctgattacctataacaacaaacaagacggctataagcagaacgttgagtatgttgaagatcaggaagcgatggcccgatacggggagcgcaagaccgaggccgttgcgttcggatgcaccagccgtggtcaggctcatcgtgtaggtttgtggctgctctataccgcgcgtatggagtcagacatgatcacctttaccgcgggcctggacgcctcgttcctgatgccgggcgaaaccgttctgatccagaacaaatatcgtgccggcaaacgcaattccggtcgcatcgtctctttcaccaaaaacagcatcaccctcgatgcacctgtctctctgaaaaagagcggtagcttcatccgtatcatcaatcaggaaggcaaaatcgttgagcgagacatcaacgagaccggcgacaacatcactaaagttaccttcaagacggcgttggccacagccgatcaaccagtagcgaatggtgtctggacgatcaccgaaccagacctggttccaatgcgggcgcgcgttgtcgctatcgcgcaaggtgaaaccccggggtcgtttgatatcacggtggtgcagaacaatgcatctaagtaccaggcgattgataacggggcagcgctcgttccagaaaatacgacggttcttgatcccacatattccaaaccgagcaatctggtcatctcagaaggcacttatctgtccagtccgggcaacttgtccgtgaagctgatgcttgcctgggaaggtaaatcaccagaatactgggtcagctggcgccgctccgacgagggcaacgtctccaactggcaatctgcccgcgccacggaagaacaatatgaaatcgtcaatgttgccgaaaatgggcgatatgacttccagctgtattccgtttccttcggcggcaaaaaatccgagatcattactgctgtctatcaggtaaaaggcacgatgacgccgccaggggcgcccacatcactgaccgcggtgggggattatcgtaacgtggtattgaattgggttaaccctgattcagtcgacctcgcgcagatcaacgtgtatgcgtccaagacaaataagctggacaccgcgacactcattgctcaggccgccacaacgactttcactcacgctgggctgggtgacaacgagacctggtattactggattcgtgcggtaaacaaacgtgggatggtaggccagccgaactcgaacctcggtacagaggccaccactcgcgacgtattgtctttcctgaaagataagatcacatcttctgaactcggcaaggagctgctcgacgaaatcgacagcaaagccactcaggaggcggtagacaacgccattggcgaggttcagaactcagtcaacgagtctatccagcaagttgaaaacgatctggcgcaaacctcctccgaaattaaggcgcaggttgactctgtcaatcagtcgctgaaagaggacataaagaccgtcaatcagacgattgttgacaacatcgataccgtcaaccagacgatcaataccaacatctccaacgtaaacagccaaattgaagctgcaaaacagtctattaaagacggcgacgcggctctgtcgcaggagattaagaatgcgcagtcatcactgacaacgtcgctgtcccagaccagcaaagatctgactgcggccattcagaaagagacgaatgaccgtattgcagatgttaatgatgcagccaagcaagcggccgaccaactgctgagcgcgaagaatgagctgaaaacctctatcgatagcttgtctgaggttgtgacctccggtgacgaaaacctcgcgcgacagatctcgcagattgccgctggcacaggggaacagtttgactctctgaaaatctggtatttcgaccaggacgctgaaggctggacggaagatgataatggctacacgccaatgagcgtcaccagcgatggctggctgaaagcgaacaatccgacctcaacctgtcgttcccctaacggcttgacgatcgatgcccatgcttatcgtttcattaagatgcgtattaaaaaggttggcaacccaacctggaacgccaaaatgttctggatcggcgctgatgaaaccggctggaatgctggtcgctccgtggttatcaatgaaccggaatacgatgacaagggtattgcgattctgaccctgcacgacattgagtggcgagattcgacaacgattcgtcgtttccgcttcgatttcacttcaggtcaggatgcggacaattacctgttattcgactggatcgctgtcggtcgaccgacgccgggcgcaggcatggccgcgttacaggaagagcagcaggctcgtgcgaatgcggattccgccgaagcgcaggcgcgcagcacattggctgcacaaatccgcggttcctctgaaagcggaaatctggacgacattcgctccggtctgatctatcaggagaaaaatgctcgtatcaccgccgatgttgcggaagcgagtgcgcgtgaatccttgcagactgaattcaacagaaacaaagcctctgttgcagaagagctgcatacgctgtccactgaacaagcttcccaggcaagcaagattaccgggttgcaaacaagccttggccagaaggccgatgccagtgcggtacagacaatttcccagaaggtcgaagagcagggcaacacccttaaatcacaaggggcggcattgtctacgctggataatcgcgtaggaagtgttgagtctggtgtatctgcgaacagcaaggcgatcacgggtctgcagtcgaccgtaacacagcaggataaaacccttagcagccagagtgaaagcatcaccaccctgaataactcgctgagcgatatccagagcgataccgatactgccaaaagcaacccgagcaatttgctggttaacgcctcctttgagcgtgacctggcagggtggtctgcagggaacagcgtatccagtattatcaaggcgagtgcgccccattctggtagcaaaattcttgtttgcgccgccggaacggtgcaaatcacgcaatctgtaagcgtcgtcgaaggacggacatacaagctgtcctcttttgtgcggtgcaccactgatgcggtgatcagcagccctggcaacaacaaactgcgtattggcgcggccacgttgctcaaagagattccgatccgtccggagaatctgcccaaagatgaaacatggaaagaggtctctgatacctggaaggcgacgctgaccggtaaagttgacgtatcgatcatgtcttctctcaaaaccggttctcagtacttcgatgatgttggttttgttgacgtcactgatgctctggcgattgaggcgaacgccagtgccaccaatgctttgacctctcgggtatcgtctgttgagggcaccatcacaagtcaggggcaacagatcacttcgatgcagaacagcatcaagaacaaagctgacgcctcagctgtgactaatctgacaaaccgcgtaactgctgccgaaaatcagatctccagccagtcccagagcatcaccagcctgtcaaactcgctggataacgccaatgctgatgcggatgcttcgaaagcgatcatcggcaacatgctcaaaaacaactcttttgaacgtggtttcgaaggttgggagtatgttggttggactctgctggaggcccaaaaccccaaatcggggaaatacatcatccaggcgggcaaactggcctctggcggtgactcgggctgcaaccaaacgatcgagctgcaggctggcaagacttatcgtatcggcgcatgggttcgcaaatccgctgacttcaccatcaataatgccggcaacaacaagattagtcttcgaaacgcagatctgacgccgttaaaggatatcccgatcactggcgccgggctgtcgactaactgggcgcttattagtggcgagtatacgccagccaaaaccgcgagcgtggttgtgtctctgcgcgcaagtgtcgcttccggctatatgtatctcgatgacgtcttctgcgttgacgtgagcaatgagaaggcgattgatgcgacgtccaatgcgttatcaaccctcaacagtaccgtgacccagcagggaaaagacattacgtcgaactccaacagcatcacttcgctgtcaaaccagatggttaacggccgccagaacatgtgggtgcgtagcgtatacaacgtacaactggcgaacaatgccaccgagccgacctttagcgatatcaacggtaaggcgccaatctcgatcgatgaggttcctgacgcggcaaaactggactttgcgagcgccggcagttacgtgatcgcgcattacaaagccttcgtgaaagtcaatgctgataccaccatcactatggcaccagggtctcgtgtttttgatgatacgggcgccgtgtacgtgaacggtgttagggttgcctttggtaatgcgagctggaatacggttagctttgatctgaaagctggctggagcacggttgagttcctggtgaaccaatggactggtcaggcttacattaacctcggttttaaactgtccgagaaggtagcccagctgaattctgctcttgggatgaacgcgctttcgaatgccattagcgccgtcacctcaaacgtcagcaccgtaggtgatcgcgtcacgagcacctcacagagcgttactgacctgcgaaatagcctcgaacagaccaacgctaatctggcgaataaggcagatgcacaggcgctgtctacgctgcaaaatacggtctccaagcagggggatacgatttccagccagggtaacagcatcacgaacctgaataacaccctgaccgctgccagaaacgccggtgacaacctgatcccgaactacgatttcctgcagggtgcaactgcgtgggatatccagtatccggcgggcgttactttcggcaactttggtgatggtaaggctggggttaagctgaaccggacgaccactaccagcccaggcatcttctccaacaacaacaagccgctgccgcttaatggtcagcgcaaatatcgtgttgtggttaaagccaagggcgtgtccggggcgatgaacatgttgatccggcgccagaataaaatcggccagaccgacagcaattatgaagataaaaacgtcacactaaccagtgagtggcagaccattacctgggagactggacttactgcctctaacgctgatggccagaactttaagctttacgcgcacccggctaatgccgaaatctgggttgatacctttaaggtctttgatatcacggatgaggtgaagatcaaggctaatagcgatgcgctgtctacgttgtcgagcacggtgacgcagcagggtgacaagatcaccagtcagggcaacagcatcactaagttgaccaatgacctcgaagccgctgacgcaaacatcgcgaaaaaggccgaacagtcggcagtcactacgctgacaggtcgggtagagaagacggagtccggtctgacggcggcgaacagcaacattacgtcgctcaacagctctctgaaccagcaatccaaacgcggcgctaatctgcttcctgatggcacttttgaaagctacgcggttggccacaatctatcaaataatcgcgttatcgtgaccactgatgactcgcatggcggtaataagtgcatccgtgtgacgcgtccgaatgattacaacgctaacgcaactgataacagcgataatcacattttcagcggtttccaggtacgcgataacgcagtcttctatatggaatgctgggttaagcgggatgccaagagtaccgctatggccgagaatgcacagatctccattggcttatcgctccagtatcaggacaactcctggcagtggccggcagttaccaaagcggcaaaggatctctcttcaactcaatggacgaaggtttctggttacctgaaatcaacgaagagcggtattaagcaggcaatggtcaggatttctattcctaacgttagcagcgttaaggcgggtaactcattcctcattgatgacctggtcattaccgaagtgactgatgcctacaatgcgcaaagtacagcagacgctaatgccaatgcgatttcgacactggactcgaccgtctcccaacagggtgaccagattaccagtcagggtaacagcatcaccaaactgacaaatgacctggcaacgaccaataacaacgtcagtaaaaaagctgatcagagcgctttaagcgtgttgtccgggcgcgtcgatcaaacagaatcgggcttatcctctgcgaatagcagtatcactgcgcttaattcatctgtacgcgcagggaatgcgacaagtggcgatttgattagcaacccgacatttgacccagagtttagtcagatgggcttcactgtggtttccagctcgtctgagggcgtgccagccaattgcccatacgcttatgttgcacgcattgcggctcgcgaccatcacccaaattttgctgctattccggcgacattgggggatgtctatgaaatgtctgctctcgtcgcgtgtggcactggctccgctgatttcaacctgtatctcggaaccgcaacacggccaagcggcagcgtgggcgcgcctctgtcatctggcggcaaccgcaaggcgtcggccacatggcagcgagtaacctggcgtttcaaaattactcaggggattgtcgatcgcggcttcttccgtccattcctgcaaatcaaccagtccagcccgttcggcaccgtctggtatgtgaccgactggcatctgcggaacgtaaccgactcctccaaagttcaggattctctcgatgctacggcgaaagcggttgattcgctgacctctacggtaaatcagcagggggagaacatctccagcattggtacacgtactaccaatcttgagaataatttgagaacaacaaatgcaaacgttgctcaaaaagcggacgccaatgctctgacggcactgaccaaccgtgttacccagaccgaaaaagacattaactcaacgagttcttctgtcacgaatctgaacaataaggttgatgcgatttctgtcggcggtacaaacctgatcaagaactccggcgatatgaccggctggtcgaacgttgtcagcgatacgtatcgtggtaatgcggtaattggcgcaactgtaaaagccggctccggttacaaggatctgcgggaaatcacgcttgagtcgccggtcgatgcaggtgagtacgtttacagcttctatgcgaaaggcggcgttactggccagacgatgacggcgttcttctacaatccgaacaccacaacgtctatcgagaccaaccagggtgcgaaaggtagcaacagtgatggccgtgcgcagttcacgctgaccacttcatgggcccgctattgggttaagtggaaacagacacctaccacgggcaccaagcgcctgattctgtgccgtatcgagagcaatacctccaaagaccagacggtgtacatcaacagtccgaagtttgaggtaggtaacgttgtttccgactggaacgagtctccgtctgatagcgccagtgcgtcggctgtggattcgctgacaacgaaagtgaatcagcaaggcacttccattagctctatcggaaatcgcaccacatcgctggaaaacgggctatcgacagctcaaaacaacattgccaagaaggctgatgcttctgcattgcaggatctccggaacacggtgacatctcagggtgacgatttaaccgcggcgaacagcagcattaccagcctgcaggcctcgatgaaccgtcgcactgtgtttactgtcactgcacggggtaatggcaacagcgttacccatggggtgtttgatgaaagcggcaagaatctgtttacccctggtcgcagctgggcgctggtcacttttgcaaaacacagcgacggatcaacggtgattgcgacctccaaaacatacgatgtttttggcagtgcgaataatggtgccacgatgtcggctgatatcgaggcgttggccagtggcacttacgtttgcgtcctgacattcgatgagccatctggcaaccgaggtaagatattgtctgctctggaatctcttggtggtacatccgaagtcgtcaactccttgccgtatcgtggtgcctacattctccttggccgcaaaggcatgaagcctggcgatggtctggaactgcgtgcgccaaccggtggcgacggcaccgcccacatttcgacctcagtcgagtttgtgaacggggtaatgatgggactgggcgccgccggcggtgtgatgatgaaggctgatgcgaacgcatctgcaattacaacgctccagaacacagtgaagaaccagggagataatattgactccctgagctcctcgacaacggcgctggaaaacagccttgcgtccagtaacgccagcgtggatgcagcaagccagatccccgggaacctgattgtaaacccgtcttttgagcgtggtacggagggctatacaggctggagcgggattgccacggtggtaacgctgcaggttccacatcttggcaccaaagccgccaaactggcggcgggtggttctgcaggcgtgggccagaagatctccttcaaaaaggatcggtcgtacaaaattggtatctgggcaaagcaggaccctaataccaccattcagtcgactgacaacacaaaattccgtgtggcagaaggtaacggtctaatcgcaagtaaggcttatggcccgtttacttcgaactggcaggaagtgtcctggacctggaaggcgacaaaggatgtcgttgctgacgttcagttcactgctttcttgtccgcaggcgcgatgtactttgatgatttttatgtcgtcgatgtgaccgactctgttgaaactcaggcgaactcgagcgcgatcactaaactcgatagtcgtgtgaccaagacagagaatgacatcaccagtcagggcagccaggttacgcaacttaagaatgaccttgctaccacaaacacaaatgtttcgaagaaagctgatgcggctgcgttaacggcattaacgaaccgcgtcacgcagaacgagaaagaaattgaaacccagagcagccagacaacttcgctcaaaaactctttgagcactgttcaggcgatggggagcaacccgtggtttgatggttctctggagacgtactccgaaaaccagcagatcagcggctcgcgtgcggtcgtcgtcagctctcagaaacgaagcggaacgaagtcgttgcgtgtttcccgcggcgccggtgagggcggaaacagcgataaaaccatcggtaagtggattgctctacgtgaaaatgcggtattccgcattgaactctgggcgatgatgccggcagatcagtcgccatcctctgggtggtcaacgatcgttggtttgcagacccaaaacgctgccaacaacaataactggccgtcggcgatcaccatcactgaaggttcgttggggggcagagggacctggaagaaattcaccggcacgctccgtgtagcgactggtcacactcgcggcgtgttctggatttctacccgcggatcaactggcgccggtacgccggggtatgatctgtatatcgatgatgtagttgtcaccgatatcacggacgcaaaagaggcacaggattcggctaatgcgaacgcatccgctctcaccagccttacctcacgtgttaccaatgtggaagggcaggtaacatcccaagcgtctcagctgtcctctttgacgtcccaggtgaatgatgcgtcttcgaaggttgatcagatggcacagaccattaccaacaacgagaaaacgcagtcgtcgctgaacaccagtttgcaatcgcaaattgacgcgcaggcatcggcaaacatcaaaaaccagacggagttgaataacgccaccacctctctggcggcaattaagtcaactcagcagacccaggccacaacgataagcgcactgtctcagcagcagacgaatttgacagctcaggtaggaggccagtcagccgagcttcaggagctgaagaaaacggttgttgaaaacggcaacgttaacagcacctggatggtcaaaatggaaaccaacagcaacggtaaaaagtatgctgctggtatagctttaggtatcgatggcaaaaatttgcagagccagtttctggttcaggctgatcgcttcggcttaatcaatacctctaacggaaacacgaccacaccatttgttgtggaaaatggcgttgcctacataaatgccgctgtgattaaggatggctccatcaccaatgcaaaaattggcggtgaaatccgatctgacaatttcgttaacggttcaaatggctggagaattggaaaagacggtagttcacagttcaacaacgtagttattcgtggtgaagttcacgcaaatactggtgtgcttaataacgtgactattaacgagaactgcactgtgcttggcactgttcaggccaataaaattgttggtgacgttgtgacaatgaccgaccgtgttgttaaaaactggccagcttccgggaatacctcatccggcacgcgctacctgattgcaacgattgacggtatgccctttgaacggcgtatggtgttcaatggttccgttgcgattgttcaggtatggcgtcagaacgtaacaattcgcgttgatgaaacgaccgtttggacttttgactctggaaacgatggtaaggactttgaaacatcaatcttctcaatccgtatcccggcgtcaaacttcggtcaacgtcaccagattaccattcagtggccgaaccgtggcgatagcggtcagttccggtttacaggggttgtctcgatgtacagaactactggctccatctctctggcttaagtttcaggcggctctttgagagccgctcattaaaattacaaggaatgtaattatggcaatgtatgaagttggcaccgtaacgggtgcagcaaaccaggcaaaggttactggtatttcaacaaagtggtcggagcccgcacttggtattcaagagggttcaattttagtcatttatcgcaatggaagtgctgatctgtatgccatcaaatcagtaaataatgacactcaactgactttgacgagaaacatcacaacagctttttctggcgcgaaatatggaattatcacatcagaaacagcgagcacttcatcatttgcaaatcaactagccagcgcatttaccctttggcgtaacgttgttcaaggatggtctacagcactaacaggtagtggcaatattacgatgacagaccctataacaggtacgcaggtgaccgtaccggcgattgccgggatggcaaaggcctcggatctggatgcgctggctaaactttcagggggaaacaacctcgccggctcgcaaattataaccagcgatagttccggttttattttgggcaggaacaacgatattggactggtcaaaaaatcaggcacctacggaaagctgatggtaggcagcggaacgcgcttcagcgtggtgaaggggaataagtcgactattagccctgaagatacccagacggagattatgggggtcgatagtgccggcaatatgactgttccgggcaacatcagtgcggggaaatattttgcgcaggcaattgagctttcgatgagcactccgtacatcgattttcatcataacaacagtaccaacgactacactgctcgtttcataaccacagccgctgatcaactgagtgtgcaggggagccatctacgggtagacagagacctgcgggtagggcaagcggccgacatcggcagctggatacagtgtcgctatgactgtgtgtcccagcagaccgacttcggttcccctgccattggcgcgttagtttccggtggcagagtccggtcccgcatgacagggcgtggcggaaacggcgacacgtctggagcgtggggtggtttctacctggaagaatacgttgggtacaaccaccgggtggtactgtatatggacggttttgacagaaaagatgcctggctcttttacaccggtgggacaatctccacacctaaaggcgatgttatgaccactggctcagacgtgcggctgaaaaaagattttacggattctcagaaaggggcatccaagcgtattaacgcgctgggggtatgtgagttcaacatgaaaggcgaaacacgccgtaggcgtggatttattgctcaacaagctgaaaaagtggacccgatttacactttccaaagcggtgatgtagaaattgatggcgagaagatcaatatccttaacgtagatcagacagcaattgtcgcagacctggtaactaccgttcaggagcaatgcaactgtatcgaaaaacttaaagaagagctcaaaaatctaaaggatctagtgatgcaaacgccagaaacagcagcataaaagcaatcgatattgtatgtaagtacttacctacaattaatttctaatttatgatataaatctgccatccgatttgacttattcatggaggaagacatgtcaaacgagatggcaggcgtgacgccagagcaggtggagcgcattgccgcaattgtggcgcgagaagtcgtaggaaaattaagtaaggagcttcgcgatgatattggccaggaggtcaacgatcagctgcgaacctactttggtgatatgactccggcgcaacatagcattcagcattccaacctggacaaacttcttaatcggctcgacacgatttcaagcgggttctttgggggcattatttccaagattacctcgttcctgatcaccgtgctgcttttgggtttggccgcttatggagtgaaaaatggactgcaataacaggagaacaaggatgagtactccaagaggcattcgtaacaataaccctggtaacctggataaggggtcgccgtggcaagggctagtaaacaatccggcggaaccgcggttctgcacttttaaagaccccgtatgggggattcgagcactgacagtaacgctcatcacctaccatgataagcgccgcgcaaaagacggttccagcatcgatacgatccgcgaagtcatcgagcgttgggcgccgccgcatgaaaacaacacggccgcatatatcaatgaggtctctaaagccgtaggcgtgacgccggacatgatcatcgatctgcatgactacaatactatgcggccgctggtggaggcgatcattcgtcatgagaacggtcgtggccctttgaaaacactcaacagctggtattcggcagaagttattgacgaaggtatgcgtcgcgccggcgtcgttaaaccggtaactgcagtgaaagcagtacccgtcacgaaagaaacagccggcgcaacggtgactgcaggtatcggtattgcgcagctgacggacgtaatgccgcagatctccgttgcgatggataaggcccagggacatatcaccagcggggataccgttcgcattatcttcggtattgcgaccattgttgtcgccggctttattgcctggtcgcaagttcgtaagcatcaggcaggagtggtgtaaccatgaacggcagcctgctttcaaaggtcaaatcgaccatcatgactttggctgccgtcttctttgtgctcgttggggcgtacacctggggtggacgcgctgcccggcgggccatggaagaaaaggcgcagagagaaaccaacaaacggcttcaaggcacagtggatgtgaaaaatgagacgattaatgaactcaggactaaggatgcttctgccgttcatcgcgagcttcgcgataagtggatgcgtgattagacctcagaccgtgggcgtacaattctgtgatggggcaaaccctatctacatcagcaaggacgacgccctgacagaagaaactgagagggaaatcctgatccacaacacgctgggtgagcggctgtgtcgttgggggtacgcgaagtagcacatacgccgcgcggacataattagcgcggccttagtcatgaactacaagatgtcagattttcacgttacttatctttaacccggctttctcctgtaactcagtaagtgctaagacattggcagggtggcgaaaaaaattgtatgcattcacggccacagactcgtttaaaaaaccatggcttagcagagagtccacgctggcatcgtatagcgcctcaagagaattgaatttctctgccagcaaccaagcttcttcctcttcaacaccgtagataccgcaggcgaaaagaagcgggcctaagcgaacgttttttgctcgttctataccctcataaattttcctagcctgcttcaaaccacctctgtcgataccaatcagcgctccataacctataaagaacatgtttagtggcttttgtattagccttttctctacgagctgcttgagagttttttcccctaattggtctatatgtactcctcgaggctcgaagaagcgccagcaagcagagtatgggtttcctgagttcagaaggccgtaagtgttttgggtactgcttagctcaatgctcatagtgagtactcgacgaaatgctagacgctaatcgtggtctatgttcgcacgatcaaggggttggcatattaaagcactcaccacatccgaaactacggtattggtcaaagaaactcgtgaccgtcgccaaatgcctttcatttcacctttacaccgcagccgtaggcatttaggctatatcgcatataagaaaacaagttgtttcatacgacgataaatcacacgtagggatatcacgaatgactcagatcattgtggtgggcggcaccaagggtggcccaggcaaatcgactgttgctcagcaaattgcagcctgtctgaaaatcaaaaagaaaaagaaagtccagatcactgatatcgacatccagcgcaccacgacagggtggtgtgaagaccgccggcacaatgaagaactggagctgatcccgttcgcctatgtccaggatgacatcatcaaacacatcacttcgcttcgcggccgtttcgattacgtcgtcgttgacgctggtggtttcgactccgaaattcagcgccaggctatgctgatggccaacgtgatccttatcccgcttcgcccgaaacgccgcgatctgaaatccttgcgtgacatcgaccccatcgtcgacagcgttagcagcgtgaatgaccaaatcaaaatccgtgctgtaatgaaccagtgcccgtctctgccctcccaggctgcgcgcattatcgctgcaaaagaaattgtcgaaacctttggtatcgaggcggtgccggtgaacctttacaaccgcaacgtctatgacgatgccgaagaggcgggtcgttccatctttgagatgaccggagccgaacgcgacaaaaaggctgaggccgagattgaagcattagtagaatacgtaatgaccttggagggtgaataatgtccatgaaaatgggtgatctggcaaaacgtccggctgcggaagctgctgcacctaaaagcagcaccccgatgcgccagcctgtccgtccacaaggccgtccaacacgtggcaaagagaaaatcaaaagccgcacgatgtctcttgaagacgagtatttcgaattactggagatgatgaagttcatccctcgcttcgagaagttcacccgttctgatgtgatacgtgcagccattttccatctggcagagaagtcaccgcaggaaattgaggacatcgtaaagatgaacgaagcgatcaccgctgctgatgtgacgatgcgtactgacgaaataaagcgcgagttgatgaagaaaggctgatataaatttctaaggctgtctatgcaggccagccttagaaatacaacgttctatgacagttattcgtagttaagttcaccgaacaggctgaacatcaagtcaccatccagaatttcaaatggcagctcaacatactcatccttatgcctcggaatcgctttgccgtcgtttggggcgttcttggtgtagccttttacatgctcaccgttttcctttgtatacggtagaacgactattcgaccgtgattttttgaaatgatagtaccttctttccagagcgtattgcctcttgaggtaatttcgctgtcatttgcttctttaacactccaacctatctgatttatgtcttcgaaccagaaaacaaagctgccaacgacgattatttttcgtccattccggagagcctcatccagcattctttttacgctggcgagttgtagtagctggttggcacgtggcagaagcattgagcgaatagtcgcttttgttttgccccaatgtgcagtgcctgataaaccaaaccctcttgcgatacgttcctggtagcaaattttggatgattttgctctggggctatgcacttgctcccaggtgttaggttctgttagtctgaaacatgtctggaaggtgggtaggaaaatccaatgcaagtaaggcatctcgtgtagtatgtctagcagatagggacgtacgattaacccttcaggtttgataattagctcatctgatgacaaacgtcgatcgttcgtgtgtcttctaatggcctcatttagcatcatatgctcctcatccatcagtcgcgattttgagatgagcgccttatcaatttttaagcgtagtgattctctttgctgctgagttaaagatagatcatctatattgaaagctatgtttttatttagttcttccgccgcttttcttgcatcaagatagctatcgtagacgtcatcaaaggcgaggtttggcatacctcgatcaacatatcgcctataccaagccagagttccatcatcacgaagtttcagacagaacatagaccaattatttcgttcgtatttaggctgaggccagaaagccagctcgggaagaccatatccgggaagtttgttcatgcgcatattgataatactcacgaggataaagcgctgattttaacatggtcagccttggttaatcagtcagttctgtcagtaacatagcatctgggaattaaatcaaattatgtgattctgggcatctgttttgtagcctgcttttgtatataaatactaagctacatattatttatatggagacaggctttttataccaaattcccagacacattcccttccgtttccacttccaaaaacagtaactagtcgctatgatcagccaaatgttaagtaagtagttacctatcggtgggggcatgagccagatcttttttgataccataaacaacggccagtacgacttcatgacagagtgggacacggtcgctatggacaagtgggttgcggaaaacatcggtctttcacgatgccagggagaggctgagctctttgatacaaagtggtttgactatcgcgacatgcacccgctgatggcaacctgtctgttcaccgaagcctataagcgcgcatactcacagatcatgctgtctcatggccgcgagcatttcgagacggcgccattcagtactggtctgaaacgcctgccttaccaagagctttcggcggtgaacaaaacctctctctggaaagctcgccagtttgcagatcggtattgctgttcttatgactattttatatcaactgttctatctgcagctgcacgccggctctgggacaaattacctcgccctcagcatctttggcagccagaactgattgagatcttcgaaagcaaactcgccaatcgtgcgggaacgcgtctggatgactctgtcgtgagttttaagcacttgggagacatgcagcatgacccaattcaggaacgttactttgaatgggttctggagcgtttgaagcacatcacccgtgataagcgtatccgcaccatcttctctgctgtctggttgatggagctggtgcctgagcgcgttatatatgcccattacccggaagaactggaagaagcacggcgactgtgttgattgcctgctccatatttttacgattagaaaacaacttgtttaagcaccaaaggataacaaacacatgaccgaactttgccacacgggacgagggttgtctgaagagttcgacgacgacttccagaatcgtctggcggcgtatttttgccgcgatcatgagtttctgactcgtgccggcgatctggttgcccccaaccaattctccaatgcggcgaacgccatactggtgaacatggtatcgggctatttcagaatgtataagagcgcgccttcatcggcggccatcctcgatatgttgaagcgtgctaaacgcgataagacgatcagagaagagatgttcccggatgttgtggcggcgtttaagcgagtgctctcggaaaaactctctgatacggcttacatggtcgaccaggtcgcgacgttcgctaaaagtgtagcgttcgacgatgcgttgattaaagcggccgagatgaaggagaagggcgacttccagggagcgatggccatcatggccaaagtgcagcagatcggttctaacgaagcgacgggcatttatgactattacgcctctgcagcggaacgttacaaggcccgtgaatatgaagcctctgatgattacgtgccgaacagcatcaccaccggtcttccgctgctggatcgtatgctctatcaaaaaggttgggcgaaacgtgagatggtgctcttcatggggtttgcgaaatcaggtaaatcgacagcgatgggggagttctccattaacgcaacgctggccggctacaacgttttgtatctttctctcgaagtgcatacctcgattctctccgatcgcttcgatgcacggctgtctgaaacggagatgtcaaagctggtggagcagcgtgacgacgttcaccggaagctcgcggagcttggtgcgacgaaaggggtggggaatctgtgggtggtcgagcgcccgtcaggaagcatgtcgcctgcagatttggatcgtatgctcaatagcatgaaagcgaatggcatgatcccggatatggtggtggtcgactatgcggatttgatgcgtgccagttacgacctccgtgacgaccgggcgaacatccgttctatctacaccgatctgcgtgctctctacgataagcacaacgttgcaggaatcacggcatcccagaccaatcgtgaaggtggctcatccgaagtggccaccatgatgcacgccgcggacaatatcgaaaaagtccgtatcgccgacttagtcatcactatcaacaagactgaagaggaagaagccaaaggcgaagcacgtctctattttgctggttctcgtaaccagaagggcggggtgagtattcgcgttaagcagaacctcgaacagatgcgcttcatcgagcggatcatggaggttctttaaaaaaataggcgtggggcaaagacggataacagccccacgcccttaaaaattaccttttggttaatcacaaaaggaaaaacacatgagcctttatggtattcaaaaaacgcggcttatcaagatattgccgtttaaaaactgcggtaaatgacaatgagtgacctcaaagagttactgtccgagctggatttcgaacaatggctggatatggaaggcatcatctatcgtcgcggcggtgtaagcgcccgcggccgcgaagtgaatatcaaagaatgtccggtatgtggaagcacaaactggaaggtctatttcaacctgaccaacaacgtcgggaaatgcttcgccggcgatcacccagaagaaattcaatttaacaagctggttttcctcaaacactacagcggtaagtctcgtcgtgccttcgaggaatacgtacataacgcactcctgtctcaaggttgggcgccaaaaaaagaagaggttgtgctggccagtgctgtggaacttgaaggcccgatggctttaccgcggcattatgagcttccaattgacggtcggctgccggactatcttgttgagcggaacattaccccggagctggccaaatactttgacctgcgttactgcgtcgagggaaaacatgcttatgtcgacccatataccgatcaggttaaagggcaggcattcgatatgcgcatcctgataccgatttacgatctgaatggggtgatgaagacattccaggggcgtgacatcaccggcgcagcagaacgccgatatctctttccaatgcagctgccggcatccgggaggtttctctataacggacataacgcagttggaaagcaaacagtcgtcgtctgtgagggggctttcgatgtcatgggggttaagcgcgccatattcgacgaagagacgctccgggactacgtagagcccattggcacgttcgggatgcatctgtccggaaacacgactgtagacgcagaagaccagctgggcgcgtttctgtcgttaaaggcagatggtttgcgaaacgtcatcatgatgtgggatagcgagaagcaagcgatccgaaacacaatggcggccgccagacgattaaccagtatagggttaaatgtgaaaatagcctgtcttggagaagaagggctagatcccggggaggccacccaggaacaaattctcaaagcctactatcgtgcaaaaccctactctaagcagctggagctgcagagcaaggttctcggtattagtgcatttaaatagttcgactcatggctgtagttccatatccgtgtcggaaataccataatttgtttatgtatgtaggtatctacttaaatattttaatgtaataaataacactttggttatggaggacatcacatgaaaaaaggtatcgaacaggcagttttagagatgatcaagaagtcaggcgtagagcttggcgtgggcgagctggagagcatcatcgatgcctcattcaacacggcatcagagcatatatcgaatgcgctatcctgcattcctctcaaagaaggggcgacacatacctcggtgttagtgtggtacgcaaagacgcctgaaatgcctggtactgttcaaaagcgcgtagctctggttgcgttcatcgtcccgtcgcttgagaccggcattgggccagtcgcgcattttggcgcttggtatgacgacaaaatcatcttctcaaactgctaccagatggaaagcagggaaatgcttgagcatagcgtggacgtgactctcatagccgtagaaagcaaatgcgagacagtaggagaggctttcgttagcgtcatgacttctcccgatgttgaaaagcgccatgtagatctggtggcaccaccaggcttgttggaaatgattgtctctggagattacaccaaggctatagcgcgtgttcgtgagctggactatgggcgtatctgcgacctgtgtcgtagtgatctggacttaatcaacgtgatcgttgaggctggccgcgtctgtgatggggtgttggcacaatacgcaagtaagatcagtcgtttggccaatgaaatgcctatgctgattcaggaagccaaatcccacgccgttcatgccgcaaacgacctgctaaccccttatcgatacgaagccgcaagtgacaagatgaccggctgggccacctggtaagccgtgactatgtactgtgtccccgtacagagttatttaaactgattagtaagtaagtacaagattatcgtttagagaaatggctaccaaaactgacttatcaaaaatcccttcgatctctggactcaacggctactcgctgcgttgcccggaagtgaagcttaacggacatgactcgtactgcagctacaccgtctgtcagcacacgatccttgccttcaaagagaagcgactgccggcgtcatcgttcacctcctgtgcgaacgccatttcggccggaaaatgccaggcgctgaaaatgatggtagaggaaatccggcaaggtgagtcgctgtatttcgtcgatatgccggcgctcattgaagaggtggaggaacgaaaccgaacagcgagaaccctgcagccgaagagaggcagtgcatctatctacagtggaattaaagggaagcgccaatcttcgaccgtggctaaaactggcagactgccggatgccagcgagatttattcagaacttatcaaagaaaccttaaaggagaagaccgactaatggagaagctgatcgcgcttaaacataagctggacgccattaaaacaatgggaacgaacgccaagaaagaggcgctggccagtatggatgacttcgaacaaagaatggtgtcactcatgctgaacccgtttgttcgtttcggggtgaagaaatacaacgtggccgatccacttagcaagtccgtacccagtgatcagaaagcgatagagctgctggagcaactgattgaagcaggagaatactcatgattccatacatcatattgactttttctggaggcgtcgcccttggcttcatcatctgtcatgacttgatcaagcaggaactgaagaccaaaacacttcgtattggtaagcgggtatatcgcgtcgttcacgagacaggggtatcaaaatgagcaatctaacctcgtttgactggtggataggcttgtactttgtggcttctggtgtcgcagtagcttttacgattggccagtccctggtaaagctactgcttttaagattcgccaatcgcaagcgtatcgatgacacgctttggtgccttggaactctacttgaacagcgttacggcgagctgaaggaaggtgcaaccctttgcataaaggcaaaacgtttcacggccacaattcagcggacgcaggatgataagtcaaagctgatcaaaaaatgagcaaaagaatgcatgaaataataggtaattatttacttattattttgatacaaatatgattgacttgttttcgttgagacgcgactgtttgaacgtttaaagataactgcaaacgacaatcagtatctggcagtagcctaaaaagccaaacaccagcgaggtcagtttccagcctcgtcaccgaaatgggacacactaagcgagtgtgattgcaaaacgcaggtagggcatctggttaaccagtgcccttaccgatgaggtaacagaatgggcggttgggttttatgtccaacacatcccggctcccaaagacccgaccgtctatcctgttacgtcatttctgttacttatgtcgtttagttttgggttaaaaatggcgacgtaacccggctggttaggtgagccagcacgcaacgttgagaccactggtttttgcatcacagaggcagaaccggcagacatgtagggccaagtacattaatccgttcagtggtttcaacgttgtggtcacggtttcattatccttctggttatagccattgttgtcactgccccgtggccacaacgattaaatgattccatacatctaattagatctgaatgaaaactctcctcaaccctcggagagtatttgaagatcttggcttgtaagcgtttggtgaacacgtaaagcacaagtggcaggaaacggtaggactgctgcgaacgacaccggtgaatcggtgatacagccccacaagtccgtgaatcgacagaggctgacggtgtcaaccttagatggtgtagctcagtggtagagcggttgactgttaatcaactggtcggtggttcgaatccacccaccatcgccaacacagcgctgaacggtttggagttcgccaccaccatccgaacggaaagactccgcaaatgtcgccagaccgttcagcgctgtgatagacacggcagacgttcttaaccattgcttcttagcatcgtagcaacacttttttcagcgcaaataattaaaggggcttcggccccttttgtaagattagcaaaaaagaacaatattacttgaaaaaaaagacaaagttagtcaatttcatttaataacaccaatgtcataatcgaggaccttgctcctctgcttaattaaaccattacctgttaagtttaatttgaatagccaattctatcttttctctgaatttttttgcatttccctgtaagtaagggtccattcgtttgaatatcgatagaagcttcctacgatatgttaaacttgtagagttaaattcccccgttgttgtgtgtattaataatgcctcacctatatcattaatctgcctttcttcgagcctggtgtaacaggtgacaaccatctgtaatatggatacttttgagtaccccttcaatttcgggctaggaataacatgctctaacatagagcctaatactttcgtcgcttccttagggatatacctactatcctccttagaattattaactgtttttatatatgaactttgttctgcccaatctatagcaataccgaataggcgacatagaagatagtgatatggtgtttgatgttctgcgattgagtcaatactctgaactttcatttgatataatattttttcagcaaagtgtttgaaataatgcagccaaagatgatcttgcaatctttgatgaataccttgatgcaccataatttcgaacattgttattccagaattaataggacaactaaatctactttgctcacggtaagagccaaggggcttgtttagtatttctgataacttactgtcttcatctaaacgccagcaaacagattcacctatagctctatatatgccacttttacttgcatacactgagtcggcaaagaaaaagtgaagcaagcggttggtttcaggtatcgcaagacgtcctccagtacatgtattttggttatttttaagttctacataaagacgactaccaggtgagtcaagcagcgaattaataaatctatcaatgaaatcagaacgaacgacctcatcagcaccaataagcctcaaacaaaaatgaggatatgcaagtgaaagatgccttgtaagatcaggagaagttagtatattcagcaaaacctctcgggctttatcactggcttcataatttgatgatagcttttcacgcaaaggacttagtagggaatatagacctttcaccaagacatttcggtctttgggttcttctccattcaataacgcatttcgatcggagccgccatatagcttatcaatccattgaacaataaggttcggttttccattagcaagggatattatttcgtctaactgaggctcaactaacaatactaactcatcatattttttggtaagatgtaaactctcaattagctcaagaaatagttttattttacctcgatttaatgttggcgattttagccgaatgaaaagatatgaggcagccaagagaaacaatagatatactgcactcgaactatccaatccccatatccacggtccgaaactgtaatacagtccaacttgtcttaatgcaggtgcaaaaaccaaataattagctagtataaaaatcagcccaatgattagtaggtcccaccgagtcatacaaaaacgaaatcgcagtctgctggtaggagtaattattgcccatacggcagcgatcactccaagtatagtgagtaaattagtggtatctattttggctggtatcgtcataatattttcagtattcctttagtagacgcactggcaagcttaaactgtatcacatgaccgcttcatagtagtcatgattgaagcaaagcgcctatcctataataactaaaaaaactttattatccccctttaataccgtaaaaaactttgttgaagtcattatgataggtaggtacatacttatcttttttgtgtttctaatgtatagtactttcagttactcacttgaaaggactcaatatgggaaacaaacgtaaacagacgcgtcgcgcagctcgtcaggctctgaagtcaaaaccacgtatccacggctacgaaattgacacaatcattgttgacgaactggctgccgcccctgctctgcctccgaaaccgaagcgcgacaactctcctctcgaagcgcgaaacgaggcccaggcccactatctcatctccctcgataccaaaacgctaacgttcgccacaggcgaagctggctgcggcaaaacgtacctggccgcggccgttgcagcgcagcgtctacttaataaggaagtagacaagatcatcgtgactcgtccggtattgcaagcagacgaagatctgggcttccttccgggcgacatgagcgagaagttcgctccgttcttccggccagtctatgacgtgctacagaagcgtctgggtggctcgtttctcgaatactgcttaaagccagaggtggccaaagtagagattgccccattcgcttacatgcgtgggcgcacgttcgagaacgctgtagtcattctcgatgaggcgcaaaacgttacagcgtcacaaatgaaaatgttcctgacccgtatgggcgagaacgtaaccgtcattgtgaacggagatgtgacgcaatgcgacctgccaagcaatgttaagtctggtctggaagatgcactggagcgatttaaaccttcctcccatgttggccttattgagtttgcgaccgaagattgcgtgcgttctgagctatgcaaagtcgcactggaagcctatcagtaagggaaagccaatgaccaaagagtacctgccacaccagaaacgtgtcatggatgaacacgaagaactgtgtggccgcatcaaagaactggaggcgtacattgcaggcgacgagtttgctcgcctgctgtatgtcgaccgcatcatcctcatttagcagctggacacgatgaaggcgtatgacctgattcttcgtgcccggatcgctcgtttttaacgtaaggaaaccaaaatgaccgatatggatatcgaaaaagagattgtggccaaaggcaaaacggccgcgcgtgttaccccggaacgcattgaagctgttatctcaggcgagttttactttaccggcgcggacggatatcgcagctcaccgttgtggctgaagcaggaagagcctgaaccggccctgcaatcactcgaactgctgaccttctgcgttcttgtgctggagaacggctacaccgtaaccggcgagtctgcgtgcgccagcccggagaactttgatccggagatcgggcgtaaaattgcacgccagaacgcgattgccaaaatctggccactggaaggctatcttctcaagcagcagctgcacgaggtgaaatgatgaaggtcgttatctacggacgtgataattgctcatactgcaaacgtgcggtcgagctggcgaagcagctgaacggccacggctttggtgattacgaatacatcgatattgtgtctgctgggatcgacaaagagaagttaagcgacctggtgggcaagccggtggaaaccataccgcaggtgttcgtaaatggtgaacctatcggcggctatacagaatttgctgcttttgcgagcgctctgtaatacaatacggctccttttggggccgtttattatttgtcgctttcatcaacacagcgtacacttaggtacgagccatttagctgtaaagaggttttatgcatttagaaaattgcctggaagatatgaatgtcattagcaatgctcttgctaccgtgacttctaacgcttcacgcttttcgaatgcaaatagcactccgaaagcattcccgaagcgtgtacacacaaaatttaagatgcgtccccgtttcggcggcatcacaaggtcgacgaggcccggttttgcagattcccatgagttcagactgccgcaaacggaaggcattccggttgctgagagtgacaccgcagctcaacttgcggatattgaacaaaggctcgcagagctgacggcgaaacacgttaagttgacccatagcatttcaggttacagtgcggaacaaatccgcgaatctttcggtgaaggccgttacgaggacttgaagaacgttgacctgtccatacgtggtttagagggctttgttaacaagttcgtccgtgatgcagaacagccgcatccgtacctgaaacgcttgagtgatgctatcactgagtaccgtctggcagtttctgacctcctgatgattttaaatcagtgctttaacgaggtagaggttatcgaatcgcagacaggcctcattgatgaggacgtcttcgcaaacttctccttacattaaggctgaacgatgaaagtcacatggaacagtgatagttacgcccaatttttggagccggtcttcagagtaatgccagatctgaagacctccttacttgctgactttgtgagttttaagaacggcttttatccggccgtttttggcaaagatggcccctataccgaacctggttctgtagtttcctctcgtgtttaccacgttcatctcttattcaccaagcaagaacgaaatagtcaccgaaacaggttcaactgcacaagcgaccgcgccctcgtttatacccagcacgccaagtttcaggacgtgtatagtctgctggccatcttcccgaaagaggcgcacaaaacagccagtgatccagtcaaaatgagcgacatcgccaaatacgcggcagccttccagaaattaacaaacccgtagttacctgcagctccatgcctttctcattcgtagcgtggttctattgcgataattttcatattttttaggcaattaatctagtctttgcgcgtatgcataaatatacgagaaataacggtacagaaagcggcaggcaaaataaccacaaaataatgaacatgccatacacaccgctattcacgccaatgtgacgatcccaaaagggtttggtcattatcttaagggctagtttctccgaagtataatatgagaatgggtacaggacggcgcttaaaacaagatatgtaaccacaaatggcatataaggaacataggcaggaaaaatgagtccgtcattcatatcgcgcactataaaatagatcagatagccataaccacaccatccccataagcagtgccgtaaataatattttaaggtcatcatctatgattccttcatagctataccattaaagctatcataacatgaattgacgaagtcccccttcgagaccaagcggcatcgagacagccatagacgcaaacatgactaaactggcaccggacaacgatgggacataacgcaaagactagggtgatgtcgcaaacaaacaggcgggaaatggcacggccctgatgactaattttcaaaaaaaggcctttctatgattccatactttgtaggtatggaatcattagacaaaagagggtattttaggttgatctcaataaaaacaatgcctaatatactgtatataaaaacagtataaaaagcgtcatacagtggccagattatgaaaaacacgtttgacagagcacgcgcagcggaaaacacgtcacaggaagcgatcacctatctggatcgggcaacgcagatggatgccaggtcggtctcgatgcagggtgccgatctgactttcgccgacgcattcatgttattcactcgcttatcattattgataactcgccgccggccagagatagctgtccattgtgttttgatacatgttctcccgcatatcgctcaggaaaaagtaagtaacctgaatagaataatggtgaatcagctggtcaacccgctgatccttgaagggaagatcgtgatgggtcgccgtgttttttccatcatgaagcagttcctgggatggtgtgccttccaggggattatcgaaacatcgcccctgaatgatatgtcactgaacaaagttgccggcggcgcgaagacggccccgcgggaacgatgcctgacggacgcagaggtttgggtattctggaatgtctgggactatttcgacgtatgtccgggcacgaaatgggcggcaaggctttgcctcgtagctgccagacgtccagatgaagtgctgcgggccagagtaagcgagttcgaccttaagctaaatgtatggaatcaaggatctcgcaacaaatcggcccggtcgcacacccttccgatgagctcactgatgcggaagtgcgtagaagaattgattgattatggcgccggcagccagtggctcgtcccgtcgaacaaaaaaaaagctgatacgccaatgtcgaaggtggcaatagcccaagcgttgaggcggattctggagcggccggagctgggggaagtggagtcgtttaccccacgcgatctgcgtagaacggcacgcagctactttcctgcccttaatatttcacaggaagtatcacgtaagatcatgaatcatagtctggaaggtatcgaccgtgtatacgaccgatatgactacatggatcagatgcgagaagcccttgagagcttctcatcgtacatttcgtcgattgttgagcaaccagatttagaagaaattgaccacaaaatgaagggagatcgcctatccaccgagctgatcagagtaaacttctcatagctttttaattgcttcgacaacctgctcaacaccatcagtttgagccggaaagcggttgcggaaagctgcgagaacctcacgttcttccggagtcagcggcgctatgccctggtctcgtaaaaaatctgccagctcaggctgacggtcttcaagaaccatcatcatgagacgtactgggtccgcattcagtgcttctgccagtggtagcactttctctaccggcagcggaattcttcccttttttatcagggacaaaatgttgggattcttgtaaccaatctcacgggagatcgccgactgacttttcggcgaaacagtgattaaagaatcgatgtaggcgacgtaacgagcggtcttctcatcggccattgtcattgtagttactatcctcgcgtgatctttttgtatggtaagtacttaccgatattacagcaacggttattattgtaaagtcttacatccggctatttgtaggcaattatcgcacataaatcacgcgaaataagggataaatcagcaaaatccggtacttctgttgatttttttgattatttttgtttaagaaattacgatacatttttattaacttttatattaataggtagtaccatcacctccaaatgaaacctgttgattaggatgctattaatggaaaaattgtcatctaatttacttgctctgaatgtaggcaatgttttcgtgctgacacacctggaggctgcagaagtactatctgagttaccaaatcaccaggtaaacgttagagcgcgcgacgctactgttttccggttctccctggaaaatggctctttcacgctgatcaatactggcgacctctctttcgcggttcgaatcaactaaaatttataacccgcctataactcattgatcccctgcgcgaattgcttcctcccctgttcgcgcagtgttattttcttatatctgaaaacaatttgtttactcgataaggaaagcacatggcaaccaaacccagcaaaactgtactcaaagaggtacaggacttccgcgattccgtaaaacgcgtcgttggtcttctttcgggcaagaacattcctgtagctgaatgcggagatacagcatacgttcgctacaataaaaagggggagccagtcatggttaacatcccatccataccagatgacgcaagccctgcgcttatgaatgccatacgtggattccttgatcacgaggttggccatctccttttcacagacgaaaaagtcgtcaagaaaatgcgcaacacaaaggcattcggactctggaatgccctggaagacgtctacatcgaacgtcgcatgagtgaagtgttcaccggcagccggcgcaacctattgtccacacgtaacctcatgattgataaatattttaatccccacattaaaaaggcggtagcgatgtgccgcggggatcaacgcgagttgtttctaaagttcttcctctgtccggttctacgggcgtgggatggccaaccaacttttgctgatttcatggaggagcactggcgcctcatcgataaacctattgccgttctgaaagagtttggcgtcgatgaagctgtccgtcgtatggatagcactgaggattgcgtcaaggttgcagcagcaatggctaagatccttcgtgaaatgactgagatgccagaaggcccgttacctgaacgtgaatcctctttaaccaaaaagaccgaaccagaagaagacagttcagatgagccggctgctggagacgatactgaggtttgtgacgaagaggggctcgatagcactcctgatgagtttagctctgacgatgaagatgttgaaaaatcagacaaaacgataagtaagtacatacctagcagggatgaagtgataaatgatacagaaagtaaacctgaagatggcgatttaggccatgaaaatattgacgacttgcctgacagcgaagaaacgacagctgatgatcctgttacatctctgggctcggatgtaggggaagaagtagatgatgaaggagattacagtccctccacggatgatggctcagaggacaggcatggcagctcctctgatgacagtgaagctgtcgaagacggtgaaggtaaggcagataaagacggtggcaaggagaaggatgaaggggatcgggacacctcggatgaaagcgatgccgggtttgccccacacgctgacgatatgtctcttgatgatgctctcaaggcattagaaaacgtcgatgaagagataggttcttccaccgaagatgcgctggcgtcggcgatcaagtcggagctggccagcgcatcattatctgattaccggccatacaatcgctcctacgacttcctcgggccaattgacgaggcagaagagcatattaagcgcgccagaaaagcttttggcgcaatccctatgtattcgcccgtagatcgctaccgcattgttccagagggcagaaaactgtttgagatgaaggtggagagacatctgtcttcctcggtgtcatctaccttggccaaagacctggagcgcgcgatcgccagtcgcaaccgtgttcagttcatccctggccagcgtcgtggacgcgtacatggggcgagtctttaccgactgtcgatgaatgacgatcgggtattccggagaaaagaagaccacaaggccgtgaacgcgtgcgttcaacaggtcatcgatttgtcaggttcaatgggcggccgaaaaatcgagctcgcgctggcatccgcatacacactggctgacgccctagatcgtatccacgttccgaacgtcattaccggcttcactacgtatggcaatccggatgtagcaactatgtcgaaacgtgggtttagccgctttgaagcgcttatgctgccgattattaaaaactggcatgagaaagcgaactccccagagatacgtgctcgtatgggctgtgtggcggagactttccccctgctaaacaacgtggatggcgagagcatcgcacagctggcttctctgtttgcagggcgtatggaagacaagaagatcatgattgtgcagagcgacggcgccccatgcgctgcgggggatggctttagtaaccatctgcgctctgtaacgaatgacatcgaaaacacaagtgacatcaacctgttggccattggcattcttacggacgcgccgcgccggtattacaaaaactatgcgctagtgaataaggtcgaagagttgggtacgtcagttgtcagcgagttatctcgtatcattttagggtaaatcttgcgccctataaaataagtaactagttactataaagcctgatacattcgtatagaatagagcccagaaacgacaacaagtaaggaaaaacacatgaccgcgactgcgctaccacaagacgcccactctgatgccgtcacctgcaaatggtgcggaaaatccttccatcacctcaaatcccacatttcgatgggacgttgtgaaggcattccggaagaagccaaagggcttggtgtggatgacgtagtgaaaatgtacaccacagcattccctggggaaccaacgctgtctccaaaggccattgaagcgttaaagacgaaacgctctgagaaggctggcgcagacggcaaaatcgcggatatcagttcccaccctggctatgcagggacagtcgaatacaaaacagagcttgtcgccgcgcacgagctgcttggcctgactatcaaggaacttggcacgccccgaggcaaaccccttcaggtaacggtcaacatcaacacgccatatccggagttcgtgccagaagtgaaagccggctatatatacggcgacttcgatctgattaaagacatcttcatgatgctggagatcggcattcctggttatctgtggggtcatgctggtacggggaaaacctccctgccaacccagctttgcgcgctcctgaatcgcccggtgatccgctcacagcatacggcatcaactgaggaagcccatattacgggccagattctggcacgagaaggcacaacctactttgaaccagggcttctgtcgctggcgatgaagaacggttgggtctatctggcagacgaatacgattttgcattcccgcagattctggggatctaccagccagttctggaaggcgaaccactcgtaatcaaagaagcgacaccagactggcgtcgcgtggctccgcataagcgcttcgccttcatcggtacaggcaacactaatggttcaggggatgaaacggggctttatcaaggaacgaacatccagaacgcggctaacttctctcgctttggcatcgtatctcacgtcaagtacatgaagcctggtgctgaggtaaacatgctggtcgaagcgggaatcatccgtgaatacgccgaaaaaatggttaagttcgccaatctggtacgagacgggtatgagcaacacctgatcagccaaccaatcggcccgcgtgagctgcttctgtccgcaaaaatcggaatgatgcgaggtgatttcgcagccggcatcgagaagtcattcatcaataaactcccctccacctctgcgcaagcggcgcgtgaagtggttcagaaaatcttcggttaatcgtgcgtaaaggttgttttggatctcttatcgcagcttctgaaactggcgcggcctgtttgtcatgtgctcacaggccagactgccaccaggcagccaaaggagttgcgatttcgatatacgggaagttcgtcggcttccccaacgacaaaattaagaaaaaacagaaggtaaaaacacatgaaagcactgatggtcaggactgatttttccctgggagaatcagcactgaaagcagagcacgcagtaaaggtagcaaaggaggctggctataccgcggttatctctgctgacacgatgaatatcgccagcgttatccccctgcaacgagcagctggcgatgagatggcggtgatctgtggtgttaagctgaatgttgtcgacgatccaacatacgagtaccgggctaaactggccaaagagtctaatggatgtatggaatcattggagcgtggacgtaactactgcttcaccgcactgattaaaaacgagcaaggttatcgcgacatttgcgaactaatgactttagccaatacccgcgagcagttttacttcgtaccacgtctggcgctcgaacagctggcggctacttacgctaaaggcaatatactgttgctgacttcggatatcggcagcgtattccagcgcccggacttcgctaaaattattagcgcgctgattgctgccggcggacgcgagaatttctacagcgtagtttatccgcaccctacgccattctatgaccagatcaacgtgcgagccatgaaagtggcaagcgcactgaaaatcgagcccgttgcgttttacccagcttattacgaaggggttgatgacgctgacatcaaagacatcgcccacatggtgatgaacaatatcaaagtcgatcagccacaccggctgcgtatcccccaccagcgcgacaatgcaataaatggtcgccgtcatctgctgcaggctctgaaagagttttctgtccggatgggcgtatctgtatctgccgccatggcttctacaacgcaggacgccatcgttaaggcgtgcgaatggcgctggcacgagatggcgccgacactgccaaaaatggcagacgatgagcctgcaacgttgatgaagctggctgtcgcagggcttcgaaaacgtctcagcaacaaagaatttggctacacgccaccagcttccgagcaccgcgtttacgtcgatcgcctcaagtatgaaattgagacgctcactcgcctgggattctgcggttatttcctgatggttcgcgatctgatgaatcatagtcgcgagactggtattcctgtcgggccaggtcgtggttcatccgccggctctctggtggcatggtgcatcggcattactaacgttgacccaatccgtcatggtcttctgttcgaacgtttcattaaccctgaacgtctcgacttgccggatgctgatctggactttagccaggcgcggcgccatgaggtgatcgagtatctgaatgcccgatatggcgaagagtatgttgcaggcattccgaacttcacttatctgggcgccgcttccgcactgcgcgacacagcgcgtatttatggagttgatgcggcggatatggctgtttccaaggagctaaagaccctggaggatgacagtttatctctgtcggagctgcgcgagcagctggccagcctggacaagtacgccaccaaacatccggacgcatttaaggcggcgagcaagttgcaaaacctgatgcgtggcttcggccggcatgctgcagggatgattgtcgctggcgtacctctgacggaacgtacccctgtagagcgacgtggagacgcgcgttgcatcgcattcgataaacgatactgcgaggccatggggctgatcaaactggacgttctgggcctggccactctcgatctgctggatagcgcaaaacgttacatcaaagagagcaccggcaaggacatcaacctcgatgccatcccactggatgatcgcaaagtacttgatggattcgccgcggggtatacgcaaggtgtgttccagcttgagtccggccccatgaggaagctactcaaagatctgggtggtggtatcgagccaatgagcttcaaaaccattgtggccacaactgcgcttttcagaccaggtccaattcagtcaggcatgttggacgactatgtctccgtggcaaaaggttttatggctccacattcaattcatccgcgtcttgaggaagctactaaagaaaccaacggcgttttactctatcaagagcagatcatgaaaagctctcgcgtactcgctggattctctatggctgaggctgacgctctgcgttccgctatcggtaaaaagaacatggataagatgaaagcgatcggcagcgattttgtagaacgagcgcaagcaggttgggtgacactgtcacttgaaaacggaagcacagtagaagtccacaaaaaggccaagctgatgtgctctgacggcaaacgcagaacctatgacgaagcgattggtgataacgctgatattgttgattttggagtttgacggtggaagaaatttggaaatccattcctgagtttgaaggttattacgaagcatccagtttaggtcgcattcgctctttagatgttatacgaacagcccccaatgggggcgaatgggtgaagaaggggcaaatcctcaaacctcgcgtaatcaatgattttggacatctgggcgtgaaactaagcgtcaacggcgtcaaatgcgaccgcacagttcattatctggtagcaactgcattccacggagaacgaccagaaggcttacttattcgtcatcttgacggaagaccatcaaacaatgcgccctccaatctcgcgtatggcactcaagtcgacaacatggctgacgccattgcacacgataccgttgagtttggtgagaggcgctacaacgccaagctaaccaacgaagtcgtcattgctattcgcattaaaaagtcagaaggcgctctgaacaaagacctcgcggccgaatatggtttaactgagctttacattcaccatatcgtcaccgggaagaaatgggcacgagctggtgggccgatcgttgtctcaagagcatccaaaaaactggatgctgaagcaagagctgaggtggtcgccttgcgcaaggctggcgcaacctatgaaaagttgcgagaaaaattcggcatctctaacactcaaatcgcaaatatctttaaaaaagctagcgtttgaagctaatgacgggaaaaacacatgaaaattgccaaagttatttccgagcaggaaggtcttagccctgagaaagcccaagaagtatgggacgcctttgagaagttcggtggatatgccttcaacaaatcacactccgttgcctactcgctgatcagctatcagtctatgtggttaaagacacattaccctgctgagttcttcgctgctgctctcaccattctgggcgaggataagcaccaggggctggttaaggatgcgctgacctatggcattcgcgtattgccaccagacgttaacgtgtcatctaaccgaattgagatccgcacgctggaagacggcagccaggttctgtatgcgccattctctgctgtgaaaggctgctctgagaatggttgccaggccatcatgagagcgcgtgagaaagttggcggcaaattcgagtcacttgagcaatttgaggaagcggtcgagaagcgagcctgtaacagccgagtacgtgagtctctacaaaaggttggtgcattcgcctctattgaacctggcagtatgccggcgaccgatccggaacgtctgcgcgatcaggcagagctgatgggcaatctggtgatcgatgcggtgaaagcttcacgcccatttgaaatgaacccaaaacgctctgcagaggtcaatgtgctgatgactcgcatggccgcagaaatgggtctgggcgatgagttgatacgaccaagcatcggcattaagccaaaaattatggtcatactcgacaacgccaatggcaatgatgcacgtaccggctacttcatggagaacggctacgatgacttcaaagccaagttgctggtttctggtgacctgcgtatgggtgatttgtatgtcacaggcgtgtgtaaaaaggtaaaggataaggaaaaagactacaccaaagatgagatcggccagtttatcgactttatgcgggaagagataaatctggttcgtccaacttacgtgctgacgtgcggcagccgggcgacatcgctgtttaataacaagagcaagccatccgatcttgttgggcgcaaagaatatctgccagacctggacgtgaccgtgttctatggatttaacccgaatattttgtacttccgtccagaggaaggagaaaagctggaagccattctggcagaggttgcggagactattaacaaatgagtaaaggaaaacacatgagcgcagcggataaaattgcacaagagctcacagcaataccacaggagtttcaggataaggcgattgaagccactctgcgatcccagttctgggaaattattgactgccctgtcacgctcgatctggcattggcgtttgcaaagcaggatggcgccgaccctatttgtcgattacggaaatgcgcgcgtgcgctggcattaaaaacgcaagatccaaaggcgtgccaatatctgctggagatttatgaatctgacaaaccagaagaagagctggcttcatttaaagcgttccgtgcccgtcttgtcctgaaggtggccaaggagttcatggaggtgagtaagataggcgacgtcagaagataccggcttaagaggcagaccagagtcactctatcaaacattttcggtagaaaagtagcataaagaaacccgccatatggcgggttttctcatggagttagtagagaagccgtccagatctaacgacctttaactccttccaataatccttccaaactgactactcaggctcaggccgtcatcgttatcgcagcggatagattaccgaaatgaaattagctcaacgtaactacgtttgaagcagcagggcctttagccccgttctcaatagagaactcaactttttggccttcttccagggtacggaagttgttgctctggatggcagagaaatgtacgaacacgtctttgctgccgtctgctggggtaataaaaccgaagcctttatcagcgttaaaccattttactaaaccagtcattttgttagacatagagattaccttcattatttgagagccacacaacgcggcgaaattggtctgagagattggtacttacttgggcacttaggaggagactcacggagaagggtaatctttggataacacctgaacttcggactgctttactaaaactgctttcataaggtctgtcttgcaaaccgacgcaatcattaacgcatggcctttctgtttgtgcaacatttattttccttttcacagcgtcgccacataaacgtctctacccaacctaccccctctcatcttcacgacacatgctccatcagctgatttcttcatggtactattgatataaattagtaagtggatacataacaaaatgagcaccgaaatttacgaaaaaatcatgaccgatctggagttcgatcgcgacaatcttgaagaggtctggcggcagcaaccgaggctgttgatggagtacggcgcaaaactagcgcgcgcagaacgagaggttgcagatgctaaactatccctcgatgccatagaggcaaaaatttacgacattgaacgtaagaatctgagtatgaacggaataaagttcaatgaatcggtactggaagctaaggttcgcacaagcccacaataccttgcgaagcgccaaaaactggatgacgcacgtctgatcgctgacatctataagcacgctgtcaccgccttctctcaccgtagagacatgatcgtgcaggcctcgaaaatggctatcgtagagattgaacgactgggcgccgaacgcttcaccgccacccgataatttttgatagatagtaagtaagtagtgatctattattatgtacgattttaagagccacgaacaagcgaatgccccaagcgcaaagcgcccatggccataatcacaacaaggagaaatacatgtctaagtcattacttgatctgcttaacaagacccgcggcgatattgcttccaaacgaggcaacaacgtcgacctaacccgcctgaaagacggtaataactatctgcgcatcttccccaacaaggacgatcagaacggtgtgttcttccagactttcggtatgcactacgttaagcatcagaatgaggagggcaaagaagttaccactgcctatatctgcgaacagcacacccacaatcgtgcgtgccagctgtgtgagatggtgatggaaggtcgcgctcgctacaaaggcaacaaggcaatggaagagcgtatcggtcaaatgcgcgctactccacgctacctggtcaatggcgtactttcagctcgtgaagactttggcgacgcagaaaaatgtcagctgattgagctcccgtccactgtgttcgacgatatctgcaaagtgatgtctgaggatatcgcagatgatatcggcaacccgttaagcaaagaagaaggctatgcgttcctgatcaaacgcaccggctccggtcgcgataccaagtacgacgtatccccaaaacgtaaagtctacaagggcgatatccctgaaaaactgtggtcgacccagcatgacctgatcgcttacgccaatcaggctgatgaaactcgtctgctgtctaccgttcgcaccatggggcgtctcattggtattgcagcacctgccgccgccaccgctgctatttccgcaccagctgctgcaagcgcagcaacgctgcctggttttggcaccatcactggccatacggaaggtgcagctgctgttgccacgacctctaccccggaaccagcaaaaacatctctggtagacgaagagatcttacgtgccgcagaagctgagttcgtaccagagccggaagaagttaaagcatcagctgctgccgccactaccactgcagccgcgaccagcacttctaatgacgatgagggtcttgacgatctgctggcggaattagaatcgctttaatcacaggccatgactgttaaggcgtctacggacgccttactttttggaaggagttttccggtgaattatctctttgtggacggtaacagcctgggctattaccaccagcaatctgacaaattacataacggcgaaatggaagttcaggcggtgtttggcttcgtcaaaaacgttcgtcgctatgcgtccattcttcacgcacgccccatgatcctgtgggacggctttagcgacaagcgtcgcgactattacccggattacaaagcaaatcgcgatgaagatccggaaatgaagaagatgaaagaaggctttgcagtccagaagccttacatcctgaaaatgatggcagcccttggcatcaaccagctgatcgccaaagacgccgaggccgatgacctggcggggatgctggttggtcgtcttgcgccacaaccaacggtcgatcatatctacctgctcaccggcgacggcgactggctgcagctggttcgagaaaaagtcagctgggtgagccttcgtgaagacgccaaacacaagcaggtgaactttgagcagttcccaaagctgatcggcctgcctactcctcgtgctttcctcgaagccaaagctctgcagggggatacctccgacaacatcaaaggtgtaggcggaattggtgacggtggcgccaaggagctgctgcacgaatggggaagcgtcgccgctatggtgcgcggcattaacgacggctcgatcgtcatcaataaaggccgatacaaaacggcattcaacaaactggccaaaaatgccttcaacgagaagaccggctgccggatgctggaagccttcaaacgcaacatgacgctgatgaacctcatcgataccaagttcccacccagcgaaatcgaaaagataaaaggcgcacgtgatttgaaagccttcgaactgctctgccatgagctgaacttccggtcattcctggaagatctggacgtgttcgttttgccttttgagaggtactgctgatgttgaaatcactcatcaacggcaatacgaccacgcctacgatgctggctaaggagattgtcttcttccatggagaacatgccgttgttgcgctaccgcgcattctaggcgcggccggcatgagcgtgacagagcgagagtacgggctgattagcgaacaggtcgtcaagatcctctcccgcatggccaaacacctcaaccacggcgcaataaagtttgatgaagccgccgcttccaaacgcatcaacgagacaaaaggagcctaagaatggcaaaaggaaaatcagcactggcaatggcgttaaaaaagaaaatcggcagcaatgatgagatccaaaaggtttcacactggattgattccggcttccctccgctgaataaagccatctccgggcgctatgacggcggtttcccaagcggacgtatcgttgagatctttgggccgccaagtgctggtaaaaccttcctggcgacggccgccatggtctccgctcagaaacaggagggtctggctgtattcctcgaccacgaaaacagctttgatgttggtctggcggtggcaaacggcctgaatgcggatgaggatgacggccagtgggtctataagcagccggacacgttcgaagaatcggttgagctgatcggcaccatcctgaaactggtgcgagacgaagagctgatccccgcagacgcccctatttgcatcgtagccgactctcttgcgtcaatggtgccaaactccaaagccgagaagttcgacaaaatggcggaaggtacagcgaaggataaagatcagctaaacatgaacgacaatacggccctggctcgtgctacgagcgccaactttccgacgctggcgctctgggcgcgcaagtacaatgcctgcattattttccttaaccaggttcgtacaaaaatcggcgtgatgtttggcgatccaaccacctcccctggtggtgattctccgaagttctacgcctcagtacgtattcgtcttggcgcttctgttatgaaggatggcaaagataagatcggtcaggacgttggcgccgagtgcatcaaaaacaaagtggcaccgccattcggcaaatgctcatggaaattctacttcgacccgacccgcggtctggacgttatcgagtcactggttgagcacatgctcgaagaaggatacctgccaaagaatgccagcggccgcgtagagattggcgacaagaagtacaccaaatcgcagatcgtcgatatgtatcgtgataagccccttccggagatcattgcggcgctacagaccatcgacgaacgtcgagctaaagagtctgcttcagccgaaacagaagaagcgtaatcacagggcgtccattggacgcctttatattttgtttattatcaccaataagaaaacaacttggttactaatatgaaattaatcccaattccaacgtcaaatgtgacagtgccacgcagttaccgggtagccatcctagacgcctggtggttggtgaaggaagaatcaaagtgaagagactctgggatgcggccaatgccgcgctcgatgttatcgacgcagaaatcgcacaaggcttacctgagcctgaatgggctgctcagctgcgcgaggtcattggtctaatagatgagccatcacctgaacaggacgattgctccccttctctcgaacagaataataagtaagtacatacaccacaaaggagaaacacatgagaatattagtttggatatcagccagtactgacagtgatgtttagccactgcttataatgtatggctctggactctccatccttagggatctctaggccttagcgctcttccgtagccatttacacctcaaaatatataagttagtatttacctattatgaagatatacatagatatcttgttactcatcttttcaatactgtttatgttggactgcctgatgatcgggacactcaagaaagctctgtctcctgtcaacggaaccactgtgaacatgctcgcactggtgctggtcatcacctctacagcacaggtctacacagggatagtggtatgagaaaaataacgctactgctggccgccctctccttctctctgctggcggataccagaatttaccaatgcgatatgaccgtatcgcaggtgaaaaatgatcaaatcagcagacctactaaagctgacttcggcgcgctagtcgttgatagcggagagcagttctatgtcgtccgcggcgatgaggttctctcatctccatatctggctaaacgcaacggtaaactggttggcgttggcgaggacaagcttatctacaacaaatcccacgacgtctacggcgttcatagcaaagaccaaagtttctttttcgacggatgtaaggaggttggttaatggctctcacaatgactggtctggagattgagaaaacaagcggctactggagagcgaaaggcttccgaaaaccggacatgttggagcgtctggaacgcgaagacggttacatcatccaccagcgtcgggaatggcgcatgtttgatcctgaaaccgggaaactcacatcgaaagcacaaacgctttggggtctgctcaagcagatccactaaccgaagtttctacagagcgttttaagtgtggtggaataacaattgttagtaaccaccaacctagcattcatgcgggttaacaggttagtgaccactggggaagccatattgttatctacacgggcctggcgcaaatcaacgactgcgtcgcccgttttcaggatatctaattcagtgctgtattaccgctcacggcatacgttgccagtgaattaccgctggcagcataccttgtaccgctcacagcatacgttttaccgctgacagcatacattcatagggcagcagttgctcttagacgttagccatgtcgatttataaagaccgcagatagtggaaatgtaccgctgacagcatacgttttaccgctgacagcatacattgagacaaaagaaccgctgacagcatatgttgaaccgctgacagcgtatcaaagcaacttgaggctattggtgagtatctcgatcagcttgatattctctggcgtcaggttctgcgacagctcagaaattttgtttttgaggttctgtttcgcatcaatttcacccttcgcttcttctgcctgcttaggcgcctctggcttctcgggtttgctcgatgtgactttcagttttgggttacgactgtggatctggatgtagacagaacggccacgcttaacctcgctatattcgagatagcccagctcttgcagtgacttcaatccgttcctgatagtctggttttgcgagctgacgttgcgcgtgctcagattgagcctggcgcgcagtcgggcaagagataccggtgccggcttaggaggaagactttcgatgaaagtatacagcgcctgggccgtctctttgcgcgggagcttgttgatgaccttcaactgcagcagaactttatggtcaaagcgatagagctcagacagcttaggttcagcataaaagacaatggagtctttcttctcgttgtaatcaacgctgtttatgaggtgaaccatcaacagggatatcttgttggtgtcgtcgacgttcttctcttcatgagtgcgctggaacgacaacgtcgtgcgcatgatcttgagcaggctgtttgtcaggcggtctcgcagggtcttgcggatctgcgaggacgggtagccgcagaacttggcgaacttcgtgatgctcagctctacgcgccctgttggctcgccgtattcagccagagagcgaacaacaccaacccaggttttgaagtcatgatccatatccagccgcggaccggtgattttaatgtttgaataaccctctgaccgcgcgacttcaagctggacaagctccctggatgcgtcgatcatgttggacttgttgcgagagctattcttcgttcccttgagcgttggaacaaagaggccaaggcgcattaaagcgattggctgcaccgtattgttgctgttaggaactaagtcacctgtgtacaaattgagagcatcttcctcaagaatttcgttatcttcaggtatttttttgatttcactatcttttttcttttttgtggacatgtggataccttttggttctaaccgctgacagcatacgtcaattaccgctgatagcatacacaaaaccgttggcagcatataccgtaccgctgacagcatatcgtttaccgctgacagcatacacggatcagtccttagcccaggcgtggcgcggcctgcggcgatcggggatctctttggatctatatggggatctgtatagggatcttattattgggatctaaccagtggataagtggataagtaaaacaggcttttgcgattacaggtgtgcctagtaagctatcgtggttccggtcaacaatcactaaaacgagaacatggacttaaaacgcacacgttgggtacgccgtctggaagacggaacctacaccatagaatcaaactccacactgagcaacgagaaggttctctgcagcctgtgtggcatagcctcgaagtgcaacatcaacgagacccgactcaagttgcgtgacgcaggcgttaacttccacctgaacagctgtgccagatacgtaccgctgctggcatttcgaaaaccgatcatcggtctggataccccctacttcaacactatgcgttcaggcgttacctggcgtgacagattgaccgaggggaagattatctgcctggttgaagctgatactgcaaagatccttcgattcggtgtcgtggataaggtttactctgggccagttgatgagatgctgagaaagcacagtcgattcaatcacctctgtatgggcggagagaagatcgaaaaagtgggtgaagtgatccgccgatcctatggccacttcctgaaagaagacagcctgctcacagcgatttacataagacacatcaaacgggactttgatatcgagtatcacagcgaagaagaactcgatttagtcgaccctcggccaaaagcagaagtgtttagcatcgcaaatgcgcgtcagaagctctctgacgaaccctaaacgaacaaaggggtctttacgcgaatacaaaattgcgtagcttagaatgcatctgagaagccaagggggtgatatatggacgatttttactcaagagagattactctggctgatatgccctttctgatgcatgaattcgaggaaggcgttcttcttgctcactttgcagtatgctccatgcaataagccagctaatgcattgaaaataaaatatagctctcattatgaagatttaaatccattactctgtacgttattttgaacgcaagttgtatactacttattgggttttgatgaagaccttgacta

SEQ ID NO: 69 - DNA, 109484 bp, Unknown
  source: /note="Description of Unknown: MKP2_coc_1 Mutant Bacteria sequence"
atatgccgcggtccggcgtaggcctcgagggtcgccagcgatccggcggccccgctggcgtcaatggcgatggggtctccctcaggcggcacgatcagccagaagccatcgccgccgaggccattcatatggggatagacgacggcgatggccgccgcggcagccaccatcgcttcaatggcgctgccgccctcgcgcaggatcgccagcgcgctctgactggcgaggtggtggggggccaccgccatgccgtgggtcgaaacgttgctactgtgcataaattatcctttctgaacgaatcacccgcagaacactgcaaaagctgttccatctctgaacgtttcgtttcattgataaaaacgatgaccagaattttcccactggcacgctatgtgtaaggcatagcagatacagtatgatgaggaatggatgatgaaacgaaagttacagggggcgctatgcaacaactcgatgaacgactgaaagggcaatacgcctcgctgtcgccgcaggagcagcgggtggcggatttcatctttgaccactttgacgacctgataagctacaacagcgccgagctggcgcagctgagcggcgtgtcgaaagccaccgtcagccggctgtttaagcgcctcggttacgacaaatataaggatatgcgcgatgaactgcgcactctgcgtcagagcgggatgccgctcaccgaccagcgcgacgcggtgcagggtaacacgctgctggcgcgccattataagcaggagatggcaaacctcacccagtgggtcaacgccctcgacgcccgccagttcgctgaggcgctgacggcgatggtggccgcccgccgcattgtggtgattggcatgcgcaacgcctatccggcggcgctgcatctgcgccagcagctgctgcaggcccgcggccaggtgctggtgctgccccagccgggtcagagtctcagcgaagagctggtcgatctgaccgccgatgatctggtggtaatgatggcgtttcgccgccggccgcgaatagtacgcccgctgctgcagcagctgcagcgcgacggggtgccggtcctgttaatgtgcgagccgcaggcccacagcctgtttccgctctcccgctggcagctctgcgcgccgctggacagcgtctccgcctacgatagctatgcctcggtcaacagcctgattaatctgctggccaatgcctttctccatgaaacgctcgacagcggtcgtccgcgcatccacgatatcgcctcgctttaccagcagctggatgagctggaacaacgctgatggggcgccagcgtggtgctgtgcattattatggtgcaataaaaaccacgtgatggcgccgccgctctctgaacccttttccgttaacgcttgtcctttctcactttttgttttaattcctcgccaaccctcgcctcgtctgtatctggcacattagttgcaaaaacagattcaaagaatcttttgtttcatgctaacgtaacgggtaaacatcatgaagaaactgttgatcgcgctggccggggccgcttgtctcctatcgtctgtttctgccgcgcaggctgaccagctccaggatattgaaaaacgcggagtcattcgtattgccgtgcctcaggattttccgccgttcggctcggtgggcaccgacctgcagccgcaggggtatgacatcgatatggcgcgctatctggcgaaatcgatgaagctcaagctgcagctggtcccggtgaccagcgccaaccgcgtgccgtatctgcagaccgataaggtggacctggtgatctccagcctcggcaagaacgccgagcgcgagaaggtgatcgacttcagccgcgcctacgccccgttcttcctcggcgtgtttggctcgaaaggggcggaactgaaggacgcggccgcgctgagcggcaaaagcatcggggtgacccgcggggcggtggaagatatggtactgaccagcgtggcgccgcaggcggcgcagattaagcgctacgaggataataacactacgctgtcggcttacctgtccggtcaggtgcagtatgtcgccaccggcaatctggtggtggcggccatctcccggcagaacgccgacaaagcgccggtgccgagctttatgctgaaggactcgccgtgctttatcggtctgaaaaagaacgaaccggcgctgaaggcgaaagtggataccctcattgagcagggcattaaggacggcaccctcaacggtctgtctgagaagtggctgaaagcgccactgcctgccagcctcggcgcgtaaggtctggggatgacggagcaacttcatttctctgagctctggccgcactggccggagctgctggccggcctgtgggtgacggtgcagttgacggtgctggcgacgatcggcggactggcgatcggcatcctcggggcggcgatccgcagcggtcgcccgggaatgctcagccgggtatggggcggatatgtggaaatcatccgtaatacgccgtttgtggtgcagctcttttttatcgtctttggtttaccgaacctcggactgaagatgaccgccggtgaagcggcgctgctggcgatggtggtcaacctcggcgcatatagcaccgagatcgtccgcgccggcatccaggtgacgccgaagggccagtgggaagccggtcgcgtgctcgggctcagccggacgcaaaccttcgttcgcgtcgtactgcccccggcgctgcagaggatttatccggcgctggtcagccagtgcatcattgtgatgctcggctcgtcagtggtgtcccaggtctcctatgaggagctgaccttcgccgccaacctgatccagtcgcggacatttttgagctttgaggtctatctggtaaccaccgggatctacttagcgttatcgatagcgatgcgccagctgctgatggcggcggggcgtaaatggctgggggtacaggcctgatgaccacttttaccgactgggacattatccgcaacctgctgctggccggtcgctggacggtgctgctgtcgctggtcgcgtttaccggcggggcgctggtgaccttaccgttactgctgctgcgcctcaccggcggacgccaggtgaaacggctgatccgcgggtatattgagctgttccagggcacgccgctgctgatgcagctgtttctggcattctttggcgtggcgctgttcggcgtcgacgtctcggcgtggaccgccgcctcggtcgccctgacgctctacaccagcgcctttctgctggatatctggttcggcagcattcgcgcgctgccgaaaggccagtgggaagcctcgcgctgtctcgggctgagcttcggccagaccctgtaccgggtggtggcgccgcaggcgctgcgcattgccatcgcgccgaccgtcgggttcgccgtacaggtgatcaaaggcacggcgctggcatcgattatcggctttgtggagctgaccaaggccgggacgatgctgaccaacgtcacttatcagccgtttaaagtgtttgcccttgtggcgctgggctatttcattctgtgctatccgctgtcccgctacagccgctatctggagaacaaattcaatgcctctcatcaccattaatcagatgcagaagtactacggcgacaaccatgtgttgaagggcgtcgatctggatatcgacatgggggaagtgatctcgatcatcggccgcagcggctcgggtaaaagcaccctgctgcgctgtatcaatggtctggagggctaccaggagggaagcatcaagctcgggggcatgaccatcaccaaccgcgattcacaggcccgggagatcagccgctccatcggcatggtgttccagaactttaacctgttcccgcacatgacggcgctggagaacgtcatgctggctccgcggcgggtactgaagaagtcccaggccgaatgccgggagctggcgcagcggatgctggagaaggtcgggctcggcgaccgtctggattactacccggccaacctctccggcggccaacagcagcgcgtggccattgcccgggcgctggccatgtcgccgaaagttttactctgtgacgaaatcacctcggcgctcgacccggaactggtgggtgaagtgctgaaggtgctggagcaactggcggcggaaggtatgacgctgatcctcgtcacccatgaaatgaattttgcccgcgaagtgggcgaccgcgtggtgtttatgcatcagggacgcgtctgggagcagggcgacagcaaaacgctgttcgccagcccgcagaccagcgaactgaaacagtttatctcctcggtgcgcggtcttaactaacgtaaggaatggcagatggatatcactcagttttcgcaaattaacccgccgcagcgcctgctgatggggccggggccgatcaatgccgacccgcgcgtgctgcgcgccatgtcgagccagctggttggccagtacgatccggcgatgacccactacatgaatgaagtcatggcgctgtaccgcggcgtgtttcgcaccgaaaatcgctggacgatgctggtcgacggcacctcgcgcgccgggatcgaagcgattctgctgtcggcgatccgtcccggtgacaaggtgctggtgccggtgttcggccggtttggtcatctgctgtgcgagatcgcgcgtcgctgccgggcagaagtgcacaccatcgaggtgccgtggggcgaggtctttaaaccggatcaggttgaggatgcgatcaagcgcgtgcggccgcgcctgctgctcaccgtgcagggcgatacctccaccaccatgctgcagccgctggcggagctgggagagatttgccgtcgtcacgatgtgctgttctataccgacgccaccgcgtcgctcggcggtaacccgctggaaaccgacgcctggcagctggacgccgtgtccgccgggatgcagaagtgtctgggcggtccttccggcacctcgcccatcaccctcagcccgcggatggaagaggtcatccgccgccgccgctgcattgagcaggggatccgcaccgatgcccatcacgatggcgtcgacgagatgatctactccaactatttcgatctcggcatggtgatggattactgggggccggagcgccttaaccaccataccgaagcgacctcggcgctgttcgccgcccgggagtgcgcgcgcctgatcctccaggagggactcgacaacggcatcgcccgccacaaactgcacggcgatgcgctgctgaagggcatccaggcgatggggctcgagacctttggcgatctgcggcacaaaatgaataacgtgctgggggtggtgatccccaacggggtcaacggcgatcaggtccgcaaactgatgctggaagatttcggcattgaaattggcacctcgtttggtccgctgcacggtaaagtctggcgcattggcaccatgggctataacgcgcgtaaagactgcgtgatgcagacgctcagcgcgctggaagcggtcctgaactacctcaggttcaccaccactcagggcgcggcgatgcaggcggcctgggatcactaccgcaccgaggccaccctatgagtgacaccgtccgccagcaggcggagagagaggcggccgccagccgggtgatggcgcgcgccgaccagctggccgccctcagcgaaaccgccgacgccctgacccgggtctatctgtcgccggaacatctgcaggccaaccagctggtgggccagtggatgcaggccgccggcatgatggtatggcaggacagcgtcggcaacatctgcggtcgctatgaaggcgtgcaggagggcgcgccggcggtgctgctgggctctcatctcgacaccgtgcgcaacgccgggcgctacgacggcatgctcggcgtactggcggcgattgaggtggtccagcgtctgcaccagcaggggcgacggctggcgaaggcaatcgagatcgtcggctttggcgatgaagagggcacccgctttggcatcaccctgctcggcagtcgcggcgtcaccggcacctggcctgaaagctggctgtcacagtgcgataccgacggggtgagcgtcgcccaggcgctggtgaatgccggactcgatccggcgcggatcgcccacgcggcccgtcacccgcgggatatcgccgcctatctggaactgcatatcgagcaggggccgtgcctggagcaggcggggctggcgctcggcgtggtggaggcgattaacggcgccagacggctgaactgccgttttaccggcgaagctggccatgccggcacggtgccgatgcttcatcgcaaggacgctctcgccgcggcggcggaatggatggggcaggtggaaaacctgacccgccagcgcggcggtaacctggtggcgacggtcggcaccctgcgctgtgcgccgggcgcggtaaacgtgataccgggcgaggtgcagttgacgctggatattcgcggcccgcaggatgcgccgctgacggcgctgctggaggaactgctggggcaggcgcaggcgattgccgggcgccgccagctgagtttcgccgccgaggagtattatcgcatcgccgccaccgcctgcgacagtcacctgcaggcggtgctgagcgaggcggtggcggcggtgcaggggcgttccctgacgctgccgagcggcgcagggcatgacgccatcgccatcgccgagcgctggccatcggccatgctgtttgtgcgttgcctggggggcgtcagccatcacccggcggagtcggtcaccgccgccgacgtcgggctggctatcgacgcgttctcccgggcggtagagaaggtggctgacgcctgatcgcgccggtcaccgtgccccggctggcggctttacaccgccagctggttgaccacctcggcgacggaggtgatggcatggatgttgccgatccccgcgcccaccgagatatatccctcatcggtattcccctccagcatgcccagccgcatcccgcgcagcccgcccatcgcctgggccagctcggcttttgaggcgccggcacgatccatggccaccagtgtgtcgctcagtttgccgggcagcgcgcggtagtagtccggcagagtacggaacaggcgcagatccagaccgttggcggccacaattttcgctttcaccgagtcgggaacccggctttcgatggtgctgataaataccgaaccggcgaagacgccctccgcccccagggcatgaacggcgcgcgcgccccgggcgtcggtgatccctccggcggccatcaccggaacccgctgtaccgcgtcaacgatcagcgggacgatggtgaaggtcccgagggcggtacccggcagcgtgccgccttcgtcaaagccggtggcgacaataatatccgctccggcctgctccgcgcggcggctgttctccggcgtcgggttgatgtcacgatagataatggtgatcccggcggctttcagttcgtcgaacagcgccggttttaacgaaccgtcgccgtagccggtgtagaccaccaccttaaccccttcctctttgatcaccgggaggatcgccggcgtccagatgtcattttccgccgtcgggatcaggttgacgccaaagggtttctccgtcagctgtttggttttgcggatctcttcgcgcattttctcggcggtggcctccggggtggagacggcggttgccgccgtcagtccggcgttcgggcccagcacgccaagcccaccggcgttgccgacggccgccaccagacgagcatcggttagccaggagaggggcccctggaccaccggtttttcaatacccagaatgcgggcgacgcggttaggttgcatgctatttttccttgtatgttaataagttataaatttgttcgccccagcgatgcggcaatgagggcagtgtaggcgtctttattgttttaaaaaatgagcaaaaactttcatcactattattaaattagtaataatgtgaactgatgaagaagtgggaggcgggccatcatgcaaatgaatctgtttgaaaatattaaaatttttattgaaatcgtcgatgccggcagctttgcccaggcggcggaaaatttgcagatccaccgaccggcggtgaccaaagcactgcagcagctggagcaggagagcggggtccggctgctgcagcgcaccacccggcgtctgtatcttacgccggagggggaagagttttatcgtcgcagcaaaccgttgctctcccaggccgacgatctgctggagtcgttcgcgccggaccggccgatccgcggtcagctgcgcgttgatatgccgatcgcctttgcccggctgctggtgatcccgcatctgccggatttttatcaggcccatccggaggtggagattgtcctcagcagctccgacgtacgccgggatatgctgcgcgatggtctggattgcctgctgcgggtgggggatcttgaggatggcgactatgtggcgcgttcgctgggggaggtggcgttaaccacctgcgccagtccgggctatctggcgcgctatggggcgcccgcgacgctggaggacctgcagtcgcatctggcggtgaactgggtgaacagcagcagccgacagattatgccctggcgattccagaccccggagggcatcaggcagatcgccattcccggtaaactggtgctggacaactctgaagtctttactgctgccgggctggcggggctggggatgctgcaggggatgcgtttctttttgcaaccttatatcgacagcgggcaactggtggaagttttgccggactttccggcgccgcgtcgaccgttgtcgctgctctatccgcaccggcatctctcgcataaggttcgggtctttgccgactggctgcaggggctggtggcgaccctggactgacaatcggcgctgtcgccttgactctatcggctgagcgtttatatataaaatgtgaatgctattaatgcaacgaatcacaaagctggataacgacttaacctgtaagggaatgctgatgaaactctggaataaaacactactcgcttccgccctgtgcctgaccctgtttggctgcgacgatgcgtcgaaagttgataacaaactggataaggctaaagataatgcggagcagatgaaagatgccgcggcggataaagcgcaggcaattaaacaggatgcggataagcaaatcgatacgctgaaaagccaggctgacgccgaggccgatcgcctgaaggatcaggccagcgccatcaaggccgaggcggacaagaaggcggacgccatcgcccagcaggcgaaagcccaggccgatgcggtgaagcagaacgcaaagcaggaaagtgaccgcatagtcaaagaggcgggtcagattaaagacaacgccatcggtgacgccaatcagctctcggctgaagcggcgagcaaaaccaaagccatccaggacagtatcgcgaaggataaacagaacgccgcgccgcctgccgcacagcagtaactcgcggtgtttgtctgacccgccgcccggaaatatagggagcggagcctgatagattacccggcggcgctgcgcttgcgcgggcctacgcagggagcgggttggctgcgcaatgaccgggtatcacccttttgtaggccgggcaaggcgtcgtcgccgcccggcacatggaccgcaataacatcctgctcaggggtatcttacgataccccttttttatgcccgccgtgggttcaacggtttggcagcagggtgcctttcaggccgtgcggctccgagcgcaaatactgcgacggcacacggacctgggcgccaaggctggccgctgcgtgccacggccagtgcggatcgtagagtaccgcgcgggcgagggcgatcaggtcggcatcgccattctccagcgccgcttccgcctgctgcgggtcggtgatcagccccacgccaatcaccgggatggctacctgctggcgaatgtcgcgggcgaaaggcaactggtatcccggcccaacggtgatcgcctgctgcggcgacaaaccgccgctggagacgtgaatatagtcactgcccagcgtttccagctgctggctaaacttaatggactgctcgcagtcccagccgccttcgacccagtcggtagccgacagcctgacgcccaccgccatggtgttgcccactgcctcgcggatcgccttaaagacttccagcggatagcgcattcggttctccagcgaaccgccgtactcgtcgcggcgctggttgctgagcggcgagagaaactggtgcagcagatagccgtgggcggcgtgcagttcaatcagctcaaagcccagccgctgggcgcgcagcgcgctggcgacgaaggccgctttgatgcgcgccatatcggcatggctcagttcagcgggggcgcgatcgccatcgtgaaacgccacggcggaaggggcgacggtctgccagccaccatcgttgagcgccagctgatggcctcccagccacggggcggcgcaggatgccttgcgtccggcatgacccagctggatccccagacggatcggcgaccaggcccgaatatcttcgactacgccgcgcagggcgttttcggtttcatcatcccacagccccagatcccccggggagatacgccccgcaggctctaccgccgtggcttccagaattaacaggccggcgccggagaaagccagttggccaagatggatccggtgccaggaggtcgccttaccctcgtcggcggagtactgacacatcggggcgataacgatacggttatcaagggtgagttgaccaattcgcgtcgcgctaaaaagatgactcatgaatacctcgtaaatgttaaacgtggtcgtgcaggggacggacagttgctgtttatagcacgcctgttcacccccccagtattcggatattgcgcttaagcgctccgctattcgatataccagagacggcgccgtcggccggcggcctgctgcgacacggcgcgggccattgcgctgccaatctcggcgctggccgtcagcccctgcacaaaggggcgatcgtgcatcagccagggaagggcgccgaaggcgacccgaccgcgcactgtctccggcgcctgcagcgtgtagtcatcaccgacgtccggaatgtcgtcgccgcaggccagcagctgctggcgcagtgaagggaagggcagatcccgagttttcagcgctttttgtccgcgggcatcgataaagacatcgaattcgcagcgctgacgatgatgaacaatcagcgtccggtcaggctcccgctgcagctcataatcttcgcccagcgtcaggatccgcagaatgccggcccggtgcagggccagcagccgacgtatggactccggcggaatggcggcgtagttatcgataaatacccgggcgaggccctggcggaagcgacggctgtccgcgtcgttgaactgcggcaccacggtttcaatcgcctcatgcaggcgcagaatggcatagcgccagggcaccgtgtggtgttcgcgcttattgcgctccacctcctgcagattgcgctgcgcccactgaaaggggtcgtgggtgaggcggtcggcaaaccaggcgtcggcgatacagtcaggcgtcagctgacgaagcccgatcgcctcgctccagtcgggggcggcatattccagctctttaacgatcagctcaaaaatccgatctaacagagcgtcgctaccctccgcaatggccgcttcgagggcggcgggagtggcaatctccagcggctcccacgggatcgggcagtaaaaatcggcctccggcagcacgccgtggcgtgacatcagggtgatctccagcgcttcgctgcctggatggagggaaaaatgggtcgttttgtcgtcctcggtatggaaaacgccgtggcgggccactaccgccacggcggcatcaatcgcgcttaatgaagtcccaaggatccccacccggcagggggcaatgcgggcctccatcaggccggtccacgggctggggaagtactgtcggctggcgcgctcttcttcaggccacagatggccggtggcaatcgccaccaggtcgacgattaccgggtctgctgcactatcggtgtggatggcgatcccggtggactgaaccgcaatatccgtgacttcacaggattcacaaacgctaatcacaaagccgacgtcccgggcccgctcaacgaggtaaagaaaacggtcgcgatagtattcgccgaggataacccgcggcagaaactggcgctcatgcagggcgtgccgttcaagcccgcgcgccgccagccagttctcgctttgctgctgcagccattgcaggtaggtcaggtcgatgggggggatctcaatgctggcaatattggccagcatttgcgccgcggtattatcgtcactgtagggcatacccaccccggcctgcgcctctttttcaaacaaggtgatggccagcggctcaccgcgcttcaccagttcataaaaggtgtaaatccccgtcggccccacgccgacgatggcaattctcttcatgattctctcccttcctgtgggcagatgcggcattgatgacgcttcgcttaagcgaacctggttttaattctggtcgaaaattaccgaaccggtgaggggaacacgcaatttgaaacaaattagcatgctaataaacttgccgattgtcgtaaaaggggtgtaattaacaaaagagcaactttctatacaaacaatttacacaagcggtaaccccagctcgccctgctggacgccgcgcacactcccggcaatgccgtcgggatagggatgacaagatgcacggctggacctcacgacagcgtaatgcggcgatagccagttttttaagctggacgctcgatgctttcgactttttcctgttagtttttttactgagcgatatcgcccactcgtttcatgtcgaccttgaggaggtcaccctggcgattctgctgactctggccgtgcggcccgtcggcgcgctaattttcggcagggcggcggagaagtttggtcgcaaaccaatcctgatgctcaatattgtgttcttctcggcttttgagctgctctccgccgccgcgccgtcgttgatgctgtttttcctgctgcgggtgctgtacggcgtggcgatgggcgggatctggggcgtggcctcttcgctggcgatggagacgatccccgaccgctcgcgcggcctgatgtccggcctgttccaggcgggataccccttcggctatttgctggcggccgtcgcctatgggctgctttttgaacaactcggctggcgcgggatgtttgtcattggcgccgcgccggtgctgctgctgccgtttatctatttctgcgtcgaggagtctccggtttggcaggcggccaggcagaataaagagagtacggccctgctgccggtactgcgtagccactggaagctgtgcctgtacctggtggtgctgatggcggctttcaacttcttctctcacgggacgcaggatctttacccggtctttttgaaagttcagcacggcttcgagcctaaaacggtcagcatcatcgcggtctgctataacatcgcctcgatcattggtggagtgttcttcggttcgctgtcggagaagattggccgacgcaaagcgattatgatcgccgccctgctggcgctgccggtcattccactgtgggctttcgccagcggctcgctggcgctgggggcgggggcgttcctgatgcagtttatggtccagggggcctggggggtgatccccacctggctcaatgaactggtcccggccaacacccgggcggtgcttcccggcttcgtctaccagctgggtaatttgctggcttcggtgaatgccactctccaggcatcaatcgcccagcatcatgggcataactacggcctggcaatggccctggtggccgggacggtggcgattgtcattaccgtcctgaccttttttggtcgcgaaggccgggtgatccaatccgcaggagcgggacatcaccagccgctctccaccagccgttaacatttgtgaccgggcgtggccaggcgcccggtcgcatacattagtcacgcagacgaatagacgccgcctggcgtttctccagcgagcagatcccaatccccaccatgatgaacagcgcgctaaacagatgccaggcctgcggttgagtatgcaggaacaggatgctcaacaccccgccggagagggggatgatgtgggtgtaaatttcgccccgcgtggcgccaatggtggcgatacctttgttccagaacaaataggccagccacgatgggaaaattaccagatacgccaggccgctgaggaaaaacggctcgcgccaggctgcccagtcctgcgccgggtggcgcatcagccagaagatgacgattggcaccaggatcagggcgccgagcagcgagctgacggcgacaaagccattcgccgggatacggcggtccttcagacgtaacagcgaacagtagagcgcccagctcagcgccgaccccatcgcccacaggtcgccgacggcaaaggtgtgcagagaggcggcgtgcagcggatttccctgaaataagaggatcatcacgccgagggtgctaaaagccactccaagccagttacgccctgataccggatcgcggaaaaacagtcggttaatcaacagtaccatgctcggcgtggcggacatatagatggcggcgttgagcgcggaggtggtttgcaggccaatatagagcgtaagcgggaagctgacctggccacagagggtgagcaccaccaccgccggggcgtttgcccgcagcaggtggcgactgccggcgatttgccgtcggtagagcaggcccagcagcagcgccgtcagcgcccagcgcgcttcggtcatcaggatcggatccacgccctgcaccagcacgtgcccgacaacataattcccgccccagaacagagccgccagcgtcagtaacagataaggcatgatgattccttgtgtcgtttgtcactgtactgaatggtaatgttattgcttttataatatcaataatattttagtggtttttgttgtactcatttaaactttttaataaacaataaattgaaaatgcgtgtgaaatatacgttgccgcattatggacggtactataccgtatagtagccatgtatttcacagggataaatcatgcgtaacacagataatggggtgattggaagcgaccagaccgcggtgatggccaggctggcgctggatgagttaattgaccagcttctgcacagcaacgcgctgtcgctgaagctgacggccaacccgctggtggccgacagagcctggcatctcactgagaatacctgcatccgcgccttctccgctgacgatccacaggccaaaaagcgtgcgcaccacgcgctgttcattctttatcagtcctggcttgccgacccgctctcgccagcggctgccaatcagtttcatccgctgctttccgggatcagaaattacatcgagtctgagtggctgcgggcggaaagcaaacgcttccaccaccagagaccaatgcttaacgccggcaatatcgtcgacgaactgcgctccttatgccagcagcacccggcgtctcatcatccgctgttctatttccttgccagcgaggcctctgcggcgcaaatcgactatttcttcaaaagcgacagcgccctcaatctgcttttcttcgatctggtggcgatggggctggtgggctcgctgccggaaacccgcgctgagatggcgcaaaatctgtgggatgagataggccagggcagcaccgagatcacccacgttaatctgtataaggatttactgaagcggcggaatatcgcgttgccggacaatcattttgcccatttgtacgagtggcaggggctggccgggtataacgcctttatgctgggcggcgtaaaccgtcagcattattacaaatcgctgggggtcatggcgatgaccgagctgctcgacccgccgcagtatgaaaaactggtggcgggctgtcggcggattgggctttccgagcgcgacgtgcattactatgccgaacatatcacggtcgatatcggccatgcggacggctggctgaacaatgtgattgtgccgattggcaaaaaacatccggcggcgatggaggaggtctactttggcgccgcgctgcgtctgcaaacctgcaacgattactatgatggtctgctggcggccctgcagtcgctgggcggcagcttatcatctcacagcgtaccgccttctgagtagataagcgctttggccgcgctccaggcggtcacccctggcgggatctcccggcattcggcggactcggcctgctgggcggcgatggcgccatcgatgagcatcaccatcatcatggccacccgctcggcaggttccggttttaacacctgcaggaggatatcgcggaagaactgccagaggagcgacttaaatcgggagcattgctcccggatcgccggcgatgacgcaccatattcaaacagcgcgcgagtaaacatgcagccgtggaacgtttcgcaggtaaaccagcgatggtagtagtcgaacacggcgaacagcttttcccgtgcgctggctttatccgcggtgatctgcgccaaatcctgcataaattcgctctctttctgcttgaggatagccagaatgagcgcctctttatcggcgtaatagcggtagaaggtcattttggagatgccagcatgttcagcaatccgctcgatgctgggcgactgatatccttcgcgattaaacagcgtgctggcgtggcggagaatgtccgcttgttttggcttcatgcgttttcctgtcgaatggttcgctgtcacgattgccggtgacacggccgtcctgcgacagcggtgcattatgccggatcttgccgccagacgggcaaaaagtaaatcagccgcggtttatgcggcgtcggttccctcaataaaaacaagattgcgtagacatacacaagtcatgtccttatgtttctgaaccgacgtattattcggacctttatacacataagctgtgaatgatgtactttctacaagaagagaagagatgatgttacccctgaccacgccccggttgctgctgcgccggttcagaacggaagatctgccgtctttcagccattatcgcaatctgccggaggtggctcgctttcagagctggacccactacggcatgacagaggcgacagccttctatgaacaacagcgttcgcaggcctttgctgaggatgagagctggttccagcttgccgtagagattcaggccaacggtgcgctggcgggagatgtggggatccacttcttagatcacggcagacaagccgagctggggatgaccttttcccctgcgtatcagcatcaggggtatgcccgggaagccatgcgggcggtgatggccttactctttgaacagttagcccaccaccggctgacagcggtggtagacacccgcaataccggcgcgatcaaactcctggaagggctgggctttcgtcgcgaggcgcattaccggcagaatatcttttttaaaggcgagtggggcgatgagtacctgtacgcgctgttgcgtagcgaatatcagtgaagtgacgggcgagccgtcacttctgcccggcggacgattagctatgctggcggataaagcgcgcgcgccacggttttagcacccacagcgcgagggcggcggtgacaaaatcaaggccaatcgcgcagctgaagaccacatgccagccgtgagtgtgctgatagagcagtgccgccagcggaccgccaaagattgacccgatgccctgcgaaatatacagccagccatagttgctggcggcatgctcgctgccgaacgtatcggtgagcgtcgacgggaagagcgagaagatctccccccagccaaagaacaccaccccggagagcaggacaaacagcagcggatcttcccggcacgccagccagagcatcatcgctaccccctccagcgcaaaggcgataaacatggtttgctcgcggccgaagcggtcggaaataaacccaaacagcggccgggttaagccgttggtaaagcggtctatcgttaacgccagcggcagcgccgccatgccaaacaccaccgcctggctaatgccgaaatcctcggcgaacaccgccatctgcgaagtgaccatcagcccggaagtcgacatcatcgccatcatggcgaacatcagccagaacagcggctggcgcagcatttcccgggaagtaaacgatctgctgctctgcgccaccgtttgactgacgggcagggagacagcagggggcggcagcttcagcccctgactggcgaggaagccgacgagggcgaaaaggatcccgaaagtcgtcatcgtatgttcaaggccgttagtggtcagcgacagggagatggggaaggtggttatgatggcccccatcccgtagcccgccgccaccgcgccggcggcaaatccccgctgctgtgggaaccatttgaccatcaggccgacaacgccgatgtagacgatcccggtcccgaggccgcccatgcagccataaaccagccagagcgttgccaggccattcacctgcgcggaaagcacccagctcattcccgccatcaccgtgccaatagcgatcagccgccgtgggccaaatttttccactaaccgcccctgaaaaggggaaaagaaggtctgcaggatgatcagcagcgagaaggtgacctgcaattctggcagaccgacgccaagtttggcggccaggggttttgtcaacagcgtccagacatattgcggactggagatggcggccatacagatcaggcccagcaccagctggcgccatttgccaaatttcggggtaaccaacggttcgctgagtgtcgtcatgttgttctccgttttcagtaagcaggcttccgtgaaacgcatccaccctggatgcctcacagaaaggggaaggttgcgaccgcagactggcgacctgttgtggccatatggcatacgttcttgtccacattgcggtatacaagcgaagagcattaaacgtgccatataaaataattttttatattcaagtagttaatgtaatgagggcatgtctgacggggggcggcatgatgaatgtgcggcaccagggcggtgcaaatgaattatcgcggtgcgctttgcctgctaactggcgtaggagacatcgtatatcctggactggcgctagacggacttcagtgcaaagccgcccaggcgggtcgaggctacgaaatcaccgcctggggcggctggcaagataaacgggaaatgaggctggcggtctacccgcttagtagcgaaaaaacgctactgtcccgactattttttgctttatgagctgggcatttattgtatggactctcgcagagagacattcttcctggtagaaagcctggctactacacacgggaagccttaccgccccatattaagctcatgccgcggtactggcccggactttgagcactgacggaatttcaatgaacttttcaccaggcttatcgttaagcagttcgagaagagctttaccggctttcaccccaatgtcatgccagggaaactcaacggttgtcagggcaggggaacagactgtcgataacactcctccgcctaaactcgcaatggctacggtattgggcaccttaatgccggcactgtggcaggccatcatacatccacaggccatttcatccgacgtgcaaattaacgcatccagatcgccccaggtaatcatcatatccttgaatatattgacgcctgtggcgatggtggatggcaaatgcgtggttaccacccggtgcggggagcggttcagagcgagcatcgccgtattccatccgctcagcaactggcgaaacattgtgttattagccggggtacagagcagtgcgatgttttttaatgaggcgtcggccagatgagtcacgatctgttttacggccttaccgtaatccacgccgatgcacatacccacagggtgggtatttagcgcgccaatttccagaataggaacatccacgttggccagcaactgggtgcagctctcaatggtatcgatattgaactgaataatggccgccgggttataggcgagcattttttcaaacgtcttttgttcactttgaccgtcatgcccggattccataaacatcatggtatatccgcgttcggtcagcactttttgcagcgcttcagagaccggcaaaaaacccggcgaagagaaggtgggaacgacggcgagaataagatcggaatggaccgacgccagattacgtgcctgcagattagggacatagccgagttgactgacggccgcatcgatgcgatcgcgaagctcaggattcactttttcaggcattctcagcgctcgcgagacggtcatggcgctcacaccgacaaactcagccacctcggttagggttatcttacccgttcctttacgtcgtttttctttcgggctaccgtccgcgtctaaactcttcaccaaaatcaccaaccgtttgaaaaataaaatataacgaaagtatatctgcgaatcgcattataacttaccacagcgagggggaaagcacattatagctagtgttagcggtaacgcactttttaacatttttctttgttagcgctaactttgggaggtgtatcacagttgcattttatttagctgtttatagtgcagcacatagaccccctcgggagagcatatgatcagagactggttaaccccggataaaattaaagtcattaactcaatagatagctgggaaaatgccgttcgacttgcagcagaacccttgctgatgcaagggtatatagccgggtcgtatattgaggcgattttgcaaagccataaagaacttgggccctattacgtattagctcccggcttggcgatgcctcatgcccgtcctgaacagggggtgttaagaaatggattatcgcttcttcatattaaagaaggggtgtcgttcggctcggaagagaacgatccggtatacgtggtaatcatgctatgcgctcgttccgggaatgaacatatcacgatgatcggtgaactggctgaaatctttagcgatcagcaaaagttacaccgattgttaaatgccgatgatagcaaggcgattcaggccgttattgactgaaggaaaacagaatgaaaaaagtgcttatcgtgtgcggtaatggtttaggcagcagcttcatcgttgaaatgaatgtcaaaaagatccttgccgaaatgaataaagaagctgaagtcgcacataccgacctgacgtcggcaaaaagcgaaactgccgatcttattcttagcgccaaagacattgcagaacatcttagcagtcactctgcaaaggtcgttggattaagtaatttacttgataacaataaaattaaagaaattttagcagaaaacatttaagcaacggctatctgattcgtggagtttatcatgcttcattttcttatttatgatgtgctaggaacaccggcgatactggttggtttattttcactgatcggtctgctgttgcaaaaaaaaggaatttcagacgttatttcaggcacgctgaaaaccatcatgggttttgtcatattgaccgccggcgccggtattatagcctatacgttaaccatctttagccagttatttgagcattctttccatattcagggcgtggtgcccaacactgatgccatggccgctctggcgcagaagaattacggcacggaaaccgccaccattatggtattgggcatgctgatcaatatcgccctggcgcgtctaacgccattaaagtacatctttctgaccggacatcatacgctttatatggctgcgatgctggcggttatcctgtctgtagggggcttgtcagggggatgggtggtggccatcggggcggttattctcggtgcgatgatggtcatctccccggctatcttgcagccgtttacccgtaaaataaccaacaccgacgatctggcgctcgggcattttggatctattggctacctgctgtccgcgctggtgggcaaaattattggtaaaggtagtccctcgattgaagagatcaaagtacctaagtcgctcaatttccttcgcgactcatcggtggccatctctctcaccatgatgattctgtttctggtgctggtgctcgttgcgggcaaatcctttgtcgaggagaccctgagcgctggtcagaactttattatcttcgccattattcagtccctcacgtttgctgcaggagtttatatcatcctcgccggggttcggatggtgattgcggagatcgtcccggcgtttaaagggattgcggacaaactggttaaagacgcgaagccggcgctggactgtccgacggtgtttcccttcgctccgaatgccgtcatcgtcggcttcctcgcaagctttgtcgcaggactggtcagtatgttcctctgcccgctgttcggcttgagcgtcatcgtcccgggcctggttccccactttttctgcggggccacagcgggggtttacggcaacattaccggcggacgtcgcggggcggtggtaggggcttttgctcacggtctgctcatttcgttcctgcctgccattctcttgcccatgatgggggatatgggactgggctccacaacctttggagacgcagactttggcgttgtcggcatcgtgctgggtcatatcatcgcaatgtttaactaactatttatcggaggtggtttatgagcgctaaattttcaccgtcactgatgtgcatggatttaacgcagttcaaagagcagatcacggcaatgaataaaaaagcggatttttaccatgttgatataatggatggcaattacgtccgcaatatcacactgtctcccttttttattgagaatctgaaaaaaattactactgtgcccattgatgttcatctgatggtgaatcatccggaagatatcattcccatgtgtctcgaggccggcgccgatatcatcagctttcatcccgagacggcgaataacaaaatattccgcctgctgaatcagatcaaggatgcgggcaaaaagtgcggggtggtgctgaacccggcgacaccggcagaaagcattgccgaatatgcgcatctgctggataaagtgacggtcatgtcggttgaccctggctatgccggacaaaagtttattcctgagtcgctgaacaagattagaaagctcatcaacatgcgcaaaaataatggctataactatctgacggaaattgatggctcttgcaatgagaaaaccttcggtcagattgctgaatccggggtagatgtctttatcgtcggcacatcgggtctgttttcgctccatgaggatgtcagccaggcgtgggacagaatgatcgagatcttccagcgggaaactgtcgctgcataacgggttatttctcttcgaaccacagtgtgtatttgaataagccttaaaagatctgcatcacgccagcgatgctggtttgttatttaacgaccactctatatgaatgcgggtgaattatggatatttcgacagtgcttaatgttaaaaacatcaagttaaatatgaccgccagaaccaaagaagaggtgatagaagaactcaccgatttacttatccaggatggcgccgtcaccaataaggaagactttattcgtgatgtctggttacgcgaggagctaggctctaccggttttgaaaaccatatcgctattccacatggtaaatcttccggtgtttcccgtaccgcattagccatcggacgcacgcaacatgccattccctgggagaccatggatggcagcgatgtccgctgtgttattttatttgcggtttgcctggtggatcaaaatgccacccatattcgcctgttggcacaagtgtctgggtcactggcggatgaagacattatcgctaaattacttgttgaatctgatccacataaaatcattgcgcttttcaattcagaaactgaaaacgccgatgcttaataccaacttgctaatatcgatttgtaatttattaaattaattaacggagaaacattatgaatattgtcggcgttaccgcctgcacggtggggattgcacatacctatattgcgcaaaagaaaattgaaactgcggctaaaaaagccggacataacgttaaaatcgagacgcaaggaaccatcggcattgagaacccgttaaccgctgatgagattgccgcagcagatattgtcctgcttgctgccgatgtcaaagtaacgggcgaggagagatttgccggcaagaaagtcgttaaagtcgcgacggaaacggcagtcaaatcccccaataagttgattgaaaaaatcagtgaaatagtcaattcataattttatttcggcctggcgactctacattaaagggcgtgacttatgtctctaaaacaaatatggcaagcagcaaaccctaaaggacatctgctgaccgctatctcgtttctgatccccattgtctgtggttctgggtttattatcgccatcggcatggggcttggcggaacggtgcaggacacgttaactccgggacaatttgatgtatggcaggcgatggccaccctgggcgccaaggcgcttgggctgttgccggtggtgatcgccgtgggaatatctggctcgattgccggcaaaccaggcatcgcgccaggatttgtcgtcgggctggcggcgaataccataagcgcaggctttatcggtgggatgattggtggctatattgcggggtatattgcgctggcgatcattaaaaacgtcaaggtgcctgactgggctcgcggtttgatgccaacgttgatcgtgcccttttttgcctccattatcagctgcctgattatggtctatatcatcggtacgcctatcggtatctttacggaagcgctgacatctttcctgagaagtatgggcacgtcatcgaatcttgtgttgggcgcagtgataggcgctctgtgtattgttgactttggcggcccgcttaataagacatgctttgccttcgttctcacgctgcaggcgcagggaataaatgagccgattaccgcgcttcagttagttaacaccgcaacgcctattggtttcggcctggctttcttcattgctaagcttctgcgtaagaacatctataacagtgaagaagtggaaaccttaaaatcggcggttccaatggggattgttaatatcgttgaaggctctatcccgatcgtcatgaacgatatcgtccgcggtatcgccgccgcggccatcggtggcgcgtgcggcggggcggtcaccatggtctatggtgcggatgcgacggttccttttggcggagtactgatgatccccacgatgtcacatccgatggcaggcatcatggccctgctggtgaatatcgttgttaccgccacggtctatgccgtcatcaaaaaagatatccctcgcgacgtgattgttgataatgattacgaagaagaggatatcgacctggatgatattaaagtgagctaacgtatcccagggttattttaaatcaacattaagctcttcctgtaagaacatcagcccatgactaagcattacttagtcatgggctactctttgcatctgtcatccccgaagaaaaatggagcagggtaagcagaagatcaggggaaataatcttgttgcaaaaatgtgaacccttcagtagccttgtctctttcggagacaggaaatgctcgtcactgattcacttcttgcttacaccctcgctgctacactgcttaccctgacgccaggtcttgatactgctcttattctccgcacggcgactgctgaagggggacgcaaagccttgcatgccgcgttaggcatcgatctcgggtgctttatctggggcgcgctggtggcctttggtttaggtgcgctactggcggtttctgagttggcttataccttgttgaaatggtgcggagcgggctacctttgctggctgggcatccagttgcttctgcgcccgcgccagcaatttaacacccactcggccgaatcagattccacgagtaactggttcctgcgtgggatgctggggaatgtgcttaaccccaaaatgggcgtcttctacgtttcgtttttgccccagtttatccctgccgggcattcacccgtgagctggacctttctcctggtcaccatccatgtattgattgggacgctgtggtcattaacgctgattactgccactcgctatgccgccggcatcctgaaaaaaccagccgtggtgaaatggatggaccgaacgaccggctgcctgtttctgttgtttgccgcgaagctggccatgagtcggcggtaatctccggtttcgtcctcccggggggcaatgcccgctttcatccggtgtcgccttgccggaatacagactttcctgccataccatggcaaatttcctgcactttgacgctcattgattatactttgatggcagcttgtgctgcctcaagcagttgtcgcgatggtggatatcaaaaccaatatcccgaacattgggtcaacggggccgaggaacatgtgttcatgtaacagtcgtggaggtatggaaagatgggattattaaattttgtgaaagaagcgggcgagaaaatatgggatgccgtctccggcgacagtaaagaagatcgggccgataagctgaaaaaacatatcgatggacttaatctgcctggcgccgaaaaggtcaatattgatgttgcggaagatggcaccgcaacggtcactggtgatgtcgcttcgcaggaggataaggaaaaaattctggttgcggtcgggaatgtcactggcgtaggccaggtcagtgacggcgttaaggtgacgcaaagcggggcggaaagtcgtttttacacggtcaaatccggtgacactctgagcgcaatctcaaaagcgatgtatggctcggccaatgagtatcaacgcatttttgaagccaataaaccgatgctgacccatcccgacaaaatctatccgggtcaggtgctgattatcccggcgaagtaggccactcagcagcaacatcagtgatggcaggaaaacttgctttataccgctgtcggaagccgccgcggacatctattcctctatcaacgacaaaagagccagcaagctggctctttgttcccccgggttcaggcgcttactgtgcgtcagccagtgccagtcgggcctcttcctgctcggtgattttacgctgttgctcaagttccagcgcgccgcgatgagagaggtagcagaagagtatgcagcagacgatcccgcccatcagcagatagaacccgccgtgccagcccattttatcgaccattacgccgaacaggctggtgcctaacgatgcgccaaagatatagctcataaatccgcgcagacccacggctgaaccgacggcaaagctggggacgatttccatggtctggaccgaggccagaaactgcgggacataaataaggcagcccacaatcgccgcgaataccgtgaccatcagtagcgattcgcttttccagtagccgatcagacagatgaagattagcgtcatacagattatggctaacggcatccggcgccctttaaacagcttgtcggagagccagccggccagcagagtagacggaatcgccgcccactcaaaaaacaggaatgcgacgctcatttgttctttggaaaaatgtttcaccgtcagcaggtaaattggcagccagctgatcatgccgaaacgcaccatatagacaaacacatccacaaaggagacataccaggcgtttttgttacgcagtacgtaggtacagaagatctgaaatgcgctcatgttctccggcgctttctggccgtgtttggtcttcagcaccactttctcttccggcatcatctctgccagcgaaggcagaccttcctcgcgcggcgaacccttacccagcaccagtacgctaatggcgaataccaccgccacgcaggccggtacaatgtagctggcgctctgccagtgctcggtgccgagaatggcgaatgcggcgccgacgatcggggcgacaattccgccgccgacgttatgggaaatgttccagaacgcccctacgcggccacgctcacggcgcgggaaccagttcgcaatagtaataaaagaggggccgacccccataccctgaaacaggccgttcaggacaaccagcgcagcgaagacccagaatgcggtactgaatcctaacccgacgttgacgatggcgcacagcaccaggccacaggccataaagactttcgggctggctttatccgcgaggctgctcattacgcctttactgatcccgtaggcgatgagcatacagctgctgagcaaaccgatctgcgtggcgctgaggtctaactgttctttcagatagggcgtggataaggtgaagttattgcgcacgatatagtacgccaggtatcccagaaatacgcttagcagcgcctgcatacggtatcgaccataggttgcctgaattttctcagcaggaactttattcgccgacgggcctttttttaataatgataacatgtcgtcacctgtatttatattgatatgaacatcaggagtaattaccccgaagggtgaaataagcggctaaaaaattcaaatcgtcgaaatgagtcaaaattgactcaaaataatgcagggacgggttgtttttgacccatctggcatgagcgagattttgcgtaattaattttgcgctgattttatgtccggcttgtgcggacactaacaaattgcctaatcattatctggtaatctttcccgatattcccggacgcccgtttgactatttttccgctcgcggcgattaattcaccagatgtcataaacgggtaagttttgtctcaacgcggtttttacggtatttcaatatttatgaacgggatcacaaacatatttcttcgtggggtcgggataatgagcaaaatgttcgcgctgctgctgctgagcgcatggctgagaccctgtgcggcgcaaggcaatgagctggtgatggcgacgacattttctcccagcgccaccgtgtggattatcgatcgctggcagaaagagccggggtcggtgatgataaggacgctcaaccgcaccagcgcctcgctggaacagttgcttgatacggcaaatgccgaaaatgtcgatctgatcctgacttcgtcgccgatgctgctgcagcatcttcaggagcatcaaaaactggcgccgttcagcggtgcgccggcagtcagccaacatctggtgccggaatccattcgctccacctccgtggccgtggcgatctccgggttcggtttgctgatgaatcgctcagcgctgatgacccggcatctgcctgcgccagcggactgggatgacctgaccgatccccgttatcagggggcgctgctgatgagcagtccgtcgcgttcggataccaaccatctgatggtggagtcgctgctgcaacaaaaaggctggattaaaggatgggaaacgctgttgacgacggcgggaaacctcgtgaccatttcatcccgtagctttggggtggcagataagattaaaagcggcctgggcgtgactggtccggtgattgataattacgccaatctgctactgaacgatccgcacctggcttttacctatttccctcagtcggcggtttcgccgacctatgtcgcagtgcttaaaaacagccagcacgccagcgaagcgcggcggtttattcgctatctgttaagtccggagggccagacgatcctcgccgacgctaataccgggaagtatccggtaacaccgctggcgccaggcaatccacgggcggcgcagcaggcgatgctgatgaatcaaccgccattaaactatcgattgatcctcaaacgtcagcgtttggttcagcggatgtttgatacggcgattagctttcgtcttgcccagctcaaagacgcctggcgagcgctgcatagcgcggaggtccgtcttaagcgtccgctgcccgagatacgggcgctgctcacccgtgtcccggtggatccggccagcagcgaggatgaagcctggctggctcagttcgacaacaaaagttttgcggaacagcagatgatggagtggcagctctggtttctcaacaaccagcggcaggcgattactaaactggaagaactgaaatgacggacaggtccatgctgcaacgcctgcggcaaatcagtatcagtagcagtctgcgcggggcatttctgacgggggcgctgcttacgctgattgtcagcagcgtaagcctctattcctggcatgaacaaagttcgcagatccgctattcgctggatgagtattttccgcgcatccatgcggcttttctgattgaagggaatctcaacctggtggtcgatcagctcaatgaatttctgctggcgccaaataccacggtacgactgcagctgcgcaaccagattatccagcatctggacaaaatagaacggctaagtcaggggttgtcgccggcagaacgccagcagttgggggtgatattgcaggacagccgcgcgctgctggcggaactggatcgcgtgctctacaacatgtttctggttcgtgaaaaggtgggagagcttgcggcgcggatcgactggctgcacgatgatttcaccaccgagctgaattcgctggtgcaggattttacctggcaacagggaacgctgctcgatcagattgaagcccgacagggggatgcgaggcagtatctgaaacgcgcccgggaagtgcagaatgaacagcagcaggtctataccctggctcgtattgaaaatcagatcgttgacgacctgcgcgacaggctcaatgaactgaaatccgggaatgatgacggcatgctggtggagacgcatatccgctatcttgaaaacctgaaaaaaacggcggatgaaaatatccgtgcgctggatgactggccgagcaccattaccctgcgacaaacgattgatgagctgctggaaattggcatggtgaaaaataatatgccggataccatgcgcgactatgttagcgcgcaaaaagcgctcgtggaagccagccggtccagagaagcgacgctggggcgcttcagaacgctgctggaagcccagcttggcagcagtcaccagcagatgcagatgtttaatcagcgtatggcgcagattgtccgggtcagcggcgggttaatcctggtggcgaccttgctggcgctgctgctggcatgggggctaaaccattattttattcgctcgcggctggtgaaacgctttaccgcgctgaatcaggcggtggtgcagattggtctgggccggaccgaggcgaccattccggtttacgggcgcgacgagctgggacgtattgccggtttgcttcgtcataccctgggtcagcttaatgcgcaaaaacagcagctggaacaggagattggcgagcgaaaagcgattgaggccgatctgcgcgccacgcaggacgagctgatccagaccgctaaactggcggtggtggggcagacgatgaccaccctggcgcatgagattaatcagccgctgaacgcgctgtcgatgtatctttttacggcgggaagggcgatcgaacagggacaggcggagcaggcgcggacgacgttaagcaaagcagaagggctgatcaaccgcattgacgcgattatccgctccctgcgccagtttacccgccgcgcagaactggaaacgccgctgcatccggtcgatttgcgtcagacgtttaccgtggcgtgggaactgctggcgatgcgtcataagcctcagcaggggacgctggtgataccggatgacactgtctggatcctgggggacgaagtgcgcgtccatcaggtgctggtgaacgtgctgtccaatgccctcgacgcctgcccgcacgccgcgcaaatcaccgtgagctggcaaatccagggcggaaggctgtgcgtgttgattgccgataacggccctggctggcctgcggccttactcccttcgctgttaaagccgttcactaccagtaaaaccgtggggctcggaatagggctttcgatatgtgtttcgctgatgacgcaaatggaaggggcgttgcgcctggcgtcgacgtttacacgcagtgcctgcgtggtgctggaattcaatttgacggatgtaaaagatgttgagtaataactgttcgattctgctgattgacgatgatgccgatgtgctggatgcctatacgcagctgcttgagcaagcggggtatcatgtcagtgcctgtaataatccgtttgatgcgcgggagcaggtgccgaaggactggcccggcatcgttttaagcgatgtctgcatgcccggctgctccggtatcgatttaatgacgttgtttcatcaggatgacgatctgctgccgattctgcttatcaccggtcacggcgatgtgccgatggcggtggaggcggtgaaaaaaggggcctgggatttcctgcaaaagccgatcgatccgggcaagctgctcacgctggtggacgccgcgcggcgtcagaggcaatcggttatcgcccgtcgccagtattgtcagcaaaaattacaggttgagcttattggccgcagccaatggacggttcggtatcgccagcgccttcagcagctggcagaaacggatattgcggtatggctttacggcgagccgggaaccggccgcatgaccggcgcgcgttacctgcaccagttaggacggcacgctgaaggtccgtttatcgcctgcgagctgactccggctaacacccatacgcttaatgaactgatcgcccacgcccagggcgggacgctggtcttaagtcaccccgagcatctgactcacgagcaacagcatcagctggtacagctgcagagtcatgagaagcggccttttcgcctgattggtatcggtagcgcttcgctggtggagttagccgccagcagccagatagtggcggaactctattactgcttcgcgatgacgcaaattggctgccagcctctgtcaaagcgacctgatgatatcgagccgctgtttcatcactatttgcaaaaaacctgtcaacggctgaatcatcccgtcccggaggtggatgctggtctgttgaaggggatgatgcgccgggtgtggccaaataacgttcgcgaactggcgaacgccgccgagctgtttgcagtaggggtattaccactcgcagaaacggttaatccgctgatgcacattggcgagccgacgccgctggatcagcgggttgaggacgtcgaacggcagatcatcaccgaagcgctgaatatccaccagggacgtattaatgaggtggcggagtatctgctgataccgcgtaaaaaactttatctcagaatgaagaagtatggtctgaataaagagcactacaaaggggtttagggcatcttgtcagacgatggttgaaaattatgaggacagatacagattataaatgccttcaagtcagcagaggcgatttatgttattgtgactgcttaaatttccttaaaaggtgtgactgttgaacatgcgaatattgactgtagttgattatgatgaaatgtggccgactttatttgagaacgaacgtactctgttgcagatgacgcttggtaaagtgatatcccggattcatcatattggtagcacctcggtgcctggattatcagctaagccagtaatagatatattaatcgaagttgctaatcttgaagaactggacagtttgaatcaggcaatggagggtgtaggatatactgtgcgtggtgaaaacggcattttaaatcgtaggtactttacaaaaggtggaagtcagcgtagtcatcatatccatgcgtttaccaccggggatgctcaaatcataaaacacctggcattccgtgattaccttattaaacacaatgacgtagccattcagtacgctttaatgaaaaaaagcgcgatgttattatgtgaaaatgacagccaccgatacagcatttataaagcggatttcattcagaaacatcttcgtatggcgcttattgatgcgggtcacctgggctagccttcaaataaactacaacccatgttttttttgtaatttttcacagcgttacctcttgtttctccattattagcaaacagcacgccttgcagactccctgcggcttcctgcaactgagcattctgaataagcgacggggcgataaagccgataacgcatcgttcagtatggaggcactatttcacaaccccagcggcctgacctcctgtatgaactcaatcagaaggcgaagcccggtcggcaattgccggcggcttgaataatagatatgaaaaccttcctctagtggggaccattccgtaagcaccagacggagccgtccatccttgacatagggtgcaacaagaggctccggaaaatacatcaggccagccccgcccaatacggccaccagacccgtttcggcatgattgaccgtcactgagcctggcactgtcatttggtatgtttcgccgtctcgcgcaagttcccagcgataaacccgatcgtcaccgagacgattgctgatgcagcgatggtgtaataaatcatccggatgttcaggcgttccgtagcgttccaggtaatcaggggaggctgcgataacccagcgaatatcggcagataaacgccgggcaaccatgtcctccgggacggtgccaccatagcggatgccggcatcgaagcccgcatcagtcacgtcaaccatacggttgctggccacaatatcgatttcaatatcgggatagcgatccataaaagcgggcatgaccggcgcaagcaaaagatttgccgcttcaacggctgcattgatgcggatacgtccggtaggggtattgcgataccggttaagcgattcaagcgcgccttctatggtgtcgaaaggctgaagaacagactgaaccagttcctcaccagctgccgtaggggtgacgctcttggtcgtgcgattaagcaggcgaactccgagccgggtttccagtcccttcagggcatgactcagcgctgatgcactgacgcctaattcaattgccgcacggctgaagctgcgatgacgtgcaatcgccatgaaataaataagatcggcaacatcagctctgcttatttgcatacagaatagttttccttatgcggcgttaaaacccgaatgcgttgatgaagaaatgatatacaccttagaccgattagggctaatccattgctgaatttttttcacaagtccattcatgcacgtccactcactgtacacgttgtgcttcgttattcttgaaaatcatgcgctctggctggtaggccagggcggaacactcatctaacggagccgtttatgaactatacgcatcttggccgcaccggcctgaaagtcagccgcctttgtctcggaaccatgaattttggtgacgtcaccgacgagaagaccagcgcccgcattctggatgaggcgcttgaggcgggtatcaatttcattgatacagcagacgtgtatggcactgaacaatctcccgatatccagcaaggctcggggctgtccgaggaaattattggtcgctggcttcagcagggtggccgccgtgaacgcatcgttctggcgacaaaagtctatcagcctataggaccgggcccgaacgatcgccggctttctgcgtatcatattcgcaaagcctgcgaggacagtttgcgacggcttaagaccgaccatattgacgtctatcagatgcatcacatcgatcgtcatacgccgtgggaagagatctggcaggccatggaactgcttgttcagcagggaaaggttctttatatcggtagcagcaatttcgcaggctgggacattgcgactgcgcagtcagtcgccacggcccgtcatttcctgggcctggtcgccgagcaaagtctttataatctgacagcccgcaccattgagctggaggtcattcccgcatgccgccattttggcctggggttgatcccctggagcccgcttgccggagggctgcttggcggcgtactgaaaaagatggcaagcgggcgccgtgccaggcccgcgtttgcccgtctaatcgaacagtatcgtccgcagctggaagcctatgaaggattatgtgaggacctcggcgaaaccccctccgatgtggccctggcgtggctcctgcagaatcctgtcgttaccgctccactgattgggcctcgtacggtcgaacaactccagcaggcgcttcacgcaacgacagtcacgctatcagacgacaccatgagctgtctcgacgaaatctggcccggccccgggggagaagcgccccaggcttatgcctggtaatgaccaattaatgaatcctttcttcgttatagggagttccagtttatgagcaagatgatgcatgaccagccttctgctgccgtacccgcttcccgggaccggcgcaattttctgatcgccggcgccggtctggcgttggccgcaaccacccttggcaggagcggcgccgtgatggcgaaaccggctggtcaggacacgccgaacgccccttcggatgctgctcccgtccggaaggaaaccttaaccacgcgtaaactcggctcgctggaggtgtccagcatgggactcgggtgcctgccgatggtgggttattacggcggaggtccgcgcgatcgtaaagccatggtttcgcttatccgggcagccttcgaacaaggtatcacgttctttgatactgccgaggtctacggcccccatctcagtgaagaatttgtcggggaagcactggcccctgttcgcgatcgtgtggtgattgccaccaagttcggtttcggcgtggaggaggggaagcccacttcccttaacagccatcctgaccatatccgccgcgccgtagaaggctcgctaaagcgtctgaaaacggaccacatcgatcttctctatcagcatcgccccgatccgaatgtgccgatcgaggatgtggcggaaaccgtgaaggcgttgatccaggagggtaaagtgaaacactggggactgtcggaagcgagtgccaggacaattcgccgcgcacatgcggtactccctgtgactgcggtgcagagtgagtatgccatgtggtggcgggaaccggagacgcggatatttccaacgctcgaagagctgggtatcggtttcgtaccttactgcccgactgcccgcagcttccttgccggagcagtcaatccaagccagcggttcgacagcaccgatcggcggcataacctgccacgcttccagcccgatgccctggccaaaaacatggtgctgcttgaatttgcgcagtcgtgggcccgtcgcaaaaacaccactccggttcagttcgcgctggcctgggtgatggcgcagcggccctggattgtccctatcccgggtacgacgcaatatccgcacctgatagaaaacagcggcgcaccgcaagtccggttgacggacagtgagctacgcgaaatcgatgcggcgcttgccaaaatcccattgcagggcggccgcgccgatccgtttaccgaaagtcagtttgataaaagttaatacctgctgtcacagggagactgcaggtgaagtctccctctgtattattgccggggataaaccacatgaatggactaaatcataacgcgcttacatgcagtgccgtccccataccgccctgggagcgttctcttcagaccgtggaggcccagccgtacttcaacgtttcacaggcgtcgctcgtgctcgaagggatcgtgttcgatcggaacaataacctgctgtttgttgatgtggcgacggggcgcgtgtttaagctaaccccggagcggcagctttccattgtccttaaggagaattcattcggtgcttccggcctggcggtacacaaagatggacggatctttatcgcctcggtgggcgatatgcagcgaggttctgttcgggttatcgaacccaacggcacccgtgagcagatgattgttgcccctgatactggatttcttgtcaacgatctggtctttgataatcagggcggattttatttcactgacagccggggaaattcagccgatccacagggtggggtgttctacgttagtcccaatgtcgggtcaattcatgccatcctgcctggactcgcggtcgggaacggcatagcgattgaccccgccggctctcagatatgggccacagaacacgctaaaaacaggcttcatcgcgtaagactgtcagacgccaccacggtcgccccgtttggttcagttgttacctatcagttcaccgggccggcgccagacggggcccgtgtcgacagcgaaggcaatgtatatgtggccatctcaggccagggccgcgtcatggtcttcaaccacaacggactgcctattgggcaaattgtgctgcctgaccgcgacaaaggccgtaaccttaaatcgacaagcctggcgatccgccccgggcatcgcgagttgtttattgtcgctaacagcgggaccgaacctggtggagcgatgatttttcgatcgggcgcattcgcgccggcaccgtttcccttttcacatcagtgaccgggaatgagtggtctgggagacccggcaacgccgggccaggacagggtgttaatagttctggatcgctgaaggcggcgtgagggaaggcggcgtatccggaagcgggggaatgatcccgtcaacggggtgcggcagatagcgagcttccagttccgtgatttcggcatcgctaagtgaaaagtccagcacgctgatagccgtggaaagatgttctggtttcgttgcgccaatgatcggtgctgtgatgacggattttgataacagccaggcaattgcaacatgagctcttggcaccgcgtgcttttcggcaatgctggcaacaacatcaatcacgggcttatccagaagggctgcgttctcatacatttttaacgcaaaggcatcgttttgcgttcgtcgggacgtgacactccagtcgcgcgtgagcctgccgcgtgccatcggactccaggggatcaccccaacgccctggtcttcacacaggggcagcatctcgcgctcttcttcccggtaaagcaggttgtattgcggttgcatcgtgataaatcgggtccaaccgttacgctcagcggtatgctgcatttttgcaaagcgccaggcttccatagaagatgcgccgatataacgcgcttttcctgctttaacgacgtcatgcagagcctccatggtctcttcaacaggcgtggagtagtcaaagcgatgaatctgaaagagatccacataatccatgcctaagcgcatcaggctatcgtcaatagactgaaaaatggccttgcgggaaagaaacccggtattgggtgagttgcgccacggaaagaaggtctttgtcgctacaacgatctcgtcgcgtctggccatctctctcagcgcttttcctgtaatttcttctgaactaccgcccgagtagatattcgcggtgtcaaaaaaattaatgccggcttcaagcgcctgacgaatgagcggtcgtgacgccttttcatccagggaccagggttgaggcaaacgttcaggttcgccataactcatacaaccgagacaaagacgggagactttcaacccgctacgacccagattcacatacttcattcggtgttccttcttttattgccagcaattatgtatgtgacagggtattgcactggtatgaagggaaccagcatgcgccattgaatggtgttatgagttttttcacaagtagacaacattctcatacgccagcctaggcccaaagtcggtatagcgttcgcggataatattgagtgcgtaccgggcaagaccatcaggcagctggttattgctgggttatccacgacggcggttaggcatactcagtgggcctgattgattgtaacgctagagaaggcgtcggcactggcgatcgggaatacccaggcgctgcgcggccatctgagtggtcagacgctggtcgacaacgtcatgaatgatttagagtcggttaacttcatccaaagtaaaaatgccggtgcatgatccgtcatcagaatcctttgattgggaaactatctttgaaagcagtgatcgctgtggtgagactgtagcgcggacatgtctatttggtcagagacggacatctcaagttagctactacaacatgtgtcaaagctcagtgaaaatgtctaatcactggctcattagaaatgtccatatgttgaaaaggccgctgcgaaaatccctcccgcagcggcctctttagcataacgtcattatgcgaaccaattatggtttgagtttatacttctgaccattaatgatttttttgattaactcgaatgcagcgggggaatatttatgaacaccttccttccccgttttcactagcacatgatagttattatctgaggatttaatattaaaaccagtttccttgtgtattctttctaatactttatggacgtaatgccaagatcccatatcaagtaattttgcaagttcagatatggtgtagggatagcttgcgttaagtgcttgcccattatttaactctgcaattccataaagtttcgctaacacgttatcttgctcagcaatgttcttaagcatttcaaaatcatatggaagctcttgttttacaagagattgagaggcaaatgtataggttctggctaatagcgccctgactaattttgggttaacactgatttctggcgtatttgacgatagggcatcataaatccaaccgaaatcattggcatagatcactttgattcggatgcttttattttcaccaacaccaatcaaaatctctttctggtgtgaacctgtaccttcacattctggactaaaggaaaccaaataaatattcggaatcaaagcgttattcggcgcaattatctcatcaatatcagacaggatggctttaatattctcatcattaatactatagccaatgaagaacaacggatgctcgacgaaatatgttaaaagttttgcactgatatactttttacgcttataaaactcaacataatcttcatttgttataatgatgctttctggttctttactactgccgtgaatcttcatgatttcaccgtatgtagtatagttaacagtcacaacattatggccaactatcggttggtagttatcaaatatcttttcaagcagatcgtcatagtttgttgtaataatggcatggggccttactttttttaacttttcaatttcttcagtgtacttcattgctgaaaaatcaaccgagtctgaaaggttattcaacaatgttgcaatctcatgcttgatataaatatctttagagctttttccattgaaatactgttcaggataacgagatgtccccacatcccaagcccactcagcgtatgactcagaaaaatcacttgctatcaatggtttattgtcatttcttgtttgactgtagtaaccatacgggcgagtgattaatgggcaagtttcagcgagatactttaacaggttttcccaatcaggagctttcaagtagcgttgagatacccctgcacccataaagagaattggctgtacctgtaaaccttcaagacatgatttgatatcttcaattatttctgtctgatattcagagaagtccatactttagcctttaggatgtgagatgctggagtagtaaatcgccgcggagcggttcggggttcggggttctgtgacactcgaattttacctcggttatataatatcattgaagttatttgcatttctcagaaatcttctctggctttgattgctatagccgaaagatagcgcacacatcgccgttggtcagttagtacgaggtttccgccaagttcaccttttaccaaagatggcttcagagcttccctgaagctttatcatggcttcaagtaggtcatcttcgttcagtgagcgctgagatttgttgatgctaggggcgtgccgtctgcgggaaggctcatcaccagaacaaggtaacgattgtgagcgattattttcccgttttctctggatctgacgggcaacatccaacacatggccaagtctcttgttatctacaatggcgacggtctcaacctcagaaagctggtcataggtggagtagggcagcagcacgccatttagtcgcagctccttatgtccgtcaggataatgccagacatcaatgtacttgccgatggctcttcgactgtattcgctgtcctcaatcagatagaggattttatcgtattgtacagtcagactttttgatacacgccggggctctcgccaagtaaattccgcatcaaggtcatcgtctagtgccagtggccggtgcgcgttaaaatcatgcaagggcgctttggcaaagcgtcggttgtaatccgcaatgtattcttctgcaaatccattggccgcttctatagtacagattcccctaagcctgagttccttaaccagccggtcctgaagggttagatgagcacgttccacacggccttttgcctgactggtttctgcgcacagcggtgtgatattgagggagcgcatggccctggcaaactgatacagggtcgaccccggttttcaaaccagtggtggtcacagccatcaatttgtatcagctcgccagtacaaggccgccggtaacgaggctgatgaattttaggtgcgcgctgtctgcgtgggatccagagtccggcttttatcatgagacgtcggatgctttctttgccaaggaccagaccgtgaacttcctccagtttttcccgcgccagcgtggggccaaaatcacggtattgctccctgattatactgagagcctgatctgtcagtgacgctggcaacagacggttaccagtgcggccacgactctggttgttcatgccaagcggtccgagttgacgatagcgtttcagcagtcggctgcaatgacgtggtgtaatgccgagcatctccgcagcttggccaggacgcagattgcgatcgatgacatcctgaaggattttgaggcggttgatttctttcacgttgaacatcccggcgtcatgtatagccatagaaaactcctcatcaggaaaagtgagtcgttgtctagacatacaggtctgagaactatagcctggacattcctatgagccacaaatagacattagcattgagcctctacaacatgagtgcgcataatgtatattatgttaaattgccgaatgagggaatctacgtcacatatcgcatccactcctctgtatcgctcctcttcacgtgactcggtaaaacgcgccttacatccccgtccatctgggcggggttttacggcccacctgatatttgataccgcctgaacttcgcgctagagaagattctcttcatccagagaaatcacctgaatgccggcattacgatacgcctgaacatcatcaggcagacgatccaccaccaccgtgtcaattcgatctgcggcggtaaattgggcaagcgaggtgttattcagcttgctgtagtcacagacaataattacctgactggcgtgttccaccatgcctcgtttcgtttctgccagcatgatatcggccacgcaggcgccgtgtttcagcgacagcgaattggtgcccataaatgctttatcgacgtttagcgtgtcgagaatggaacgtccgttgatcgccaccacgcagtggtatcccttcttaacgatccccccgagcagaatcgtttgaatcgagggactggcctcaagctcccgggcgatttggtaatcattggtaaccaccgtgacgttctgtctgtcacgaatattgcgcgcgatatgtagcgtcgtggtaccggtatccagcacgattatatcgccatcctcaaccagcgccgccgcgcgctggccgatccgctctttcgcgctgagattgacaatttcgcgatcgtccgacgcctgttcaaagcttgcccgggtacgaagaacggctccgccgtgggttcgggtcagcagcccctcctcttccagctggcggagatcggcacgaatggtggcgcccgatacattaaagacgtcacacatctcagaaacagcaactttgcgtttttccctgagaataccgagtaacttctcctgtctttcttctgcaaacattctgcctctctcttttttacggcacgttacggcttacctttgcgtatcagtcgggccccacgctgagcgcatccagcctgtcgtataaggcggcggattgccggtacagcgtatcaaaaagctcgctgcaggcgtggtaataatcccgcagacggggatccggtgagatcactttgtcgaactgcaccgtttgccgcacgccgctggcaaaatcggcgtacaaccctacgccaaccccggcgataataccgcatccggtgacgccattctcctgattacgcgtagataatatcggcagattgtacgccgcggctttgatttcaagccacagcgagctgcgcgcgccgccgccggaagcgatcatttgttgcggatactgcccgcacttctgcagctgccgaagattgcgccaggatgcaaaggccaccccttccagaactgcgcggaataaatgaccgcggcgatgcttgcgctgcaggccaaaaaactgtgcccgcgagttcgtgtgttcggccagacgttctcccgtcagatagggaagaaacagcagcccttctgcccccgccggcaccgccgccgcttcctgtaaaagctgtggatgcgtaatctggttatcggcaagtgccagccgcgcccagcgaacggcatcgccgccggcgtcgaggatcgtaaatccgccccaggccgcgttggcaagatgaagattattaaccagcggatggtgtaacggccgcggcgacaccaccgtcatcagcgtcgacgtgccggttgaatcagacgccatccccggttcatacacacccgagcccagcagagaggccgccatatccgacgtcccggcaaccaccgggatacccgccggcaggcccgtcaggtcggctgcgcgctgcgtcacctggccgattatgtcgctggaaagtttaagctccgggagctgatcgacccgcagaccaaacgtttcgcaggcttgcgaagaccagctacgggtttcgctgtccatcaggaaatagcacgacgcttcgctataatcggtcgccatggcaccggtcagcatgaaattaatatagtccttcggcattaatactttggcgagctgcgaccagcgatccggatgattttcgcgccaccaggctaacttgaaagcgggccatgctgccgcaggcggattattcaaatgcgccagccacttttcccaaccttcgcgcgcgttaaaggcgtcaacttgcggctggctgcgcttatcattccacagcaacgccctatcctccaccagctcgccacggtcgtccagaaggacggtgccatgcatctgtccgcaagcaccaataaccgcaatttgcgctgccgtttcaggatagcggtaaagcacctcgcgtatacagtcgcaggcggcctgccaccataaagacggggcctgttctgaccaacctgcacgcggcgtggtttgctcatactctctttgcgcaaagccgatcatcgcgccgtcaatgcgcacaatagcggcgcgggtactgccagtgccaacatcaatcgtgagtattttatctttcatcactaactccggtgacgtcttaaggcgggccaccaggcccgcggtctctcagtttaatcggcgttcagctcgggaaaacgttccgggtgctgctccagttcagccagcaccttggttaccgcgccatggctcatgccaaagcggcgcacgccaagctggtacagcgcacgcaccgtggccagatcgcgaatgcccccggcgcctttgatatcgattcggcctttaagctggtcggcgatgatgctgactttttccaccgtggcgccggtgggcgcccagccggtagaggttttgacccacttcatccccacctctacggcaatttcgcacacgcgacgaatctgctcctcattaagatagtgcgtttcaaggatcactttggccggtaccggggcggcggcttccaccacgcggcgcaaatcttcgcgcacatagtcataatcgccggagagcactttgccgatattcacgaccatatccacttcccgagcgccgtcggcaatcagctgccgcacttcctgaaccttggtatcggtggtatgcccaccgccgggaaagccgaccggaccgccaatcatcacctctcccgtaccctgctgcggcagcaacgtactgagaaagcgcgtccagcaaggcagtacgtggacggaaataatgttgtatctggcagccagctcggcgcaggcgcgaacatccgcttcggtactggtggcctgaactgcgctcagatcaactaaacgtgcaaaacgacgggttgtttcattcatggtcttatcctgtcctttgtttttaattgctttcatttaatgctgatatttggcttaaatacatttaaaaacgcattaaatgaaaataacgtgatcaaattagcatttttttattttcatttgtttttaattagcagcaggaaataagcgttaaccttgcagagcaggcgtaatcgggcataaatgggcgcaaaagcaatcttgcatttatttttgtttgtttttgtttatgcctgaatcacgggcgaaatagcgcaaaccgctgacggaagtgaagcgaaatgcgtgcgctatcacagtgttcggctgcggatagcttgccttcgtgggacattcccgaggtctcaacgctctgcgcaagggaaaggtaatctgattatgtacttcaggagagagctatgttgccgctggaacgtcatcatttgattgttgaactgctgggccaacacggcgtcatgcgggtgaatgagattgcgcaagcgactcgggtctccagggaaacgattcgccgcgatctgagcgagctggaacgcaaagggatcttaacccgaagccacggtggagcgctggcggcggaaaatccgctgccggcgacccgggcggcggcatccgccctgccagttgaagatagccagggaagctttcagcacagaacgctgctgcacagcgaaggcaaaatgcgcgtggcccgtaaagcactgcagtttctccaaccgggacagaccattgtcctggacgggagtagcaccagctggtttttggcccggcagatgccggagatggcgttgacggtgattacgccctccattcgcatcttacaaactctgatgagccgacgctcgttgcatctcgtcgggctggggggcgatttctccccgaccgaagagtcgttcttcggggaaaccgcctcacgaacgctacgcgaatatgccattgatacgctctttttctcctgccaggggctggagcgcgatagcggcttgtatgcgggtacgcaagcccacgccgccctgctgaaacagatgctgctggccgcccgtcagactgtggctttggtcgacggcagcaagctggggcgaacaggcgtcgcgcgtatcggcggactgggcgagctggactgtctggtgactgaaaggtttgtcgatccgctgctggaaaaagagatgacctggcataacgtcagcctgcaaatcgcctgagtacgccgtcatgacgtgacggttaatacgcgcaatgtcgaaacgctgcttaccgcggcagggccagactttgcctgaattcagccaccaccggaataaatgaggccttatgcgttattacctttctccctcgctgatgtgtatggacatgatgaagctgacggaacagctgcgctttctaaacagcaaagccgacaggctgcatgtcgacatcatggacggccactatgtcaaaaatctggcgttgtcggccagctttgtggcgcagatccgtccctacacctcgcttcctatcgatgtccatctgatggtcgaagcgcccgcttcgtttataccggcgctgttagacgccggcgcagacgccttctcactgcatccggagaccatctgccgcgaagcgttccgggttatcaatatgcttcgtcaggcggggaaagaggtgggaatggtgctcaatcccgccacaccggttgagagcatccagcactatctgcatctgctcgataaggtgacggtgatgaccgtcgacccaggctatgccggtcagccgtttattcctgaaatgctcgccaaaattacgcagcttcatcagctcaaagagaccggcagcctccgcttcttgctggaagtcgatggctcctgtaaccgcaacacctaccgcgcgctgctgggcgccggcgcacagatattagtgatgggcagcagcggtttattccgcgctgatatgccgctcgagctggcctgggaaaccatgtcccgcgaactgtccgccgcgctgcactcccccgagctggtatagaggagcgaatgatgtcaggaaaagtctgtgtttttggttcattcaatttcgacatgatcgccagggtggatcgctttccggtaccaggtgagtcgttagtggcctgcggaagtatgaccagcgccggaggtaaaggggcgaaccaggccaccgccgcgctaaaagcgggagcaaatgtccactatatcggcaagattggcaatgacaccttcggccattttgcccgccgtcatctgaaaggcgtgggcttcaatgctgtgacgctgctggtcgccgaagagatccccaccggcaatgcgctgatttatgtcgccggtaacgatgccgaaaacatgattgccgtcgatcccggcgcgaatatgacggtgaccgatgatgaaatcgccggctgcattcccgctatcggctgcgcggatgtggttctggttcagctggagaacaatctttccgccattgaacaggtcgtagacgccggcaaacaagccggggccctggtgatgctcaatcccgcgccctggcagcccgttgagcgcgcccttcttagcaaagtggatttacttacaccgaacgccacggaggccgggttaatgaccggacgccgggttgacagtctggcggccgcggctgaggccgccgacgtgttgcatgctcagggcgcgcgcaacgtcattatcactctcggcgccagcggcgccctgctgagcgagcatggggtgaaatcccctattccctgctttccttctcacccccgcgacaccaccggtgcgggcgatgccttcaacggcgcgctggcggcgcggctggcctgcggggaaccgctacaggccgcagcccgattcgcggcggcctatgccgccgtcagtgtcgaaaaacaaggcgcctcatctttacctgagtacctggaggcacaggaacggcttctccgtgccgccgctgattatgaaatggcataaaccctactgtataaaaaacattaagaggatagctcaatgagtacgctaatcacggataaggtcgataacgcagcggtccaaaaagaaaaactggacaccagtgcgtatttaccccataccccctggctgcaatttttacttgtctgttgcctgtttgcgctatgggggatggcgggcaacctgaatgatattttgatcgcccagtttaaaaagggcttcgatttaacggatacccagacagcgctggtgcagtcgatttttttcctcggctacttttttgtcgccctgcccgcggcggcgctgattaagcgtttttcctataaagcggcgattattattgggctgtgcctgtacgccctcggctgcttcctgttcgttccggccgcacagatcatgacctacggcgcattcctcgcctgcctcggagtgatcgcctgcggactctcttttctggaaacgtcggcaaacacctactccagcctgctgggtccgattcaatcctccacccagcgtattaacttttcgcagatcttcaactcgctgggcgtgatctccggcgtattaattggccagctgatggtctttggcgaaaacgatccgagtcatgaacaactgctggcgatgcccgccgccgctgcagacgttgcacgccatcagatggttggtcaggtggtcgggccctatctgattatcggctccgtactggtggtgctggcgctggtgttcgtgtttattaaattcccgtcgtgcaagggcgcgcccgctcaacaacagcaactcccgacggaaagcatggggccaacgctgaaacgcctgtttgctatcccgcgctttcgcctcgggatcctgtcgcagtttttgtacgtcggcgcccaggttggcgtatggagcttcacgattcgctttgtgcagctcgtgcagcaaggcaccagcgagcactccgcgacttactggctgctggcttctctggtgatttacgccgtgggaaaaaccgtggccacctggttgatgaaccgtctgaatccggcgatgctgctcggaacgtttgccctggccgccaccgccctgttactgattgccgttttcagcggttcaatgctggcggtctatgcgctcattctggtcagcttctgtatggcgccatgctggccgacgaactttggtctggtgatcaaagggatggggaaagatacccagaccgcaggctcgatcgtggtgatgtcgattatcggcggggccgtaattcctctggtgatgggcattatctcggatatgaacggcggcaatatgcaaatcgcctttatcgctccgctcctgtgctttgtgtatgtcgctttctacggcttctggtgcgtgcgtaagggggtataacatgcgcgaacttatcaacacgattgctcatattggctatcaggtcagtgacttaacgcgttcgcttgccttctatgaaccgctgggctttcagcgccagcagcggtttagcaagccatcgccacagggcactattgaagttgcgttcctggaaatggcgggcgccgtcctcgagctgtatcagcttcccgctggaacgccctttgacgccccccgctgcggtatcgatcatctggcgctggaagtcagcgacctggatgcggggcagcagcggctggcggcgctcggttatccgctcgatgaagggccgatagaagaagacaacgtgcgcttcctgcttattcgcggccccgatggcgaacggctcgagttcgatgcctgtaaacgctaagcggcagggctgaccccttcactcttttaggcccggttaacacgggtctaaaagatagcgtcctctggcattattcacgtcggtttgattcgcggatatctctcccccacccggtctctcctgcccattgtgcaatgttacaaaattgcttctgttttgttgattttctattgtgagccattcggcaatttcctctcctgaatttcccctgactactcctactcaatacgcgatatcaggagagacacatgaacagcacctccgccgacttccagaatctgtaccaggccctgagccacagcgccgcccgcagcccggatgccctggcgctggcgtttgaggatcggcgctatctgtaccgcgattttcatctgcgggtacagcgggcgatggcgcagcttgatcgcggctggtcgctgcgcaaaggcgaccgtattctgctggcctggggcaatcaccccgctttttgcgaagtcctttttgccgcgctgggtttgggcatcgaagtggtgccgttcagcaccaagcttaagcaggccgaaagcgaggcgctggtaggccatatcgctccccgggttgtcctgttcgatgcgaccgtgcaggactggctgaaaaacacccccgacgcgcgtgcggtttcactcagcgaatggcaggcgctctgccttcccgaaccgctgacccgcccgccggtcccggttaaccgcgacgatacggcggtgatgatgttcacctccggcaccaccggagagcctaaaggggcgattatcacccacaataacctgctctgcgcgattgacgcctatacgcaaaaactgaatctcaccgccgcggatagcaccattctggcggtgcctatctatcacatcaccggcctgtcggcgctgctggcgctgtttattagcctcggcgcgagcatctggctgcagcatcggttcaatgccccgcaggtgatcaccaccctgcgcgagcagaacattacctttctgcacggctcgcccaccatttttatccttctttgtcaggctgcgcgtgagcagagcgccagccatcccggcgattttccggcattgcgcacgattgcctgcggcgcgggccacctgagcgatggactgatcaaggagttaaaaaccctgttcccgcataccgcgattcagccgatctacggcctcaccgaaacgacctcgcctgcgacgatttttccgggcgacgtctggggcagcgataaatgtggcagttcaggtcaggcgatcccgggtctcgccattaccatccgcaacgatcgccagcagcccctccccgccgggcaaatcggccatatctggctaaaaggcgatgtggtgatccgcgaatactggcagcacagcgagcgacgcccgagctgcgatgcgcagggctggttttgtaccggcgatctgggctatctcgacgacgaaggctggctgtacatcaaagaccgcagcaaggacatgatcaatcgcggcggcgagaaaatttactcactggagctggaaaacattctctctacctatcggggagtacgggaagttgccgtcatcccgacccccagcccggtctacggcgaagagcccgtggcgtttatcgtgccggatggccagcatcacctgaccagcgaagagatcctcgactggctcaaggtcaaaatcgcccgctttaagctaccggcgcgcattattttcacccgtgctttaccgcgtacccacaacggcaaagtgagtaaacagcagctcaaaacgcgtctcgcagaatccatcatcacgctatcaacggaggataaaaagtgagcagcaaatttatcgacgcccatgaggcggcgcggtgggttgccagcggcgacaccgtctgcaccgtcgggatgacgcttatcggcgcggcggagtccattttaagcgccatcgaagcgcgctttctgaccgcgggcgaaccgcgtgacctgacgctactgcatgccgcggggcaaagcgatcgccagcgcggtatccagcactttgcccatccgggtatggtgacccgccttatcggttcgcactggggcctggcgccgcgctggatggcgatgatcaacaacaacgaagtggaagcctggtgcctgccgcaggggcagatcgttcatctctatagcgcgatggccgccggactgccggggcggctttctcccgtcggtctcggtacctttgtcgatccgcgcatagagggcggaaggatgaacgcccgcacccgcgaacgacccaatctgatcgagcacgtcacgtttcgcggcgacgaatatctgttttatccggctcttcctctggacgtggtcattgtgcgcggcacccatgctgatgaagacggcaacctcacgaccgatgaagaggtgatgaagctggaagtcctgcacgccgttctcgccgccagacgctacggggcgaaggtgctggcgcaggtgaaatatcgcgtagcgaaaggctcgctgcatccgaaaagcatcaccgttcccggcaacctgatcgacgccattgtggtatgcgaagagccgcagacggatcaccgccagacttcaagctgggccttcgacccagcgctgtgcggcgatatccagctgcccgccgcgcaaaatgcgccgctgccgctggacctgcgcaagcttatcgggcggattgcctgccgctatctgacccccggctgcgtcatcaatctcggcaccggtattcccaatgacgtgattggcgccatcattcacgaggaacagctcggcgagcaggtcaccatcaccgtcgagtcagggatctacggtgggcagcaggcgggtggcgtggattttggtatcggccgtaatctgagcgcgatgattagccaccaggatcaaatgctctactacaacggcgcaggggtcgacatcacctttatgggcgccggcgagatggacccgcacgggcacgtcaatgccacacggctcggcgcatcctgccccggcgcgggcggttttatcgatatcacccagaatgcccgccacgtcgtgttctgctcctcttttaccgccaaagggctggagatcgcctgtgaacacggggcgctgcatatctgccgcgaaggcgaggtgcgtaaattcgtcgccggggtaaaccagatttcttacaacggcgaactggcccgcaccaaaggacaaaccatgcattacgtcaccgaacgggcggttttcgaactgcgcccggaaggaccggtgctgacggaaatcgcccccggcatcgatcttgagcgcgacatcctggcgcatatggattttcatccggcgatcgccgcggatcttcaggttatggacagccgtttgttcaccccgccgccctgcggtctcgcggaacatctgtcccggaattcatcctctgactcataaggaacgttgctatgaaacttgccagtaaaaccgccattgtcaccggcgccgcacgcggtatcggctttggcattgctcaggtgcttgcgcgggaaggcgcgcgagtgattatcgccgatcgtgatgcacacggcgaagccgccgccgcttccctgcgcgaatcgggcgcacaggcgctgtttatcagctgcaatatcgctgaaaaaacgcaggtcgaagccctgttttcccaggccgaagaggcgtttggcccggtagacattctggtgaataacgccggaatcaaccgcgacgccatgctgcacaaattaacggaagcggactgggacacggttatcgacgttaacctgaaaggcactttcctctgtatgcagcaggccgctatccgcatgcgcgagcgcggtgcgggccgcattatcaatatcgcttccgccagttggcttggcaacgtcgggcaaaccaactattcggcgtcaaaagccggcgtggtgggaatgaccaaaaccgcctgccgcgaactggcgaaaaaaggtgtcacggtgaatgccatctgcccgggctttatcgataccgacatgacgcgcggcgtaccggaaaacgtctggcaaatcatgatcagcaaaatccccgcgggttacgccggcgaggcgaaagacgtcggcgagtgtgtgacgtttctggcgtccgatggcgcgcgctatatcaatggtgaagtgattaacgtcggcggcggcatggtgctgtaaggagaaaaacaatgacccaggctaatgatattgtgattgtcagcggcgtccgtaccgctattggcacgtttaacggcagtcttaaacatacccatcagcatgaccttggggccgccgtcattcgcgaagcgatcgcccgcgccgggattgcgccgcaggatatcgacgaaacgatcgtcggcaacgtcgggcaaatcgccgaaagcggttttatcgcccgcatctgccaactgcgcgcggggatcccgcaggagagcaccgcctattccgttaaccgccagtgtggttccggacttcaggccctggcggacggcatgatgcagctgcaaagcggccaggtcgaggtggtcgtcgcctgcggcactgaaaatatgacccagctgccctactacctgcgtaaagcgcgcgatggctatcgcatgggccatggcgagctggaagatggcctgatctccattctcacctggccggaaggcccttatcacaacggcatcaccgcggaaaacgtcgcgcaacgcttcggtattacccgcgaagcgatggacgattttgcctggtcgagccagcagaaggcgctgaaggcgatcgcggagggtcgctttcgcgagcagatcctggcccttgaggtgccggacggcaaaaaagcgacccgcctgtttgcgaccgatgaacacccgcgcgacaccccgcgtgaaaagctcgccacgctgcgtccggcgtttaaagccgacggcgtggtgacggcggccaactcatcgggcattaacgacggcgcggcggcgctggtgatgatgacccgccagcaggcggaaaaacgcggcttaaccccgcgcatgcgcattcgcggctgggcggtcgccggctgcggggcggagattatggggtttggtccctctcccgccacccgacgcctgatggaccgtctcaatatagatgtgcagtccattgatttaattgaactcaatgaggctttcgccgctcaggcgctggcggtgatgaacgatctgcgtctcgacccggcccgcgttaacgtcaacggcggcgcgatcgctctcggccacccggtaggcgccagcggtgcgatcctgccggtcaaactgatgtatgaaatggcgcgcagcggtgcacgcactggtctggtcaccatgtgcatcggcggcggccaggggatttctatgctgttcgagcgcgaaggcgcttagcaaaagacggcccgaagtggggcttcgggccgggcgtcgttcgggtcagcacccggcgacaacctgtgagctgacgaacgggatcgtctcgatcccggcaaggcttctgaccacgaatacggggaaataataaccatgtccgcaataaatgaaaaggcggtaaacgggacgcagctgcaacgcacccataaaaaaatctaccgccatttgatgccgctgcttatcgtggcgtacatcatcagctttattgatcgtaccaatattggcatggcgaaagcgaccatgtcggtggatatcggcctttccgcaaccgcattcggcctcggggccgggttgttttttctcacctacgcagtgctggagatccccagtaacctgtttctcacccggattggcgcacggcgctggatagctcgcatcatgattacctggggcatcctctcctgcggtatggcgtttgtcaccgggcctacgtccttttacgtgatgcgccttctgctcggcgccgccgaagcgggactctatccgggcattatttactacctcaccctctggtttggccgcgaagagcgcgcaaaagccaccggcctgttcctgctgggggtctgtctggccaatattatcggcgcgccgctgggcggattgttattaagccttgatggcatgtccggctggcacggctggcagtggatgttctttatcgaagggctgcctgcgatagcgctggcgttcgtcgtctggcgcagactgccggataaaccagccgacgcccgctggctggacagcgacgatgtgcaagccattaacgcggtactggcgaaagaagccgaggaaacgcgccatacgccgagccgtttctccctgaaaaacgcgctgtccacccgagtctttttgttgctggtgctgatttactttacccatcagttttcggtttacggcctgagttatttcctgccggggatcatcggtagctggggccagcttactccgctgcaggttggtctgctgaccgccatcccgtggattgccgccgccgcgggtgggatcctgctgccgcgattcgcccgcacggaacagcgttcccgcagcatgctgatggccggatatctggtcatggcgaccggcatggcgattggcgccattgccggccacggtgtggcgctgcttggcttctcgctggccgctttcatgttcttcgctatgcaatccatcatctttaactggctcccgtccatcatgagcgggcatatgctggcgggcagcttcggcctgctcaactgcctcgggctgtgcgggggctttctcgggccgtttattctcggcgcgtttgaggaccgcaccggtgcggcaacgtccggcttatggttcgctgtcgcgctactgattatcggcgcgctggtgtccctgtttctcaaaagttcctcatccccaggctccgtatcggcgaaacaggcccacggcgaaaaagtgtaatcaggaggccattatgcgcattgaagtgttactggatttaaaaacccgactcggcgaaagcccgctctgggatgtcgaacagcagcgtctttggtgggtggacagcctcgacgggcgcctgttcgcctgcaacgcgcagggcggcgcgatcaagagctgggacgtgcgacagaaaattggctctttcgccctgcgccagaacggcgaaggcgcggtggtggcgctgcagaatggcgttcatctgctcgacttcgccagcggcgagctgacgctgttgcaccatccggaagcggaccgaccctttaaccggctcaacgacggcaaagtcgatcgtcagggacgctttctgttcgggtcaatggatatgcgcgaagaggaaccgagcggcgcgctatatcgcctggaccccgatctgtccctgcacgtgctgaagaaagacattatcgtctctaacgccccctgctggagcccctccggcgagaccttctattttgccgatacctggacgggcgaaatctgcgcctgggactacaacaccgcgaccggcgatctttccggcgaacgggtcttttgccatgtcgatcgcagcgaaggcggcgcggcggacggcgccaccgtggacagcgaaggctatctgtggaacgcgctggtctacgcgggcaagctggtgcgctataccccggagggcaaggtcgatcgcatcattgagatgccggtgaaaaaagtgaccagcgtgatgttcggcggcgaaaaccttgatgtgctgtacgtcacctccatggcgcagccgcccctgccgcgcttcccggaagataatcagctgcgcggcagcctgttcgccatttacgacctgggcgtgaccggcgtagcggaacggcgcttcgccggctaaacgaaccaccggctcgccgcgataacaataatacccggcgaactgactctgaccctgacaccaggcggcgcgcatcatgctgtcgcgacgccgcggagtaaacacgactatgacaacaatcaatcacacacctgccggcgaacaacgtggcaaaaagcggctgatacatcgcttctcctgggtttcgctactggtttgctggctaatctgggtgcttaacgcctacgatcgcgagatgatcctgcgccttggcccggtcatctctaaggagttctcgctctcgccggaacagtggggcaatatcgtcgccctgatcatggtagcccttgcggtgctggatattcccggctccatctggagcgatcgctacgggtctggctggaaacgagcgcgctttcaggtaccgctggtgctgggctataccgcgctgtcttttatttccgggattaaagcgatcagccacgggctgacggcctttgtgctgctgcgcgtgggcgtcaaccttggggccggctggggcgaacccgtcggcgtcagcaacaccgcggagtggtggccgaaagagaagcgtggttttgcgctgggggtgcatcataccggctatccgattggcgcgctgctgagcggcgtggtggcaagcctggtgcttgccacgtttggcgaaggcagctggcgctactgcttcctgctggcgctgctcgtcgccatcccgctaatgatcttctgggcaaaatattctaccgccgaccgcatcaacacgctttatcagcatatcgacagccaggggttgacgcgcccggcgacgcaggaaagcagccatgtcgccaaaggcgaagggatgaagacctttttacgcaccctgcgcaaccgcaatatttcgctgacggcgggcaataccctgctgacgcaaatcgtctatatgggcattaacgttgtactgcccccgtatctttatcacgtctccggcctgtcgctggcggcgtccgccgggctgagtattatcttcacgcttaccggtaccctgggtcaggtaatctggccctggctgtcggatagctttggccgtaaacgaaccctgatcgtctgcggtctgtggatgagtatcggcattgcgctgttctatttcgccaccaatatgccgcgccttatcgccattcagctattttttggcctggtggccaacgccgtgtggcctatctactacgccatggcgtcggactccgccgaagaacgcgccacctctaccgctaacggaattataaccacggcgatgtttatcggcggcggcatttcgccattgcttatgggctggcttattcagtttggcggcggctgggaaaatccagcgggttatatctacgccttctttaccatggcgggatgtgcgctgctggggatgttattacagctcatgaccaccgataaaacgccgcgcaaagcgcattaacgcaggagaacgtatgaagattgttatcgcgctggattcgtttaaaggtagctgtagcgcgcaggccgcttgcgcagcggtagcccagggattgcgccgggttgaccagacgctggagctggtcgaaatgcccgtgtccgacggcggagagggactgctgtcgactctggcggatagtccgttgcttgagggggcgctgtggcaacagcagcgctgtacctcgccttatggcctctccctgcaggcggatttcctgatcctgcccggcgagcgggccattatcgagatggcgcaaagctgtgggctcgaactcacgccgccagcgcagcgggatgtgcgtcaggccagcagctacgggctgggcgaacaggtaaaggcggcgctggacgccgggtgtcggcatttgattatcggcctgggcggcagcgcgaccaacgatggcggcatcggttttgcccaggcgctcggcgcacgattctggcgtaaggacggcaccctgctgccggctcccgcggcaggtcaggacctggcgcatattcagcgcatcgatttgagcggtctggacccgcgtctacagcaaagcgaaatacaggcctcctgcgatgtcactaaccctctgcttggcgagcatggcgccacctgggtgtatggggcgcagaaaggcgcggacgaggcggcgctctgcgagctggaggcgggaatggcgcattatagccagctgcttacgcaaaccctcggattcgacgtcagcggacggcccggcgccggggccgcgggcggtatgggggctgcgcttatcgcctataccggcgccacgctgcgtccgggcattgacctggtgctggagctgcttaacgccgacgaccatcttcgcgatgccgcgctgacgatcgtgggtgaaggctggctcgatcggcagagcgcctttggtaaggccccggtgggcgtggcaggcaaagccgcacgccatggcgtgccggttgtggccctttgcggcgggcgtgatgagagcagccggcaattatatcaacaccatattgacgcaatgtggtctatttgccagcgccctatggcgctggcagagtcgatgaacacatgcgaaccgctcctcgccgacgccgcggagaatgttctacgaacctttctgagcgggtggcgcggagaggcacataagcggataactgtatgattattacaacagcgctggctaatgaaattgtcgcccgggcaatggcgataattcatcataacgtgaatgtcattgaccatcatggacagatcattgcctcaggtgaacggcatcgtatcggcgaacagcatgaagtcgcccgggaggtaatacgcaccgggaaacgcatttgtattaacaacgccgcggaagccgcgcgttttcacaacgtgcatcctggtattaatcatcccattatctatgacgatcgcgtggtgatggtggtaggcatcagcggcgatcccgcggcgataagccgctatgctgaactggcggtgctcaccgccgaactgctggtccgccaggccatagagatgcgggaaaccaactggcggcaacgtctgcgtgacaccttgttttgtcagtatcttgaacaaggggctacacccgccgggcaagaagcgcttcatcgcctgctggaacttggtttcgattttgatacaccgcgggttccgatcgtagtgaccgtgcaggtcgaacagcatcagttaagcgacatactgagtacgctgttgcgggaattctcgcagctctccggcgtaagtgacgttattttgctgggcagccatgaaatattgatcctcaacgcgctaagcgaagcccaggaaaccctgctgcggggcattgagtttgtactgagtaatcagataagccattaccatatcgggattggcgtgcaggcggacagcgccccggacattcgcgaggccattcggttcgcccgctcggtgatcgaagtgggtagcaaagtgcagccgcagcggcagatctactactttcgcgaaatggcaatgctctgcctgttcagggtgctggaagacagctatatggtcaatttttttatcaataacgtacgccagctgcttgagcatgattccggcgaagtgctgctggataccctgagcagctttattgccaataatgccgaaccgggcaaaacgtcgctgctgttggggattcatcgtaatacgctcacctatcggctgcagcaaattaaaaagcatatacagctcgatccgatggtcttcaccgacctgacgcagctggcggtgtcggtacactgttatcgccggctgaatccgcgccagagtgaatggattgatagcttaagctaacgtacgatagattcgaattgatgccccatccgccaggataagtggccaccatggccacttctttcctggcgtgggtaggaaactacgcttttgacgacggcgacagccactgatataccgcagacaaatcctctccggcatatcccgcgtccgccgcctgctgccacagttcggcgatgtattccagccccggcatggtgtgcggctcggccagggaaagcgccagccgggcatctttcagggcatgcgccagctgcatctgcggggtaaactgctcgctggcgatggcgtccagtttcactttgacatagggcgccgccagcgggccgccttccagggcgctccacagctggtcgggggtgaagcccagcgtcttcgccagctgggcgctctccgcgatgccctgcatcatcgaaatcagccaggcattgaggaccagcttcattttctggctgttgcccgcctcgccaaaccactgcgtcccgcgggagatagccgcaaacaccggttcggcagcggcgcccttttccctatctccgctggcaagcaccaggatctgtgccttctccgctggggctttggtccccgacaccggggcatcgatataggtcatcgctggctgaagttcccgcaacaacgcgatggcctgccgggtctccggcaggccaatggtgcccatctggcaatagatcgcctgcggctgacaggcgggcgcgatttgcgccagtacctcgagggtggcctcgccgtcggcgagcatactgatgatcacctcggcatcggccaccgcctgctgcggcgtggcgtgtagagataacccatgcgcctgtaaatcttcgccgcgggctggcgaacggttccagccggcaacggtaaagccgtttttcagcaggttactggcaaaagcgtgtcccatggcgccgagtcccagcaccgcgacctttggtaatgtactcatcttgtctgtcctgattcgcgtcttaataaaagcggacctctactatcgcatctctggcacggatgtcagtagcaataacgggcatgaaaagtgacactgtcactgatattctcaaggctgacgaagccattccagtaagcggcgcatcgctggcgacaggctggcgtcatcctggtagcacaggcacaaacggcgctgcgcccagcggtcctgtaacccgatgacggcaaacgaatagcgctgccggtaacgctcggcaataacgcgcggcaggatcgccccgccggcgccgtgcgccaccatctcgcaaagccctgcaaaatggctcatcctgacccgaacgtttagcacctggccgagttcagctgcgtgctgttcgatatgctgctgtagcgcactggtctgatagagggcgaccaacggctcgttgagcaccgccgcaaacgccacttcctctttttcggccagagggtgagctggcggcacgatcagcaccagcgggtcgtcagcgacgggatcgaggcgcagcggcccggggtcgaccgcatcggacaccactccggcctgcgccacgcccgccaggatacagctgacgatatccgcgctggtgcgttcttcggtttcgatctgcaccgccgggtgcgctgccatccaggcggcgagcttccccggcagaaaggccgacatcgccgaggtgttggcgaacaggcgcagcgtcccccgctgaccgcaggcgaaggcgtgcatcgcctggcgcagacgctgctgctgcgcaagaagcgggcgggcatggcgcgccagtacctccccggcctctgtcatcgtcaccccgcgggcatgacggtgcaacagcggcacgccgatctcggcctccatcttgcgcagcctctcactggcggacgccagggccagatgggcattcgccgctccgccggtgatactgccggtatccacgatggcgataaatagccgcagatcggccagatccagtcgcatcaggccctcctttcccttcggtttttccgtagtctatggccaacataccgcattgtggccctcacgaccagctgtttcaatgcccctttctaccctgaaaagtgagccataatgttcgatttacacacgatctctttcctgttgatctttattgccgccgggctggtcaaaggggtgaccggcatgggattgcccaccgtggcgatgggcctgcttggcctgctgatgccgccgcaggccgcagcggcgctgctggtgcttccctcgctgctcaccaatctctggcagttactggcaggcccggcgctggcgcagattgtacgccgtctctggcttatgatgaccgggattattattggcacgttggccgggtcctcactgctgatcggcctcaatcctcggtggtcggcgctggcgcttggcgccgcattgatagtttatgccgggtatgcgctctgcagtccggtgtttcaggtttccggccgcgtggagaagtggctgtcgccgctcatgggcgggctgaccggcgttatcaccggggcgaccggggtatttgttattccggccgttccctggctacaggcgctgggctttcgtcgcgacgagctggtgcaggccctggggttgtcgttcaccctttccactctggcgttggcggctggcctcgccctgcacgatggctggcatgatgatgcatggctattgtcggcgctggcgctgttgccggcgctgctcggcatgtggctgggacagcggatccgctcgcgtctcagcccgcagcgctttcgtcagggctttctgttgttcctgctggcgctggggatagagctgatcgcccggggatggctggtctgaatcctctagcggcgggtaatgtgcttcacattgtacttactggtgttctggtagatctctgagaaatcgacgatcgcccggttctgggcgtagctgatcgactgcacccgcagcaggaggctgtttggcgccacctgcagcagctccgcctgctcacgggtcgccagcaccggggtatagctgcggtggctctcgatgatggtgatatggcactcttttttgaaatagttgaacttagactgctcgaggttacccacgctgagccaggggaaggtggcgaatgggatatagctgttttccaccaggattgggacctcatcgatcagccgcagccgtctgacgtaatacactttctcccccggctggatctttaactgctgggcaatggctggcggggcatcaagcagggtaaattcaataactttgttacggtagttggtgacgcccaccacctgcatctggtagttaaagccctccagttccccgccatgatagttacttttacgcacaatgcaggttccgctgccgtgccgccgcgcgatcaacttttcttcctccagtagcgccagcgctttgcgcagcgtcatcaccgagaccttcagctccgcggcgagcgctttttcgctgggcagcatatcgccgacggcatagtcgtcgctgttgatgcgggccttcagttcagtggcaatctttttataaatcacttttagatgtctcgatggagtggcgccagtcaacggtagatatgaataacttcatgtaattaaatgattatttttatctttcggcgaaaaaatcaacaatgacacatctataaatcacgccatatttatatatctgtccagcaacaatatatatgactttcgtcacagatggcccttttcctgctcgggatcccgggggtctgctcctagtctgataagcctattcatcaggtgatgacagcggtctgcaaagacgagaggacaaccatgattggagtgaaaaagcttcaggacttttccaaggcgatgatcgggccggtgctgtatctgccagctatcggcctgttgatcgccctgttcagcatgacgaccaaccggctgtgggtggatgaaagcagcgggctctacctggtggggaaatttgtctccagtatgctctgggcgctgatgaaccatctagggtttctgttctgccttgggctggccagcggtctggcgaaaacccgcaaggccgaagcggccttcgtggcggccatgacctggctgatgtacctggcggcgaataatagctggctaaccctcacccatcgcctggcgaccggagccaccaacgcgcaactgtacggcagcggacaaacctttatcttcggttttcaggttatcgatatgggcgtattccttgggattatccttggctgcgctgtcgcctttgtccataatcgcgtggttgggattgagtttcgcggcgcgctgtcgatctacggcaacagtaagctggtgctgatcgtgatgctgccgctggttggcatgttcgccatcgccaccgtctatctctggccggtagtggagctgggcatatcggcgctgaccggctttatgaaatcctttggcgccatcggggtcttcctgtacggctttctcaaccggttcctgatccccaccgggctgcatcatctgatctggtcgccgttcgtttttacctctatcggcggtcagctgctgatcgatggtcagaccgtcattggcgctaagcctattttcctggccgaaatcgcccgccaccccgttgacgcgctcagtgattccgcccgtttcctcacctatgggatggtgaagatttttggcaccgccggcatggcgctcgccttctaccgtacggcgaaagcggagaataagcagcggttgaaagtcacgctgatccccttgattgttacctccgtcctggtggggatcaccgaaccttttgagtttctctttatcttcaccgccccattgctgtggcttatctactccctgctggacggttttttccagatgctggcctggctgcttcacgtcagggtctgcgccactaacggcctcatcgatttcgtcgtctataacctcccggcgggagtcagcgcgacgcgctggccggtgtttgtcgccctcggtctgctggaaaccgcgaccatgtacctggtcggcaccttctgtattacccgtctgcggctgctcaccccgggccgcgaaaccgcagccgaagatgagcattcgcaacaggctaatagcgagcatccggataaaggcgcgctggtgattgccgggctgggagggaaagagaatgtctgtgcggtgggcaactgttttacccgtctacgggttgatgtgcgggaccccgcccttatccagcagacgctgttgaaagagagcggcgggagcagcgtgctgattaaaggaaaccatgtccaggttatctatggcctgggagttaacaaaattcgaacggcggtcaacgccagtctgggtgttattgaataacgaggtggtaaatgaaagataattttgtggtcaccattgccggcggcggcagtacttatacccctgggattgtgatgatgttactggaaaatatgtcgcgctttcccctgcgggagatccgtctgtacgacaaccatcaccagcgtcagaagactatcggcgacgcctgcgccatcctggtggctgaacgcttcccacaggtgaagttcagctataccaccgatccgcaggcggcctttaccgacgtcgatttcgtgatggcgcatattcgcgttggcctgtatgagatgcgggaaaaggatgaaaagatcccgctgaaatatggcgtgccgggccaggagacctgtggtccgggtgggattgcctacggtatgcgctcgattgccggggtgctggagctggtcgattatatgcagcagtacgctccaggggcctggatgctcaactactccaacccggcggctatcgtcgcggaagcgacccgtcgcctgcggcccgacgcgcgcatcatcaacatctgcgatatgccggtggctatcgagggtctgttcgccgacatcctcggcctgccgtcgcgcaaagcgctgaacgttcgttactatggcctgaaccacttcggctggtggaccagcatcaccgataaagccggtaacgatttgatgccggcgctgaagcgtcacgtggcggagcagggatacagcagcccaaaagaagactttcagcataaggcgccgagttggatcgagacctttaaaaaggtgaaggatgtgtttgccctcgatccgacgacgctgcctaacacctatctgaaatactatctctacccggactatgaagtggcgcattccgacccggagtctacgcgggccaacgaggtgatggccggacgcgaaaaagaggtctttgatatggcccgggagatcacccgtcgcggcacggcggaaggcgcgcatttccatgccggggcccatgccacctttatcgtcgacctcgcctgcgccatcgcctttaacacccaggagcggatgctgttgatcgtcgagaacaacggagccatcgccaacttcgatgagacggcgatggtggaagtcccctgcctggtgggcgttaacggtccggaaccgctggcgatggggaaaatcccgtcattccagaaagggttgatggagcagcaggtggcagttgagaaactggtggttgacgcctggattgagggcagttaccagaaactgtggcaggccatcgccctgtcgaaaacggtgcccagcgcttcggtggcgaaagccatcctcgatgaactgatcgtcgccaacgaaggctactggcccgcactgcactgatctttttcgtgatgggtaagatgcagagaatccaccttctctgcatttttacccggtgtttcccccggtgatgcattcatccttaacctcctcccccgaaccgctcatttcccccttcagaccggaggtaaaaggcctctatcttcattttgccccgatcgtgacaatgaaatataaattctattcttcaatattatggcgtaaaaatgtgatctgcgtagtattcttcgatttacattaacccactgaaaacaacatcgttattacctcactgtaaatttaacctgcttttcatggggatatactccctttagcctttgtgattggcttcatgcatttaccattctgcaacactgatttgaaattaaattttcataatgtgatcttgttgcatgttcattccatttctttgtgccatattcttaccacggtaaatcgccggagcgacagcaacgtgccacaccagagcgctgttcatcggcaaatgtcgtcgcgactgacgcactaaagaccgctaacccgcaaaggagaacggatatcgactacatccatgtcaacaccaagccgtaaacctctttgaccgccattgcttagcgtaccctgccttgtgctgagcaattacacaaagaagaaaatcatttaattcagttagatacgacaacacaggcgtgataaatcctgactggggagatgtatttttatcttgtgtcgttcaacaaaataaagggactaccatgtcatttataacaaacctgaaccagcaacagagaaaacgacttcatcagatcaccttagtggccaccttcggcggcctgcttttcggttacgacaccggcgttatcaacggcgccttttcctcactgaagcagtacatggcgctgaccccaaccaccgaagggctggtaatgagcgttctgctggtcggcgccgcgctgggcagcgtgtttggcggcaaatttgccgattacttcggccggcgtaaatatttactctttctctcctttgtttttctcatcggcgcgttgctttccgccgcggcccccgatatcactaccctgctgattgcccgcgccctgctgggctatgccgtcggcggcgcttcggtcaccgcccccacgtttatttcagaagtggcgcctaccgagatgcgcggcaagctgaccggcctgaatgaagtcgccatcgtcattggccagctggcggcgtttgccatcaacgcgatcattggcatcatctggggccatctgccggacgtctggcgctatatgctgctggtacaagcgattccggccatctgcctgttcgttggcatgtggcgcgcgccggaaagcccgcgctggctgatcagcaaaaatcgtcatgatgaagcgctgcatatcctcaaacaaatccgcccggcggaacgcgcgcagaaggagtacgatgacatctctaccctgatcaaaattgaagctggtaataagtacagcgcccagagcacctttgcgacgatcgtcaaaacaccctggatcctcaaaattttgctggtcggcattacatgggccgcactgcagcaaaccaccggcgttaacgtcattatgtattacggtacggaaatcctgagtgccgccggtttctccgaacgaacctcgctgatctgcaacgtgctgaacggtgttttctccgtgggcggtatgctgatcggggtgctgttccttgtcgaccgcttcaaacgtaagacaatcatcatctacggtttcgccattatggcaaccctgcatctgattatcgccgctgtcgattacaccctggtgggtgacctgaaagctaccgccatctggctgctgggcgcgctgttcgtcggcgtgatgcagggctccatgggctttattacctgggtggtattagccgaactgttcccgctgaaattccgcggactgtcgatggggatctcggtatttttcatgtggatcatgaacgcggtggtcagctatctgttcccgctactgcaggcaaaactgggccttgggccagtcttctttatcttcgccgccattaactatttagccattcttttcgtggtctttgccctgcccgagacctccaataaatcgcttgagcagttagaagcagagctgtcagcaaaccatgaagataaaaaatccactcgtctcaccagggaggttggttatgatcgataacatcacgctggataatctgcatattggctgcaaagccagtaataaagcggaagtcatcgccatgatcggcgcggagtttaaagccaaaggctatgtcaatcaggaatgtgtccactttctgctggagcgtgaacatcaggtctcgacctttttaggcaatggcatcaccctgccgcatttgccgaaatccgcgacggatatcatccttaaaaccgggattgagatctatcagtttcctgatggcgtaatctgggatcggagcaatgtaatgtttattgccatcggcgtgatcgcgaaagagaaagagcatattgacgtactcaaggaaattgcctcgatatttagcgatgagctgatcgctaacgcactgtcattaatctccgacaaacatgatttcctgaaaattctgcagcataacgccttgccccattaagtatgacaccgaccggagctctggccccggtcggattttcacccctcgcccagcaaacatggcgaataatctgattctccccgttataacctcaatggtaataataaccagagaaaccaacgtattgctacttgcttgaagtacgcgcattagcgcaggcatctcataactaaaaaaccattaaaacaatgagttaaatattctccagggctactgaccctcaggtttattgcttgcgctgttagcaccgtacgccagtgattcctgcggtattccattagttttgatttatatcaatacctgttcgatcgttaaaatgcattttacagcgcgattattttagcagggtgaatacgacattggttttacgattgggatatttatttagccgacccgcaagtctgtggggatggctgatgtgtaatgcgtttaacggtattgcgattgtcctctgctttcgtggcataagcagcgtcaccggtttcagcgaggcgatctggcaggtcatcatcacgctggctattatcatatcgacctggtacagcgctaactattttgctgcgctggaagctcgacgcgataaacgacgctatctgctgctggcctgggtggtcatgaccattctgttgaattttattcaccttggcggtggttaacgccatttattaaaggatcataccatgacgctggcgatgctgttggtgcttatcagccaccataaagggctgacgctcttgctgatcgtaattattgcgctgctgtttattgcgctcactccgctggtcaaaaaactgttgagtcaccttcacgatcgttcctgaattttcttttatgaccgcctacagggggccttctcttcgtcatctccgtttatcccgccacccgctcccccagcatacagtttgtggcaacgccagaaaaagaaatgagaaccattatcataaaagctgtgctaacgtgtcagcccaacaataacgccagaagcaacaaaacagggggacagacgaggtgaagttgagttcagggagcatcacaacaggtcgtacgagcgggctgctgacgctggcgattggcgcactcttctacagcagcggcagtattgcccggccggatcttcagccgctggggccgaacattgcggataaagggtcggcgttttaccactttacgcaacgccagtatgactctgccgatggcgaacgtcactaccgggtatggaccgcagtgccggacaaagccccgcccgccgccggctatccggtactatatatgttggatggcaacgcggtgatggataaactcgacgacgcgtttctgcagcagctcttcgccggctccccgccggtgatcgtcgctatcggctaccagaccgcgctgccctttgataccgcagcccgcgcctgggattacaccccaccgctaaagacgcatgagcctcgcgccgggaaacccgcgctaccgccgcgtaaaaccggcggcaatgatgcttttcgccagctgctgaccgaaacgatggttccccagacggaagctaacctgaaaatagatccccaccagcgcgctatctggggccactcctacggcggattgtttgtgctcgacgcgtggaggaaggcttcgccgttcgggatctactattccgccagcccgtcgctaggtcaggccctgcaatcgcctttgcaggcaagccaaagtcttgatgccgtccgctttcgcgggaaatcgctgtacctactcgagggtgacggtaaagcccgtggagagccgtccgggcacgaggcctcgcttgaggtgttgcgtcaaacccaacagcagcttgccagtaaagggttgaccgtagccttctggcgctaccccggcctgacgcacggtcagatgttcgaggtctcgctgcgctcggcgctgctgcatctttccgggcaggcagcgcttgcgcatcaataacgcccttacgcccaccagcggagggtgggcgcatcagcgccggtcgggcaggtgtttgatatcgaccggctcgccgaacagaaatccctgcatctcgtcacatccctcctcttcgaggatctgcagttgtccagccgtttccaccccctcggcgataagcggcgtattgatcgaattgcccagcgaaataatggctcgcacgaatgagcgtacctgagggttgctctccacatctgtcataaagctgcggtcgagtttgatgacgtcgaaatgaaaatcgcgcagcatgctcagggaggagtaaccggtgccaaagtcatccagcgcaatactgatccccattttttgcagatgatgcagaacgctgaacgccagctgtttattgatcacaaacgccgtttcggtgacctcaaactccagcagactgaccgggtaggcggtacgcatcaggatctcgcggactttttcgataaagctacgatggcgcaactgcaccggagagatattgaccgaaacttttctgttcaaaccattttccagcgattcgttacacacctgctcgagcacccagtaacctaagggcacgatagcgccgctctcttcggcgatgggaataaacacgtccggcgggatcgtccccagctgcggatgctgccagcgcagcagcgcctcgtaaccggtgatgctacgatctttgatgttgcggatagcctgatagtggagcgaaaactccccggcgtgaataccgcgccggatatcggcggccatcatattgcgctgccgcgtcttgtcatccatttcacgttcataccagcaaatcttatggtcgaggctgctttttgcccgatacatagccagatcggaattgctcagtatcgtattaatatccgtgccgtcctccgggtagactgagatgccaatgctggcggagagcaccacttccgtcgcggcaaacgtctgcttaccgctgaagcagtgccacaggcgcgcagcaaaggcatccacttcaccctcatcggaaaaaggtttaacggccacaaactcatcgccgccgaagcgggcgaccatctcctccttctgcagcgttttgagcacggcgcccgccacgcgctgcagcagctggtcaccaatcagatggccctgcagatcgttaatctctttaaatttgtctaaatcgatcgtgaaaatggcaaagcggcgggcatcatttccagtgatcagcttctccacccgttcaaaaaactccacccgattgggtaaaccggttaacgcatcgtagcgcgccatccaggcgacgcggtcgttaatcgccttctgttcactaatgtcgcgggtaattttggcaaaacccagcagggtgttctgctcatcgcggatggtatcgatcatgacatgcgcccagaatcgggacccgtctttgcgataccgccagccttccccttcaaactgcccgctacgcagggcgatttccaggttttttgcgggtacaccggagagttgctcagcttcgctatagaagagaccgaagtagcgaccgatgatctcgtcgctcaggtacccttttgcccggcgggcgccctcattccagctaatgaccgtgccgtcggcgctcagcatatagatggcataatctttaacgctttcaataaagtggcgataggcaatatccgtcaggtgatcgttactcatggtacagcgctctctgtggctcggtcgtggcaaaacgcattagatatagcagaattacgcctattaagaatacaaggatatggccttttgttggcctctttctgacccggacaccgcagtaggcgcggcggacgctctcgttaagcgtagtggaccaggccgtccgaaggagtgatattccccgcgatttttgcacttaggtcgcccactaatagttacttttattgattaaaaagtttgattgaaagaataaataaaaggagtaatgttaataatactttctatggaggttaaatatgttgcgtgattatttaaaagtggaaaaagaagaccaacttgttgaacaacagagtcggcatgacaatagccagcattattcttcggtgaccgaatgggttattttaagtaaagatggccagcgcaaaggccgggtatccctgttcgaccgcttcaccacccgccgctcctggagcgacagtttccgcattacgcagttcgataatgcgggtaaagtggtggtggataaactcactgacgcgctgtaaatccttcggattcccggcctgacgggagaatattaatacgcaaaattaacacctgcataaaatatattgatgcgtcgccatcatgttattttctttctgcataccgataatctaatgggtaattttcgccatggtgcacagcgcgaatttttaacccgaaaaaatgctgaatataagcccgctggtcgggcttttttgcatggtgctcgccatctacgccacaaaatgccaaggacatcccgcgctggattgtatacgatgtatatacgaatcgttacggtatatatctatgggaatcgtcaaaatctccgatctgctgcacgatgatattcgtgatgccagcaaagccatgtcccgctccgtcaatgcccaggcggaatactggatccgtctgggcatgatgagcgaactctaccctgagcttaaccaccagcagatcaaactgctgatgctgaaatccggctctgaccgtctgctggaggtgatcaatgccatcaataatcattaaaaccgccgacgaactcgcccggcagcgccatgccggccagctgctggcgtcagtgtttgatatgctggatacttttatcgttcccggcgtaacgacgatggcgattaacgatcgagtggaagattttatcgttaaccagctgcacgcccgcccggccagcaaggggcaatacgattttccctatgtgttgaacacttccattaacgatgtggtgtgccacgggatccccaaagcgaccgaacatctgcgcgccgggatgattgttaacgtcgatatcaccctcgagaaagcgggcatgattgccgactccagtaagatgtacctgataggcgatgtctccccgctggcccgccggctggtaaagactacctatgaagcgatgtggaaaggcattgaggtggtgaagcctggcgcgacgctgggcgatattggccacgctattcagcgctgggtggaggaacatggctatagcgtggtcagagaatattgcggtcacggcgtcggtcaggaaatgcatgaggaaccgcaggtgctgcattacggccgccccggagaaggcgccgtgctgcaggaaggcatggtgttcaccattgagccgatggtcaaccagggcgacagccgtatcaaaaccaaaaaagatggctggacggtggttacccgcgataaaaaactctccgcgcaatgggagcacaccgtggccgtcaccgccaacggttttgaggtgctgacgttacgcgacgatgaacagtcggggatccgctgagttgcttccttttctctatgacggtgggccgctttccgatcccggagctcgcttgggcgccagacgacacctgattctgccgccgggcggcggcaataattgttttcatgaatgattttctgcgcgcgcgtctgcccgctggttatggctgatgcgcgcataaaccgcacaacggtttatcctttacctccttgcatcagcttactcttcattgcctttatcccgccttagcgatagcgaataatgacatccgcttcactatgctgcgcatttcgccagtgaatactgacctcaccacgattgtccggcatggcgtagcgaggacggttgtttgtcaaggcgacctgttccggtgaatggtgctggcacgagacatcgatacgatcgtgccggggggcgataacacaggccggattgatgacccgtcctgaaaaatgaacctggccggaaagcgcagcagacgacgccagcggcgccaggcacagacatagcagagcgagacggaatggagacatagcaatcttccttgataacgggtgacactgcgcggcacagcatcgtttctgtgccctacaacctgcggcttcctgccgtcactccacgctactgcaaaatagcggcagcgtaaatgattattccgggccacccggtcaactgccgggaataacagcaactttttcgtaaaatttgctcagaacagttatctcccggaaataatgcattatacgtatgggactctttttaatatttaatgagattatacttacaccaaaaaataaataatgttacagcttaacacatcttatcaatgggcctttacgatgttctccgtataatcccgcccccgacggtaatatacattagcgatgcttaccgtttttttgtgaacagaaataaaaaacatgctttaaaaatgttaaacgcttttgttaacttgtgattatttaataaggtttgagtatgaaagaaaaaggcaccctgctggttgttggttcactgctggccttaagtctggctactgtgaccaccgcccgcgcggcgggtacactgaatttcaccggtaaaattattaacgagtcctgccagatcaccaataacggtggcgatgttaatgtcgattttggcaacgtcgatatgtcggcgctgaaatcccatgaagcgaaaaccgcagaaacgccgttcactatcaacctcaccggttgcccactggcgcagaacatcagtatcagcctggaaggtactccggacaccaacgctaacggcaccagcgccgccgtgctggcgctctctgacgccgcggataccgccaaaggggtgggcattgaagtcttctcttcccctgacggctcaacggaaggcactcagctgacctttgacaagcagagcaaaacggcggtttcgcaagccgacgaaaacggtgatattgcatttaactttattgccgatctgaagagcgattcctcacaggatgtcaccgccggcaatattaatgccacggccaatattgatattgtgtacgaatagaatgtcctgattgccacttttccaagggcagcgtccccctgcccttattctcattcctcgtgaccggatcctcaattatgcagtgttataaagcggcttttatcctgagccttctcttttgcccgttcctggcgtctgccgccggggttgccattgccggcacacgtgtcatttataatgaacaaagccatgaggcagacatcacggtaaaaaacaccaatcctcacgatccggtgcttattcagagctgggtagacgatctggctgataataataaatcaccgtttatcgtcaccccaccattgttccgtctggatgccggagacagcaacgatctgcgcgtgttattaacctcggcgcaactgccaaacgatcgggaaagtttgttcaccctgaatatcaaagtgatccctgccaataccgcgccggctggcgagaacattctgcaatttgctattaagaatcaactgaagctcatttatcgcccggcagggctccctggctcggcgctcgacgcggcgcagcacctgcgctggcgggtcagcgacaaccacctgcaggcggagaatgcctccccctattatgtgactatcaccacgctcacctgcgcgggccagaaccagaaaacgccgcttgagcgcagcgtgattgctcctcacagccgtgaagagtattccctacccggcgaggcctgcgcccgcgaggtgagctggcgcattctggatgactttggcgctgtgcagacgtttagcgcccccgtttcggcgcactaagcgtctgatgtcgcgatgcgccacggcccggctcataccgttaccatcgtcagcctctccatcctgctgggcggacagagcgcgctcttgcacgcccaggcgacctttaatatggatctgctggagaaaaacgaccatttgccggcagtggatctgcaacgcttcaatcagcaggcgggccagccgccaggcgactatccggtgagctggcaggtcaacggcgtcacgctggacgcccgtaagaccgtcacgtttcgccagaacgatcgcggacagctcacgccctgccttaagccggaagatctgctgcaggccggagttaacccggccgtgctgtcccaggcgcccggcgcaacgtcccgctcatgtcccgaactcaacgcgctgctgccgggcagcacggtcaatttcgattttgctcatcagcggctggtaatgaccattcctcaggcgctgatgacgcaccgggcgagggataatgttccctctgcgctgtgggacgaaggtattagcgcctttcagagtaactatcgttattcaggcgccagccagcgtacccgcgagggcagcaccgagcgcgataactatctgatgttgaaaagcggcgtgaacgtcggcgcctggcgcctgcgcgccagcaatagcctgaccgccaacagcgatgataagccccagtggacgaccagcggcgcctggcttgagcgcgacctgacgcgctggcagagtgaactgaccctcggggataccttcacgtcgggcgatgtgtttgacgcggtacagtttcagggaatatccctcgcctccagcgatgcgatgctcccggactcgcagaaaggttttgccccgaccatccgcgggattgccagaaccaacgcccaggtcacggttcggcaaaatggctacgtgctgtatcaaacctacgtcacccccggcgcgttcgtgattgacgatctttatcccaccgccagcagcggcaatcttgaggttgccgtcaaagagtcggatggcgaaatccgccgcttcacccagccgtatgcttcggtgaccagcatgcagcgcgaaggcagcctgaaatacaacctggtcgccgggcgctaccatagcgacgatgccagccagcggccgttgatgatgcagctgtcgctgatgcgcgggttcgcccacaacctgacgctgtttggcggactgcagagcgcggcgcaataccataacctctcgctcggcgcaggacaggggttgggagaagccggggcgctctcgctgcagctgttaaacgcccgcgaccggcaccagcaggatccgatcgatggccgggcctggcagctccagtacagcaaaggttttgatcgtcttggcacgcagttgactttcaccggctggcgttattcgcatcagcgctatgccacgctgagcgaggcgttttccagcccgggtagcgacgacgacctgcaggatagcgacaacaaaaaagcaaccctgcaaatcaccgccagccagagcctgccgtacgatatcaccctctatctgagtctcgaccaggacagctactggtcagggggcgccacacagcgtaccgccaatatggggatcagcagccaggttcacggtatcgcgtggtcgctcagctacagcgactcccgcagcagccacggtgacgaggaggatgacgagccgcattccgacaaagtggtgacgttgtcactttccgtgccgttgagccacctgctgccggggagctatgccggctataccctgacctcctcccgccacagcgttggcagtcagatggtcagcctcaacggcacattgctggacaatcacgcgcttagctacgccgtcagccaaacccgcgatcggcaaaacgggtccagcggcagcctgacggccgggtacagcagtggaaggggcgatctgaatctcggctacagccacgattcgcaggccgctcgtctgaactacggcgccagcgggggcattctgattcaccgccacggggtagtctttacgccggaaatgaatggcgctgtcgtcctgattgacgccggtggcgccgggggtgtgaccctcgccaaccagaaaaccatcgccaccaatggtgacgggtacgccgtgctgcccttcgccaccgcctatcaccgcaacgacgtctctctcgacagccattcgctgccggagaatgtggatctggccaacagcaccgtgacgctggtccctaccaaagacgcggtggttctggcgcgctttcacacccacgttggctataaggcgctgtttacgctgcagtcgcggggacaaccgctgccctttggcagcgaagtacgcgccaaagacaccaacagcatcgttgccagcgagggtcaggtgtacctggccggcctggcgccaaaaggcaccctttatgcgcaatgggggccgggccctcagcagcgctgtagcgcccgctacgatctcaccccgacgctggcgcagaccccccatccactcattttacagcagacgttatcatgtcctttttaactctcctgcgtcgggtcgccctgacgctgttatttattctgttaccggccgccagcggatgggcctgtacgccagtgtttgtccgcggccaggcctccacccttcggctgaacgtggggcagctcacggttccggctgacgccagacccggcaccccgctgtatcataaaagtttcgcctggaaccgccttagcgacggcggcgaacagtggatccgctgcgcggacgatccgcacgggttgtcgccgctgctgctggacagtctgctgtccgggggagtgacgcgaccgacggtttatcaaactaacctcgccggcattggcgttcgcgtatcgctgcgcgctatcggcggctatggcggctttcctgaccggccgacgccctcgccgtttagccaacgggtggacaatcccgccgccttgcccgatgcggtgtggaaactgggctatttccgcctgacgattgagctcattaaaaccggtcccgcggcgacgccgggcgagcttgagtatcacagcgagcgctttttaatggcggagcataccccgctggccgcgttagacttaaccggcaggatcagcaccgcgggatgttcagtgaatgacgccacgccagccctgatcaagctccctgcggcgatgcttgaccacttcggcggcgtcggcaaaaccaccggcgacacccctttcgcgctgcagctggattgcaacagcgcggtcacgattttcctgcgagttgacggcgcggagcccctctccgcccgggggcatggcgttctgcgcaatgacgccaccgacgatcgggcgcagggtattggcgtgcagttgctttaccatcgcctgccggtttccctgaatcatgagatgacgctgggcagcgcgagcgcgggccggtttaccctgccgctcactgcccgctactaccagacacgttcccggatcaccgccggtcaggtgtcggccgtcgcgacctataccttgcattatgactaggcgatggcgaaccgacggatgaagcggatgaaggaattgctctgaccggcgaatcgtaagagaatagcgcctacacgcgacgatctgagtacacgggagttcatcatcagccattctcgtcgattccccttagccagcaaagtggcgctggcaggcgcggcgctcatcgccgctggcatgctgttcagctgcaccagtaaagcccctaaatcccttgtcacgccgccgaacgctgccgccgtcaaagccgggcaggcgcaccgggagccggtgcgcggcgtgtggctcaccaccgtttcgcgccttgactggccgccggtcgggtcgattatcgccagcacgccggagagtcgcatcacgcagcagaagctggcgctgatcgctaaactcgataacctgcagcgcctggggatcaacaccgtctttttccaggtgaaaccggacggtacggcgctctggcggtcggatattctgccgtggtccgatatgctgaccggcaaaatcggcgaataccctggctacgatccgctgcagtttatgctggatgaagcgcacaagcgcggcatgaaggttcacgcgtggtttaatccctaccgcgtctcggtcaacaccaaaccgtcgacgattgccgagctgaacaacacccttactcaggtaccggccagcgtgttcgtcctgcaccgtaactggatccgcaccgccagcgatcgctttgttctcgacccgggcattcccgaagcacgggactggatcaccagcatcgtcgctgaagtggtgcagaactacccgattgacggcgtgcagttcgacgactatttctataccgaaaccgcctcttccccgcttaacgacaacgagactttccgccgttacgggcagggctatgcctcgaagggcgactggcggcggcataacacccagcagctcatagcccaggtttccactactatcaaaaagctcaatccgaacgtcgagtttggcgtgagcccggcgggggtgtggcgcaaccgctcccacgatccggcggggtccgatacccgtggcgcggccgcctatgatgagtcctatgccgatacccgcagctgggtgcagcagggactgctcgactacatcgcgccgcagatctactggccgtttgcccgcgatgccgcgcgctatgatgtgctggccaactggtgggccgaggtggttaaaccgacgcatacccggctgtatatcggcgtggcgctgtacaaggtgggtgaaccgtccaaaaatgagcctgactggacggtggacggcggcgtgccggagctgaaaaagcagctcgatctcaatgagactctgccgcagatccagggcaccatcctgttccgcgaaaacaacctcaatcagccgcaaacccggcaggcggttaactatttgcgcagccgctgggggcagccgcagagctagccgccagccggctctgctatagcgcctgcagcccttgctgcaggcgggcgtgcagcttcagcatgttctctgtaatggcctgccagacgtggctggaaaagtccgccggcagcgtccggcgagcgctttcgattgcctgcggcacatgcccggcaaactcctggaggatcgccagcatctgctcccggggaaagttcaccgctttggccgtcgccagaaaatgacgcggatagatggcgttaatctctgttttacgcccttttgtggcattgagccccatcgacagcttcagatcgcgcagatgcagtcccgtgccgcccagcaccggaaacgccgaaataatgtcgtagaacggtgttaagcggtagctgccgccgggcaacaggtaaattgagaagttttttgcgtgaccgtccgtcgcccccgtcagccactggaagaccatgaacttcataaagtcatagcgatctttcagcgcttcactcgagcccagcagaaaggtcatgatcgcggcgatacccggcccgccgtcagactcatatttcatcgctgaaggaagaccaaaagcctgacacagatcctcctgcggcagacgcagcagcacccgtccctcctgcgcccagcgccggtcgaagcgggttaccgccagggcgcggatccgcggggtggtgatgatctccgcttccggcaccgccaggcccagttctctggccagcgccaggcacagaaactcattatccacgctttcacgcagatccagcgtcgcattgggctgcttgatctcgccgatgggcagcttaatgatatgcgtggtcggcgtggcgccctgcggaatacaccactgctcgcccatccgcagcagcgccgttttctcctgggcgccggccaccgagatacggaaatcgtcctggctggtaatcatcccgagggggatatccgactggtaagcggtcagcaaagcggtgagctgcgcctcgtccagcgtctgccagcgtaatccttccaggtgcgcctcttcccccggcggcaggagggtcaccgcccctacgctatcccgcccgacttcggccagcagatcgaacggctgcttcgagcgcgcctgatagcgcctgacgatccggtcgcggacctgcgggctgtcgggcagcaggttatcaaaatagtgatacaccgcgtcggcagtgatattgccatactgcagcggcagtgagagggagagcggtctggcgcgcgggctgcgcagccactcttcgtcatagcgaaaactgtgcgccccgttagcctggcgggttaaggttcccacgcgcacattgttcatccaggtggtaagcgtcgccattaccagtcaaggtccgtgttgttatcgggagccggcgccgtctcagcagctttggcgttcagcgtcatcaccacccccagcgactggaggatcttaaacagcgtggttaaggtggttttgtcggggtgattttcaaaattggacagcgtggcctgcttaatgccgatccgcctggccagcgcatcctgggtccagtggttctgctggcgcagcagcttcaggtaattggccagctgcacgggactgtatatctgcggggaattcatcgccttgttcctcaccatcatttatccccctgtcgggataaaattggttttataccctataggggataatgtcaaggatatcccctggtggggataggagaataattatccttgtgtggggataaaacaggaaggatgatcgccggagccacctgtacatgcccggtggcggctgcgccttaccgggcctacgggctgtctctacccgctccgttacgatccaggccgggcaagcgcagcgccgcccggcagcgggcagccggcttagctgccgcggtaggtcgaccacccgcccggggcgatgagaaacggcagatggaaatggtcctctgccgcctcgccgataacaaaatcaatctgagcccgggtaaagacgctctcgcgcccggcgcgggcaaaccacgccccggtttccgctgttaagcaatagcgccccgccggcagcggcgcggcgctaaaggtggcgatacgcccctgggcgttggtcaccaggttcgccagcgtctcgccctcccggctcaggctgaccgttacgccttctgccggcgtaccggtggaaatatccagaatatgggtgctcagggtgctcattcgccaatcactccttccagtcttaacatcgtaatctctcgcagctgggcaagcgcctcggccacttcttcgtcggcggtatgctgcagccggcgcgtcagcgcctgcagaatctcttcgccgctgcgccctttggcgcggattaaaaacacccggccaaagcgggcttcgtagcgggcattgccctcccgcagggcctgcgcgagccgctcattctcgctgtccaccgacgactgctcctggcgcgacagcgccgcgtgcgcctggctgccggtcggcttctcaccgatccgcggatgggcgctgagcgccgcgttcagctcgtcctctccccagttagccatcgccttacgggcgacctgcagcagcgcatggcggctggcgaaaggtcgcaagcttaccagcatctcgctccaggccgggatcgccacgcagggagccaacagcctcgccgcctcatcttcacataggctgttaaactgattcagcgcgagcatcctgactccttaacgatttcgtcgccgcctgctcctgcggcagaataaggttcagcgctatcgctaccagcccaccgctggtggccgccgaaccgaacagatcgccgaccatcggcggaaaatggctgagaaacgccggcaccgactccacgccaagacccgcgccaaacgccagccccacgatcagcacatcgcgacggctcagcggggtctgggtaataatccggatcccggccgccaccacgcagccaaacatcaccatcgtggcgccccccagcaccggcgccgggatctgccgcagcagttcgcccaccgggggaaacagcccgagcaggatcagaatcacgccaatgtagcgtccgacatagcggctggccaccccggtcatctggatcacgccgttgttctgcgcgaaggtggtgttcggaaaagcacagagcatggccgccaccatacagctgacgccatccgccaggataccgcccttcagccggttacggaaagcgcgatcgtcaacagactgttgcgaaatcagcgagttggccgtcagatcgcccaccgcctccagaatacagaccagcgacaccagggcgaccggcagaaatatcgcgctgttaaactgaaagccgaacggaaacagcgtcggcaggcgaaacagggtgtcgcccaggctgtgaagatggaactgaccgctcagccccgctgcgatgcagcccacggcaatgcccaccaccaccgaggagagccgcagccagcggtttttggcgcagctcagcaggacgataaccccgagggtgcccgccccgagcgcgatattgctcatgctggcgaaatcctcggccttttccccaccgcaccagttgatgacgctgaccttgatcaggctgatgccgatcagcgcaatcacgctgccggtaatgatgggagtaaagattttcttcagcggttcgataaagcggctgacaatcaccggcaccagagcggcgacaaagttaacgccaaacagcatcgccatcatatcctgcggcccgccgccctgggcttttacccacatccctccggccaccgtcacgccgagaaaggcaaaactggtgccctgcatgcagatcatcccggcgccgatgccccatacccgattggactgcagaaaagtgccgatgcccgaggccagcagcgacatactgatgagatacggcagccagtcgccaagcccgagggtagcgccgatgatcagcggcggcgtgatgatccccaccaggcccgccagcacatgctggagagcgctgaaaaaggccggaagcggtgggatccgctgttcaaggccgtaaagcaggccactgtgatgttcgtcagacatagtgatatcccgtagcaaagagaagtgcatgggctagtgcacaaagcaggccagagacgacaaaagggcaccaataaatttattatcactccaaaatcatcaacttagattacgctcgtgatgcatcacccctctccgctgctgaaccaggcgcctgaaacgatagattcttaatgcaacatacagaaacttttgattcataaaaaggcaaccaatacctcacattgcaccgatgcggtgcgtcatgagccatcgctgtgcctcaggcaggcggttttcctccctccggcgaattggtacgcaaattgctgtagtcagtcacaacatcgggagaaggagaaaaaaatgaaagcaatcgtgattggcgccggcatcggcggtttaagcgcggcagtggcgctcaaacagtcggggatcgactgcgacgtctatgaagcggtgaaagagatcaaaccggtcggcgcagcgatttccgtgtggcccaacggcgtgaagtgcatggcccacctcggcatgggcgacatcatggagaccttcggcgggccgctgcgccggatggcgtatcgtgatttccgcagcggcgagaacatgacccagttcagtctcgccccgctgatcgaacgcaccggcagccgcccctgcccggtctcccgggcagaactgcagcgggaaatgctggattactggggacgggacagcgtgcagttcggcaaacgcgtcacccgcggtgaagaagacgccgacggcgtgacggtatggtttaccgacggcagcagcgccagcggcgatctgctgattgccgccgacggcagccattccgcactgcgtccgtgggtgctgggctttaccccgcagcgccgctacgccggctacgtcaactggaacggtctggtggagatagatgaagcgctggcccccggcgatcagtggaccacctttgtcggcgaaggcaagcgcgtctcgctgatgccggtctccgccggccggttctactttttctttgatgtgccgcttccggcgggtctggcggaggatcgtgacaccctgcgcgctgacctcagccgctactttgccggctgggcgccgccggtgcagaagctgatcgccgccctcgacccgcagactaccaaccgcattgaaatccatgatatcgaacctttcagccgcctggtgcgcggccgcgtcgcgctgctcggcgatgccggacacagcaccaccccggatattggccagggaggctgcgcggcgatggaagatgcagtggtgctgggcgccgttttccgccagacccgagatattgcggccgccctgcgcgagtatgaagcccagcgctgcgaccgggttcgtgacctggtgctgaaggcgcgcaagcggtgcgatattacccatgggaaggatatgcagctcaccgaagcctggtaccaggagctgcgtgaggagaccggggagcgcattatcaacggcatgtgcgacaccatcctcagcgggccgctgggctgaccgtcgccatggattcgatcaccgcactcagcgtctgaatggccatttgcgcgggccgcgaaagctgacgcgagggcgcagtacacagcgccagggtcagcggtcgcaacagcgtactgcgcagcgggacaaaggccagctgtccacgctggacctcgtccagcacgtcgagcaggctaaggagcgtcacgccgctgccgcgtagcaccaacgacttgataagccggatatcattgcagctgatggtattctccggcgcaaagtcatggtggcgatagaggagcgccacccgctcatggacgatcagcggcgcgccgggcacgatatgccgctccaggctgagctcgcccaaagacagcgccttcgcccccgccaggggatggtccggacgcatcacaatccccacctccagttcggcaaaggccagcacgctgagtccagcctgcccctgcggatcgaggatcaggccgacgtccaggtccgcctgacgcactttctggctgacggtgtggctgtcagccacctgcagatccagctccagccacggccagctggcgatgatctccgccagcgcggcggcgaaacccccttccgccagcgcctgcaccatgccaacgctaacgcttccgcgcttcatcccctgcagctcatcgaatttctgccgcgtctggcgaaactccttttgccagcgcagcaggttgtcatacagcaactcaccggcggtggtcatccgcagtccctccggcaggcgctcgaacagcggggtgccgaaggcctcctcagcctgcaggatctggcggttaatcgccgaggcggaaatatgcaactgctcggcggcccggcgcaggctgccgcagcgggccacggcgatgaaatagtgcgcgaaacgggaaaatggactcatggcgcccctgtactcttttttgcaacagcagagtgaattaatggtgatggatgtgaacaccctaatatgacaacaataatctcacaacaataaaacaatcaccgatgtgagcaggaagagaaatcatgaagacaaccacccccacgccccccgcccattgcacctttgatccagaggactggctgcggctggcccgctgctggcacccggtggcccgcgcctgcgatattgccggcgccccggtgaaagccaccctgctggacgaacagctggttatctatcgtattaaaggccaggtggtggtcgcccgcgacgtctgcccgcaccgcggggtgccgctgaccctgggatttcatgaagaggaaggcatcgtctgcccctatcatggcctgcgctttggcgaggatggccgctgcaaccgcatcccctccagtccggggcaacccattccggccaaactgcatctcaccagcttcgccgtggaggagcgctacgggctgatctggacctgcctggcctgcgatccggacaatccgccgccgttaccgaccatgccgcactgggacgacgcgggatttcagcaaatcaactgcccggccttcgaggtgaagggatttgccggccgccaggtcgaaggctttctcgatgtcgcccacttcgcgtggatccacaccgacaccttcgccgatccggacaaccagcaggtgccggactataccccgcaggagacgccgttcggctttgttgccgactactggagctcggtgggcaattacccggccagctccgatttccgcgcgccggaagggttccagtggctgcgtcactttgaaatgcatctgccgttcaccgctacgctgaccatccattttcccgccgacgccaggctggtgatcatgaacgccgcctcgccggtgtcgtcccgggtgacgcggatgtttgcccctattgcccgcaacttcgatctgcacgtgccggtggaagacgtacatgcgttcaacctgcgggtatttgaagaggaccgcctgatggtcgagacccagcgtccggaacggttgccgctggatctgaccctggaggcgcatattccggcggaccgcagctctatcgcctaccggcgcgggctgaagaagatgggctttggcgatttctttctggtatgggtggaggtcatatgcgcgacatactcccggtggtggtcgatggcctgtggcgccagggcgcgaaaaatctggccgttcgtctggtgagcgccgaggggcaaccgctgccggcgtggacgcccggcgcccatatcgatctccatcttccctgcgggctgatccgtcagtactccctgaccggcaacccggccgaacgggatcgctatctgctctgcatcgcccgcgagtcgcagtctcgcggtggctcccgttatattcatgacaccctgcgcccgggacagccattgatgatctctgccccgcgcaaccactttccgctgcacgagggcggccatgtggtgcttctcgccgcagggatcggcattacgccgctgctggcgatggcccacgcccgggcggcgtccggcgccagctttacgctgcactattacgttagccgtgcgcaggaggccgccttcgccaccgagatcgcccgccagctagcgggtggaatctgccagatccactgctcagacgaggggcagagtccgcgccagcggctggcgcaggatctgggggctccggacgccgacacccgggtctacttctgcggtccgcccggatttatggcccgggttcgcgataccgcgcgggcggccggatgggaggaggcgcaattgcacagcgaagcgttccagccgcccgccccgacggcggcgtcggcggcggacggaaccttcaccatcaccctcgcctccaccggggagcgctggccggtgccgggggacaaaaccatcgcccaggtgctgcaggaacatggcgtcgcggtgccgctctcctgcgagatggggatctgcggcgcctgcctgacgccggtacgcgagggaaccgtcgaccaccgggataccgtgcagtcggaggcggaaaaacaggccgcagagcagcatattgcgctgtgctgctcccgcggcctgtcggccaatttagttatcgatctcgcgggataagcggcccgtcaccggctggtcggcgcgggcgaccggtttcacccgtacggcggcgaaaacaatcaccatcgcgcccaacagcagcagaccgctgccggtgaagacgccgctggcgccgtgcaaatcaaacaccgccccgccgccggcggccccggcgctgatggccagctgaatagaggcgaccagcagaccgcccgcgctttctgcttcatccggcacggtggtagcaagccaggtggaccaggccaccggcaccaggccgaaggcaaatccccacagggcgaccagcagcccggccagcacggtcagatggccaaacgtcaccatcagcagcgccagaacgctcatcatcaacggcaccagcgccagggtgagacgcaggctacggctcagcagatagctcgccaccgaagtgccgataaagttagcgataccgaagccgagcaatatcagcgaaaccccttcgacactggcctgcgcgacggtctcaaggaacggccgcaggtaggtaaagaaggcgaaatggccgctgaaaatcaggatcgtcgccagcatgccgcccagcataccgggacggcgcagcactctgaacagcgtggagaaggtcccgacgctctccgggcgcatggagggcagcacccacagctgccagagcagcgccagcaggctgggtatcgcacagagaataaacacgttgcgccagccgatcagctccccgaggtagctgccgagcggcgcggccaccaccgtggcgacagacaccgcggaaaagatgatcgccagcgcctttggcacatgggccgccggcaccagacgcatcgccgtggcggtggacatcgcccagaagccgccgatggcgatccccaacagcagacggcccagcaggagaaacgccagcgaatcggcaaaagcgaccatcaggctggagactatctgcagtacggaaaagaacatcagcacccagcggcgatcgatattgcgggtggcggtggcgatcagcaggccggtaactaacgccaccagcgccgtcgcggtgaccgcctgtccggccatcccttcactgacgccgaggctgctggccatcggcgttaacaggctggcgggcagaaactcggccacgatcaggccgaacaccccgagggccagggcatagacggcgcgccaggcaggtttggcgggagacaggctctcgtcagcagctatgcaggaactcatatacaactctccaggtttattaacatcctggtcatcttagggacttactttcggacgatatatgatgcatactcttcagttattgattattcgtccggaattgccatgagccagcctgccatcgacctgaccagcgaactgttgcgcggtatgcgcctctccggcgttaactaccggcgcatcgaaaccgcacgcccgttcggcgtcggctttagcgccgtggcgggtaaagcccagttccatttcatcagccgcgggccggtgctgctgcgcatggccagcggagaacagttcaccctcgagagcggcgatgcgctgtttattcccaacggcgacgggcatgccctgctctcggatccgcaggccacggtggtcaatgtggcgcagctgcccagcgaaacggtgtgcagcacggtaagttgtatcaacgctggcgaccagcctgactgcccggagcgcgccgttattttcagcggttgtatggactttgagctcggcggcatgcagccgctggtcaaggccatgcccgaggtgatgcgggtcagcagcctgcttaatacctggccggagatccagccgctgctggcggcgatggagcgggaatccctcacccgccaggcaggctatgccgggatcctcgcccggctggcggacgtggtggccgcgctgattgtccgcggctgggtagcgtgcgggtgcggcaacgccaccggctgggtacaggtcctgcgcgatccccggctggcgaaagcgatctacgccatgcatcagcgcccgggagtcaactggaaagtggaagatctggcgcgggaggcgggtctttcacgctcgctgttcgcggaacgttttctcgccgccaccggcaccacccccgcccgctatctcaccgagctgcgtatgcggctagcggtgcagtacatcacccatgaaggccaggcgctggaaaaagtcgccttcagcctcgggtatcaatcgctggcggccttcagccgggctttcaaacgcatcaccggccagccgccgggggccctgcgcgccacggcacgctagagtcagcctttatgtaaagcgatacacgccgttgccgacacgaaagcgctgccccttaagcgccgggttggcgacgcggaacaccagttcggtcagctggttggcagccccttcacggaagataaattgctggccgcccacgtccagtccctgctcccccaggggcggaaagcccagcagcgcctgccagcgatcgcgcaccgcctgcggattgaccacctcgaacaccgcctgctcaagcgtaatgtcgcccagcggatgcggcgcgtccagcctctgggcgcgcagccgcgtcagccgggtggcgtcgtcttctccccactgcagcacaaagggatagaccagcccggcagtgtcgccatcgatggtgaagatccgccagcggatgatattgccctgcggatcgttgcgctggccatcgacaatcggtgacactgtcacccctgtgcgacgcaactggtcatgggtggcgtcgatgtcgtcgctgcgcagcgccacccgaaacagcgcctcattctccggcagcagccgtgcggcgtcgcgcgaaaggaggaatttgtccgtcgcggcgcgcagttcgtccgggtcggcaatggcgaggaattcgatatacgtcaggccaaaatagctcagcgcattacgggttccccaccccggatggcgcccaccggccaccgcccgcagctgctgcccggcaaagatttcaatcgccgcttccggctgattcacaaactgtactgcgtggtcccactgcaaggttgccatgatctctcccgcgattgtgcctggtcaggcgcctgcggcaaaagatagtgctggggtgaagggaatggcaaacaagaattaaatatatcgaaagcaggataagtgatttatatcaacgcggtatgtcgcatctgacaggcgatgaaacggcgggcaaagaaccgcccgccgcggggtcagaccgacccttctttctcaatcaccagaatacgcgccgccccctgcgggtgagcgacatgctcgcatcccaccccggcgtagaagatatcgccggcgtttagcatgatgatctgctcctcgccgtcgactttcacatgcatcgccacctgaccatccatcacggcaaacacctcctgaccatcattgatgtgccagatatagggttggtcggtccagtgtagacgcacggtggtgccggaaaaattggcaatatccagcgcgccccacgcgcggtcggcggtgaaatctttactgctccagctctgcatgatggtgtcctgtggtaagggttattttttctgccagtttgcccagggatccgctttctccaccggcgcgtcatcatcaagggaggcgagatacatagcctccacctctttgcgcgcccacggcgtccggcggagaaatttgaggctggacttaatgctgggatcgcttttaaagcagttaatgttgacctggcgggccatttccgcccaaccatagcgcgccaccagggaattgagcagcgcttccagcgtcacgccgtgcaggggatctttcgagctgtgcattacgatacgtccgttccgcattaaaaagtgcgcctaccttactggctctcaccgacgggcgcaacagacttcattacgcgcttcgcgcctatatctatttaacgcaaaagcactgaaccccgcgcggtcataaattagaaaataacgttattggttgcttatttggccttgaggcaagctgtgttcagccccggacagaggaaatcaccatgcgctgctgttgtgcccgaacccagaacctgaatctacccataacttattaccccgttttcggagaacacaatgaacgcgaccaccctgccgattctcgacctggcccgctacgcggaccccgcggataaagcggccttcctggccgacctgcgtcatgccgcccgcgacatcggcttcttctatttgatcaaccacggtgtcgacgacgcgcttcaatatgaagttcagcgccagtcccagcgcttttttgctctcgatgaggcgcaaaaacagcaggtggcgatgatccactccccccattttcgcggctataaccgcgcggcctctgagctgacgcgcggccagcctgactggcgagaacagtttgatatcggcgccgaacgtccggcgctgaccctcagcgacgacgccccgcgctggcagcggctgcagggtccgaatctgtggcctgccgccctgccgtcgcttaaaccggtattacttcactggcaacagcaaatgacccaggtgggcatccgcctgctgcgcgcctttgccgaagccctgcagctcccggagaatgctttcgatcagctctacggcgagaaacccaacgagcatatcaaactgatccgctatcccggccagcaggagacccaaagcagccagggcgtcggcgcccataaagattccggtttcctcagcttcctgctgcaggacgagcagaaaggactgcaggttgaggtcgcgcctggagaatggatcgacgccgtgccgctggccggcagctttgtggtcaatattggcgaactgctggagctggcgaccaacgggtatttgcgcgctaccgtccatcgcgtggtgtcgccgccggcgcagcagcagcgcctctccatcgccttcttcctcggcgcccagcttgacgcggtggtgccggtttacaccctgccgcccgagctggcgcgtgaagcgcgagggccggacagcgacccgcacaatccgctgctgcgcgatgtcggctggaattatctcaagggccgtctgcgttcccatccggacgtggcggaacgctactatcaggacgtgtttcgcgaacgcgccgagcaattgatcgtttaaccataactaaaaaggaacacaccatgaaatatgccgcttttaaactggcaggggtcgcactgtctctttctctggcatggacgtctgcccaggctgccgcgctgcgcgtcgccgcggacccggttccccacgcggagatcctcaactacatcaaaaaaatcgatcccagcctcgatctgaaggtggtggagctgaccagcggggtcaacgccaatgaactgctggccagtggcgatgtggatgccaactacttccagcatgttccctatctgaaggatcaggaaaaagcgctgggtaaaacctttgccgtcgcggccaccgtgcatattgagccgctgggaatttactcgcataagcataaagatttctcatcactgccggaaaacgccaccgtggcggtgccgaataacaccaccaacctgagccgggcgctgttcctgctgcaggcgcagaagcttatcaagctggaccctaaatttaccgacccggccaccaccctggcgacgccgaaggatattgtcgagaacccgaaacacctgaagattctggagattgaatcgccgcagatcccgcgctccctcgacgatgtcgacctggcggtgattaacggtaactacgcgctggaagccggcctggtgccagcgaaagatgccctggggctggaaagcgccgagcataacccgtacgccaatattctggtgaccaccccagccctggcgaatgacccgcgcattaaggcgctggcgaaagatctgacgtcaccgcaggtggcggagtttatccgtaaaacctacaacggctcggtgatcccggtggcccctcagtcatgataaccatcgaagggctgagcaaaacctacgccggaaccggccgaccggcgctgaacgatatcgcgttgcagataccgaaaggggcaatatacggcattctcgggcgcagtggcgccggcaaaagtacgctcatccgctgtctcaatttactggagcggcccacctcgggccgcattctggtgaacggacaggatattacccagttgaacaaggcggcgctgcgggattatcgcctgcgcactgggatgattttccagcacttcaatctgctgcatgcccgcaccgtcgctgacaacgtcgcggtgccgctggggattgccggagtgccgagggccgctcgcgaggcccgggtgcgcgaactgctggcgctggtggatctcagcgaaaaggccgccgccttcccgtcgcagctttccggtgggcaaaaacagcgcgtcggcatcgcccgggcgctggccgcccggccggaagtgctgctgtgcgatgaggcgaccagtgcgctggatcccgagaccaccgcctcggtgctggccctgctggcggatattaaccagcgcctcaatctgaccattgtgctgattacgcaccagctggaggtggtgaaaaccatctgtgaccacgcggcgctgctggaacagggcgcgattgtcgaaagcggtaaactcgccgacctgctggtgaccccatggtcgcggctgcgccagtcgctgctgcacgacccgcaggctgaacaggaatttcttacccgccacggcgttcaggggaggccattatgcggagtagcatgagctgggaagatttgtggccgttattactcgacggcacgctggatacgctttatatggtgggcctggcggccctgtttaccgtgctgatcgggttgcccaccggcgtgctgttatttatttcccgcgccaacgggctggcgccgatgccgaaactgaacgcgctgttaggcgcggtgatcaacatcggcaggtcgctgccgtttatcgtgctgctgatcgccctgatcccctttacccgcctgatcgtcggcaccacgctgggcagcaccgccgccatcgtgccggtgaccatcggcgcctttccgttctttgcccgtctgacggaaaacgcgctcgacgaggtggactacgggagaattgaagccattctgtcgatgggcggcaacgtctggcacgtgatttttaaatccctgctgccggaagccctgccaacgctgctggccgggatcacgctgaccatcgtgatgctgattggtttctcctccatggccggtgtgatcggcggcggtggactcggcgacctcgccatccgctacggctatcagcggtttaataatgaagtcatgtttggcacagtgctgatcctggtggcgatggtccagggggtgcaaatggccggcgatcggctggtgcgtagcctggcccaccgccgctagccgtcagtcattagttccagccgctctctgccgccagctggcggaccagagtggcggcgtcacactcgcggatcaaccccaccccctgcccggcccagtgggcgccatactcatggacaccctgggctttcgcggcggcggccagtgctttgccgatatcatacgccagcggataatccggcacggcgctcgccggatagccttcccccagcgcacagaaggcattcgccagacagcgtgccggacgcccggatatcgcggaggtcagcaccgtacgcccgtcaaggctgttgtggatcgccgcgcgatagccggcgtcggcggccgattccggacacagtaaaaacgccgtaccgagctgtacgccctgcgcccccaactgcatcacgctggcgatccccgctccgtccatgatgcccccggcggccaccaccgggatggttagtcgacgccgcagaagttgcaccagggtgaaggtgctcagctgcgcgtcaggcgcctgcggagcaaagatcccccggtgcccacccgcctcatagccctgagcgaccaccacgtcgatcccctgctgttcaatcagcagcgcctcctggagcgaggttgccgtcgccagggtaacgatcccctgccgccgcagacgttggatcgtctcaccttcaggaaggccaaaatgaaagctcaccaccgccggcgagatgtcgagaaggagctccagcatcggcgcatgaccgataaatgtctggtagatctcgcttaacgaatccggtggcgtactgccatagcgggcaaaatggggacgtaatgttgttgcccagtcggcttcccgccgggcgtcgcgccggggcggcgcatggcagaacagattgacattgaacggacggtccgtcagctggcgggtggcgactatcatcgcttccgcctgggcaacggttgaagcgcccagccccagcgagcccagcgcaccggcattacttaccgcggcagccagcgcgggggtggagacgcccgccatcggggcctgaatcaggggataatcaatatcaagaagcgaaagcagcgggttgctcatggtttcctcatgcattaacgatgccggaggcttaccatctcctttaaagatggtaagatcaacattattatcgtattgagaagaaaaatatgaaccacagcacactcgagatcttcattcaggtggcagacacgcagagcgtcacccaggcagcaaaacggctgggccgcgcacagtccaatatcacgacccgcattcagcagctggaagaggagcttgccgttgagctcttcgttcgcggcaacaaaaaaatggtgttgtccccggcaggcgtgcagtttctcagctatgcccggcggatcctgagcctggcggaagaggcaaagcaggctctgcatccgacaaccccaggcggcagtctgcgtctgggcgcgatggaggcgaccgccgccagccggctgccgccgctgcttacccgcttccaacagccgtgcccacaggtggatatcaccctcatcacccaaccgacccgccagttaaccgagggggtgttaaccgccgcccttgatgccgcgctggtctgcctgccaccaggggccgatgggcaacctgcttgtcccgccgagctggcattcaccccggtgttttatgaaaccctgatgctggtccgtccgcagaccccgggtccgctgcggttcgcggcatttgccagcggctgcagctaccgcgcgctgggagaacgctggctggcggaacagcaggcggccgtggaggtgcatgaggtcaattcctatcacagcatgcttgcctgcgtggcgtccgggcgctacgcctgcctgctgccgcagagcgtgctgtcgctgatgacgcttcccgaaaactgccttagcgaaccgctgtgcgaggcgaccacccagcttatctggcgcagcggcttgagcgcccccgccctgagcgagtggcgcaagctgctgcaaagcgtggcgattggctaagcctggcgttcggtaaagaccagccctgcggcaatcagcagcgccagcgccgcggcacagagcgccgggttaaatgaagccgcgatctgatacagcgcgccggcgataagcggcccggcaatctgtcccacaccgtacagtgcagtcatcgcggcaatcatattgaagctcacctgatggctgagacttttcgccttcggtagcgcaatggttacggtgcccataaaggtaaagcccaccaaaagcgcgcttagcacgcaaaacagcaatgaagcgctgcaggctggaaggatcacgccaagcgcctggacgagcaggttgcgggtcagcgcttgccggtatccccactttagcaccagcttatgccagatgaggcaggacggcgcggccgccagaccaaacagcgcccacagatggaccgggtcaacgctctgcagcgaaccggacagaaacaacggcagataagtggcggtgatgatatagccgaagcccgccagaccgtaaaccatcaagagtcgccacgccgcgcgacgggtatcgctcccggacgcaggcagggaggtttcaacatgggaaacccgcaccagtgcagccggcggagtcagcagccaacggatcgccagcgccagcagcagaccggcgcataatgcgctgagcagccagatctgctggctggtgaggctcagggcatgtccaagggcgatcccctccgctgagataaatatccccagccccaccccggcatacagcaacggagccccgtgatgatgccccatatgttccagcagccacagcgaacctgcaatcagcgttatcgcgctcagcgcgccggcgacggcgcgcagcgtaataatggtccacggcgagctcacccaggccagcagcgccaggctggcgatggtcaacccggcggagataatgctcagtcgggtggcggccccaggctgcacccgcgccagcagcaacgcaccgaccagatagccagcgtaattggccgacgcggcgagattgccctcgtgcagggttaacagaccttcattaagcataagcggcagcacgccggtgaaggcaaagcgcccgtagcccatgccgatcatcagtactatcgatccagccagtgccagccataaggcctggcgcgattggttattcatccaccaccccacagtgattctcaatttaagaataataatattgaatgattctttttttattatgataaagaggtattgttggcgcaaggcggatgttaatccgctatggtatttacagagagaaggtggcgcctgggcacggcttaacacacgccgggccgatttaccggtacagtatcaactcaacttatgctcacgggagtcattatgtcgttctgtcatatgcgcattgccaggccggtcagcgaactggacaccaccgccagcatgtattgcgccgggctgggactcgagctgctcggcagctttaccgatcatgaaggattcagcgggataatgctcggcgcgcccgaagcgggctggcatctggaattcacccagtgccgccaccatcccgtcaccccctcgccaggcgatgaagatctgctggtgctgtactatccgcagcaggcggcatgggaggcacagtgcgcagccatggacgccgccggatttctgcgcgttacggcgtttaacccttactgggaggtcaatggcgtcactttcgtcgaccgggacggctaccgcacggtattgcaaaaccgcgcctggggcatggtgtgtgattcgtcgggtatggcggcgagctgacgctgagcgaggcgggcgttaagcgctgtaaaagcagttatttacattcgtacaaatatcgttcccgtcggttaccgataaaacgctgtcgcgcctcgccagcgtcctcacggcgcgctatgctacacatcccgttgtattaacctcttatccctatgagcacttccgtcagcactacacaactcaatttgcgcattatttcgatcgttgtttttacctgtatctgctatctctccattggtctgccgctggccgtactgccgggctatattcactatcagctgggctacagcacctttgtggccggaattgtgatcagtctgcagtacatatcgacgctggtaagccggccgcacgccgggcgctataccgatatctgggggccgaaaaaagtggtcagccttgggatcgtctgctgcctgctcagtggcgccttcacgctactggcggtagtcctgcaggcaacgccgatgctggccattgccgcgctgctggcgggccgggtgtttctcggcgtcggcgagagctttaccgccaccggcgccaccctgtgggggatcaaaaccgtcggcgcgatccacacgtcacgggttatctcctggaacggcgtggcgacctatgtggcgatggcggtcggggcgccgctgggagttaccctcaatcactattttggcatcagcggctttgctacggtggtagtgctggtcgcggccatcggtctgctgttcgctcgtacccgccaggacgtcaaggtgaccgccggcgccagagcgccctttcacgcggtggtgcgaaaaatctggccttacggcctggggctggcctttggcaccgtcggtttcggcgttatcgccacctttatcaccctctacttcgccgcgcacagctggcagggcgccgcgtttaccctttcgctgttcagcgtcggctttatctgcgttcgcctggtgctgggaaataccattacccgctttggcggagtcccggtctccctggcctgcttcatcatcgaaagtctcggcctgctgcttatctggctggcgccatcagcatggatggccggcgtcggcgcctttctcaccggttcgggtttctcgctggtctttccggctttaggagttgaggcggtaaaacaggtggaagagcaaaatcagggaaccgccctcggcacctactcggcgtttcttgatctggcgctgggcctgaccgggccgctggccggctgggtcgccgggttctacgatctcgccacgctgtatctgctggcggcgatcgtggtggcgctcgcattcctgctgattttccgcgtacatcggcaacagcggcttgtcgccagagagtagtgtggcccggctcgcgggccgccgcggtccgatgacgccggcaaaaaatgaatcggcaattgacgacgattcggcttccgtgccaacatcccgtcagcgtctggcaacagatgcatggacggtactggtagacaacagagttcgcgcaacgatccagcccggtaccgtagtccaatccgaatcactgacccacacggtgaattcctgattctggcgggaaacacagacatgcaccaaagttttaatcagcgcgttcatttctattactgcgtcctggtcgcgctgaagatgcacggaaaatcgaaaaaagcaggtggtatcaggggaaagaataactttctgctgaaatggctgcgccgggcgcaggataacaacatttttcctcccgatatcaccagtgaaatcgaatggctgcgaggaaaaattattcaggctggctatgacaccgatctcgagccgatgctggattttgtctacgccaccgccagccgcgccgaggcgctcaaaaacgccgaataggctcctgcgcccgccacgggcgcagagacgttccctgccatgtctcaatcccaggttcggccaacagcgcaggcgcaatccagccacgttctattttgtgacactgtcacgcacaaaggtgaccgctgaggttcattaaccgctgacatgccgcctgacgcgttctatgctttaccctgtctccctcctcacacaggaactgcgcccgatggccgactggaatccttcgttgtatctgcaatttgacgctgaacgtacccgccccgcggccgacctgctctcgcgtattgcccatctgcaggtcgagcacgccgtcgacctcggctgcgggccgggaaacagcacccgcctgctacgcgccgcctggccgttggcgactatcgtcggtatcgataactccccggccatgctggtccaggcggcgcaggccttacccgactgcgaattcattgatgccgatattgcccgctggcggcctgcgcaaccgccagatgtgatctatgccaacgcctctctgcagtggctgacggatcatgagacgcttttcccccatctggtaaaccagctggcggacaacggaacgctggcagtgcagatgccggataactggcaggaaccttcccataccctgatgcgtcaggttgccagcgagatggggttgccggaccgtggacgccagccgttactcccgcccgccgcctggtacgatctgctcagccgccagggttgcgaagttgatatctggcgcaccacctattttcatccccttgcttctcatcaggcgattgtcgactggctgcagggcaccgggttacgcccctatctggcaggcctggacgagcaggccggaagcgcgtttctcacacgctatttcgcattgctggccgcacactatccgttacagtgtaacgggaaggtgctcctgcgtttcccacggctgtttatcgtggcgcgaaagatcgccgcctgaccgttggtataggtgggcagaaaagcggagtgatgaaaggtgtaaaggatcggctataccatcctgattttcaggattgataatcctgaacgttgcgatattcaatatcttagtcagcgtgtgacagtgatgactcctttaacctgcaaagagaatcactatgagtactcctcctgtcgatcgccgaacgctggctgctatcgcgccaaagctagccgagctgaccgaaacggtgctgtttggcgatatctgggcgcggagcgagctgtcgccccgcgaacgcagcctgatcaccctttccgccctgacggcgcagggcaaaactgaacagctgccgtggcacatcgcgctcggctatcagaatggcctgagccgggaagaaattgtcgaattgtttacccatctggcgttctatgccggttggccggcggcggccagcgccctgacctgcctgaacgcgcaggaggcgtcatgcccctgacccgaatttcgcttggcaccgcctggcgtcccgcggagtttgctcaattgtcggcgctctttcatgagtgtctggtggcggagttcgacgttccgtcagcagatagatttcagtttatcgaacgggccgccgatgagcagcgcattgacgacccgcactacctcagcgaaggacgcagcgcccgcttcgtgctgtttcatattttcgccggaaaaccgcgcagccgggcgcagaaagagggactctatcgtcggctctgcgcgcggttagacgacgagatggcggtcagcccgcaggacgtgatggtggttatccagtttaaccaactggaggactggagttttagcgcagggaagatggcggatgaatgagacaggcggcgccgcaagaggcgccgcgtttcagcactatatcatttgctaccatgcacaacagcgatcgttccatgaatcacgatacatgatgttcccttctgtgtatatccaggtgatcgtctcataacggaaatcaatgtcttcaaggtgagtacttgtcattccggccggatgtaaatttggtgtgattgtcgtaatcttaatattcgccatcgctatgttaaaatattcaacctccagtcccgcctcatttattctgtacatttttagcgttgccgatcttaatgttcgaccttcacaaagagccctaaataacaaaggtgttgttctgtcaaactctttttgaattttaaccggtgtatgaagacgggttcccgtcagctttcctgtattattatcggtaggtaaccaaacatgatgattcactgcgcgcaattcgatggaacccgtgcgtgtgggcatcaggcaagaacctataataggcgaatcattctcatcagttaaccataaatatgctggatttgacattacccctcctctttcatatcagtttttaactttaaaccaaacgacaacgtgaaacccaatgattaataaaacaaaaagtcctattaagttaatggcaatgtcaggaaaaagaaagactgcaatcatgctaaatataatgattaataatacaataccccatccccataaaaaaagaatgaattcttcttttaaccatcttttcaagaaatccatccattcacctcattaatttaataagtaattcagcaagttcatcatcagaaataatcatcggatttaaataaggaacgcctgtgatgacagattagatcattcattgttccggcacatatttcttatgatcatctggcctttcaatatacttataaaacgatggccttgatagtaatattgactctactcttttgtttatattccctcgccccctgcccggtttaaaatatctcggttagctattacttcgtattgtttcatattttcgctggaaaaccgcgcagccgggcgcagaaacagggactctatcgtcggctctgcgcgcggttagacgatgagatggcggtcagcccgcaggacgtgatggtggttatccagtttaaccaactggaggactggagttttagcgcagggaagatggcggatgaatgagacaggcggcgccgcaagaggcgccgcgtttcag

SEQ ID NO: 70 - DNA, 101153 bp, Unknown
  source: /note="Description of Unknown: MKP2_coc_1 Mutant Bacteria sequence"
aggccgggccgatcgacgtcgaggtgtacgccaactacggctttgactcaaaggcggtggacagcgacgcgcgtctcgaagcctggcagggcgggctggtgctgagccacaccaacgacagcggggtgaacaaggtgatcctgcgctattccgacaactcggataacagcgtctataacaaaaccgacgacctgaccacggtctacgccagctttgagggcagccataagttcacccagcaggcgcagatcgaatacctgctggccttccacgactacgacaacggcaaggacaacaccgacaaccgcaaaaactacggcgccatcgtccggccgatgtacttctggaacgacgtgcactccacctggctggaagcgggctaccagcgcgtggattacgaccagggcggggataaccacggctggaagctgacgctgtcgcagaacatcgccatcggcatggggccggagttccgtccgatgctgcgcttctacgtgaccggcggccaggtggacaatgagcataccgcgaaggtgaacggcacccaggaccagcagctggattcgctgaacgtcggtgggatgtttgaggcgtggttctgatgcgatagcgttgccgaaggagcgttcccggctggcgctacgcttagccgggctacaactggtgcgctccatttatgccggatggcggcatacatgccttatccggcctacgttccttcctgcgggctccccccccaggaccggcaagcgcagcgccgccgggcagtcagacccgtgccctggtggcgtcatcaattctttatctctggcttaatcggcgggcgatgcgctcaagcttcatcatcaacagcagcgtgacgcccaccagcacaatggtcagcgccgagccatcggcgatattgccgcgatcggtgaggctgaaaatggtcaccggcagcgtcgtccagcccggcggatagatcatcaccgtcgcgcccagttcccccatcgacagcgataagctcagcgccagcgccgagatcatccacggcgtcatcagcggcagtgtcacatggcgcaggcgataccacggcgaagcgcccaggctggaggcgacgttttcaatatcagcggaaatacgcgccagcccggtcgttacgttgctgaaggtaaaggcggagatcagcacgaagtgcgccgccagaacgataaagaaggtgccgttcatctgcagcggcccctggctgaacgccaccagaatgcccagcccgacggaaaccgaggggatggcgctgggcagataaaacgccaggccaagatatttctgtagcgtcgcgccatactggcgcagcgccagcgccgcccacatcccgcacagcagcgccagcaggctggcgcagaagcccaccatcaggctcgaaaacagcgaatcccacgccgcgccgcgaaaggcgttaacaaagtgggcaaaggtaaagccggtgggcagcaggccgttccattgtttactcaggctggagagtaaaatcaccgccagcggcagcaggaaaacgccggcaaaaagcgtcaccgccagcgcgcccgccgccgcgcggcctttacacgaccaaatcaacatcgttaactccttacgccagtgcgcgccgccgccagccgatagagcataaacagccccagcgacagcagaatattgatcagcgcaatcatgcaggccacgctgtaatccgactccagaatcgccttgctgtagaccatcatcggcagggtattgacccctttggcgccaataaacagcacgatcccgaactcgttagtggtcaatagcaggcacaggctgccgcccgccatcagcgccgggagcgccgccgggaagataacctgggtaatcacccgtaacggatgagcgccgagaatactcgccgcttccagctggctcttatctatctgccgcagtcccgccatcagcgggcgcatcaccagcggcgtaaagacggtaatctccgccagaatcacgccgttaatcgaatagaggaagtctaccggcggcagttcaaaagcaaacagcgccatcagggtgccgttgagcagccccgccgagccgtaaataaaggtgaatgcgagagtgataagaaaggtcggcagcgcaataaaagtatcaatgacccggcccaccagttggctgccggggaacggaataaacaccagaatcagcgccaggacgctgccgagcaccagacagccaagggtagcgaacactgcaatctgtaaggtattgagcagcgcgccaataaagcgttttgagtcaatcacctgccagaaagtctcgaggctcaggttgccgctggcgtcacgtaatgcctgttcggcgatcaacagtagcggatagaaaaacagcgtcgccagcaccagcagcggcaatgccagccacaggtaagggcgtaggtttcgcgccggacgcgcaagcgtgagggtttgcgccatcattgcacctcgatcagaaccgcatcgccaggttcgaagtagagcgccagcttgtcccccgcgcgcggcagcgggttcacgtgggtcatcacaatccgcaccgcttcgccggcaacatcgcacagcagatgcgtcagatcgccctgccaatgtaccgaggtcagggtagcattgagacgattactggttgccgatcgcggcgccaggctcatgtgctgcgggcgaatgcataacagcttgttgttgccatgcaggccgccccggctgaaggcgttaatcaggccgccgccacagctcacgctaaccagccccggctcggggctgtctttcagcgccgtcgcctgcaggatattggcgcggccgaggaattcggcgctaaagcggttcggcggatagtgatagagctcgtgcgtttcgccgtgggcgattagcgagccatctttcatgatgccgattttgtccgccagggtcagcgcttcggtctgatcgtgggtgacgtagagaatggtcagttccggcagttcgcgatgcagacgggcaatctcttccaccatgttatggcgaatttgcgcatccagcgccgacagcggttcatcaagcaacagcacccgaggacgcacggcaatcgcgcgggctatcgccacgcgctgctgctggccgccggaaagctgatgcgggtagcgggtggcgtaatccgccataccgacgatttttaaggcttcagtcacccgctcggcgataagccccctgggctgcttttgcgcccgcaggccgaaggcgacgttatcttccaccttcatatgcgggaacagcgcgtagttctgcaccaccatcgccagcccgcgtttgtacggcggcagttgggtgacgtccgtatcgccgatcaggatccgcccgccagccggttgcacaaaaccggcaatcgcccgcagcaccgtggttttcccggaaccggaagggccaatcagcgccagcacctcaccgggctcaatggtcaatgacagcggttttaagaccacgttgccgtggtatgaaacgcgcagcgagtccagggtgatcccggacgtccccgccagcgacggggaagaagtgacggtggttttcatcaacatcaggcttactcgctatcggtcactttatgccagcgggcaatgtcagccgacagcgataccgcgacatcatcccagttcggctcccagctcttcacgccgtcgagcgccgctttcgccgccttaaagttagcatcatccggcgctacatcgctgcgtaccggcaggccccaggagcgcgcgctgacgctggattgcgccggtttatccagcaggaaattgatcagctttttgccgttttcgctgttcggtccgttctgcaccagcccgatggtgtagggcagcgccagcgcgctgcgctcgcctttgtcatccgccggccagaaaattttaacgttcgggttacgcgccatctgcgacaggttcatctgcagatcgccgttggcgacgtacagctcgcctttgttgaccagcgccgtcagcttaccggtcgaggccgatgggccaacgttattggcctgcagcttacccagatacgcaaaaccggcgtctttaccgccgaggctatggaacgcctgcagcatcaccgcggtaccgtcgcccgcctgacccggcgtggagtactgcaacttgttcttgtagcggctatccagcagatcctgccagctggccggcgcgcttttcagcaactggctgttatagatgaaggtcagatagttattcaccagcggcgcgtagcggtcgttagcgccggggatctgcgcgcttccctgcggggtaaaggttgccagcaattgctctttcgcggcgcgctggataaacggcggcaccgtgaccagcacatcagcctgcggattggtgcgctccttggccagacgttcgacgatcgcgccggagccgccttccacatactgcactttgatgcccgtcgctttggtgaaggcagcgaactggctctgataccagctgttatcgccgtcatgcaggccgtcggcggagtaaaccgtgacgacgccgtccgcccaaaccggagagctggtcagcgcgaacagggacagcagagcaagtcgggagagtttcatcgtgtaagcctcatcggatagtcagttattctggtgtagaccagatttagcttcacgctaccgggggtttatgacaaaacgatgaaagaagtgtgtcgaaggagttaaaacgagcgggatgcgtagccccggcacgcgctagcgccaccggggagatcaaaaaatttaactaataaaatcaatgggtatcgacttcgatccgcaggctgtcatgccgccagtattcaatatcgtaatcgagaatacgcccgtgctgatcgtaattcagcctgcgcaacagcagcgccgggcgcccctccatcacccccagcgcctcggcggcctgcggcggcattgaggtgggataaaacgacagatgcatactggtatagatcaggtcgtagtgagtttgataaatctcggtcagactgccgttgagatcgtggcgcagcagctcaggcacccgcgcgggcagacagtggttttcgcagtagcacaccggccggccgtcggcatagcgcagccgggtcagcaggtagacctgatcgaagggctgcagcgccagcggcgccattacgtccagcggcacggcagccaggcggccatcaagcagcaccgttttcggttcgcgcccctgttcgagacacagcttgtggaagttggtattttgcgtcggatccagccacagacgctccggcgtcacaaaccagccgcggcggtcggcgcggtaaatcacgccgctggcctccagctgcgccaggctctcacgcaccgtaatccgcgtcgtgttgaacagcgcgcacagctcgcgctcggaaggcagcttgtcgccgcttttgagggcgccgttttgaatacgcgcctgcagctgcgccttaatcatcaggtattgcggcatctcgccagagggtgatttcatgtttactcactgccacttttcgtgcgctcattatacatagccagatgaattttttgttgcagcgccacatttcctttgaccctgccccggctttgtctccatgataactataaatctggtatagaccaaatggtgagacaaatgacttcacgaaattacctgctgctgacccccggcccgttaaccacctcccgtacggtgaaagaggcgatgttgttcgatagctgtacctgggatgatgattacaatctcggcgtggtacagaccattcgccagcagctggtgcagttggctaccccggccgacggttataccgcggtgctgctgcagggtagcggcagctacgcggtcgaagcggtgctcggcagcgtcatcggcgaacagggcaaagtgctgatcgtcagcaatggcgcctatggcgcgcgtatgattgagatggcgcagctgatgggcatcgcctgccacccttacgactgcggcgaagtctcccgtccggacgcggccgcgatcgaacagatcctgcagaacgacccggcgatcacccatatcgcgatggtacacagcgaaaccaccaccggtatgctgaatccgatcgcagaggtggccgaactggcgaaacggtacgataaacgctatatcgtcgatgcgatgagcagctttggcggcattccgttggatatcgccgcgctgaatattgattacctgataagctccgccaacaaatgcattcagggcgtgccgggctttgccttcgtgattgcccgtgaagcggagctggccgcctgcaaaggccgttcgcgctcgctgtcgctggatctgtacgcccagtggcgctgcatggaggacaaccacggcaagtggcgcttcacctcgccgacgcataccgtgctggccttcgcccaggcgctgaaagagctggcgcaggagggcggcgtcagcgctcgccatcagcgctaccgcaacaatcagcgccggctggtcgccgggatgcgcgcgctcggcttccggccgctgctcgacgatagcctgcactcgccgatcattaccgccttttattcaccggatgcgccgcagtatcgctttcacaccttctaccagaagctgaaagatcagggcttcgttatctatccgggcaaagtatcgcaaagcgactgcttccgcatcggcaacattggcgaagtctacgacgccgatatcaccgccctgctggcggctatcgacaacgccatgtactggaaacaataaggaaccgccatgaaccgtattagcgcactgatccttgactgggcaggcaccaccgtagacttcggctctttcgccccgacgcaaatcttcgtcgaggccttccgccaggccttcgatattgagatcacccttgaagaggcccgcgtgccgatggggcttggcaaatggcagcacattgaggcgctgggcaaactccccgctgtcgatagccgctggcaggccaaattcggccgcgcgatgactgccgccgatatcgatgcgatctacgccgcgtttatgccgctgcaaatcgctaaggttgtcgatttttccgcaccgattgccggcgttgtcgacactatcgccgcgctgcgcgccgagggcctgaagatcggctcctgctcgggttatccgcgcccggtaatggaaaagctggtaccggccgccgccgcccagggctacgccccggaccactgggtcgccaccgatgaccttgccgccggcggtcgtccgggcccgtggatggcgctgcagaacgtgattaccctgggcatagacgatgtggcccactgcgtgaaggtcgatgatgccgcgccgggcatcagcgaagggttacatgccgggatgtggagcgtcgggctggcggtgtccggtaacgaattcggcgctacctgggaggagtaccaggcgatgtcgaaagaggaaatcgccacccgccgcgagcgggcggcaggcaaactgtatgccgccggggcgcattatgtggttgataccctggcggacctgccggaagtgattaccgacatcaatgcccggctggcaaaaggcgagcggccttaagcgggtgaattcaccttcactttggccgccaccagcaggccggtaaacagcatcaatatccctgacaacaccagcggcgacagcagccctaagtggtcaagcgcaatgccgccgaccgcggcgccgcaggtgttggccagctggatcaccgccacctgaatcgacccggctttttccgcctgatcggagagggaacgggtgatccacgttgaccaccccaccgggatcagcgcaaacgcgaagccccagataatcgccaccgtcgaggcgacgattttgctctctccccacagcaccagcgccaccgcgcaggcggtcagcaccagcggcgcaatcgccagcgccgctttcaccgaacgcttgagcagcaccgaggagagcgaggtgccgataaagctggcgataccaaagctcagcagcaccagcgtcaggccgtcgacatcaaacccggcgagggtcatgtacaccgggcgaatataggtaaagaaggcgaactgtccggcaaaggccatgaaaatggcgcacattccggccatcacccccggacgcttcagcagaccaaacatattttgctgctgagaagccgattcaccgggcagcgacggcagcgctttcagcacccagagcgtacacagcacgcccatcaccgccgcgccgttaaagacgttgcgccagccgataagcccgccaaggaaactgcccaacggggcggcgatcaccagcgcgattgataccgcgccgaagataatcgatagcgctttcggcaccacgcgcatcggcaccagacgcatggtcagcgatgcggacatcgcccagaaaccgccgagcgccaggcccagacaggcgcgccccagcagtagcagggtgaagctatcagcgaaagataccagcaggcaagaaagggtcagcagcagtgaaaacaggataaccacgtagcggcgatcggttttacctatcaccgtggtgataaacaggctggaaaacatcgcgacgaatgccgtcgtcgtcaccgactgcccggccatcccttcggagatgcctaaatccagcgccatcggcgtcagcaggctgaccggcaaaaactcaacggtaatcaggcaggcgacgcagaaagcaaccgcgaaaaccgccgaccagtttggccgcgcgagatcgcgtgcatggggtttggtttcatttgaatgactcatgagtgacctgcgaagaaagtggcggaaagctgcgcagtgtaacattttgtatgtgacgtacttaacgttttcgcaactcttctcgcttttcataagaggttgcgtagctgctcgcatgtttaaaaaaacgatgcttgctatcgctttaacaaatctcaggagaatttaatatagcaccatgtgctatacttttaacgacaggatgtcagcaatgcgtatcttcaaaaccaaatggttcgccagagaggctagctctcatggcatttccgacgacgagctctatcaggcaattcaatctgcgcttcagggcaaagtggttgatttaggaggaggggtttataaaaagcgactcaacaagaatcgcgatcgcgcaatcatacttaccaaaagcgcagagtattggttttatacctttctatatgccaaacaggatatggccaatatcaaccatcgcgaattaatggggtttcgtgagttagcaaaacactatgccaatctttctgaagagagaacgacggccttagttaaaagtaaagaattagtggagatttgcgatgacagcaaaaaataaatacaaaagcccggctttcgaagcgatccatagcgctgcgtcggggctattcagcgttggcgcaatcccacaggaaacaatgcgccattttgatgaatcatgtctcggtagcgtagccgcacttcaacccattgaaattaaagcgctacgtgaacaactcaatgttagccaacccgtgttcgctcgttatctgaataccagcgtgtctaccgtgcaaaaatgggagactggcgctaaacgaccgagcggaatgtcattaaaattgcttagcgtcgtacaaaaacacggcctgaaaatcctactgtagttattctgccggatggcgcttacgcttatccggcctacaagtgacgagtgcggaaaccgtaggccggataaggcgcagccgccatccggcacacaaaagcgatgaaccacaggccggataacaatgagatcagtgcagccagtgcacgccgtcttccgggagaaacaggtcgttgtagcgctgctgtaggttatgcaaatcgctcatatccggatccagctcgcgcagaaacccttgcgccaggcggatctgcgcctcggtgatcggcgccgctaaacgcgctttttgcatcaggcgataccagtaatgcaggtttttttcgctggcgtcgacaatcgcgacctgccagatcagcagcacctgggcggcgttctgcagatgtgcttcattcggccgctccaggtaacgcaaatactcattaccggcggtttttcccagctgatcgatcatcgattccagcgggacaggcgtgatgccgaggcgttcgctcaggcggcggatcgcgcggcgtgaatcagaggtaagcacccgaaatcccacaacaaacaccactaccagggtggccagtcctatccagatcatgcatcctctcatccaatcgcagcctgactatcataatgggaatttgcctgctgtcgactgtcgggcctggcataatgcgcaagaaataaaaaagcccggcgcgaaggccgggcaaggttaccaaatacctggtgaatcaggcggtctgcaaaatacggttctttttctcgcggcgaattttacgctcttcaaagatagccacgatggccatcaggcagatacagccgacggcggcggcgtccagcgccgcaaaggtgccggcccagccggtcaggccgaagaccggggtgccgtcggcgatcatcccgagacccagtttggcgaagctatcgccgatcagataggcgaaggtgcccttgatcccatcggcggcgccgatcgcttttttcggtacgaaaccgacggcggcgacgccgatcaacagctgcggaccaaacaccaggaagcccagcgcaaataacgaggccagatagacgtactggttgctggcgtgttggtaaaccccgagggtggcgataatcagcgccagcgcgatgcaggccaccagcgcgcggcggccgttggccagatccgacaaccagccccacagcagcgtgccgaccagcgcgccgacctcaaacagggtaaagccctgaatcgccacctctttcgacagcttcagctcctggaaggcgtacacggtggaccactgatcgataccgatacgcaccacgtagaggaagatgttggagaagcacagcagccagatcactttgtttttcagcacgtactcaacaaagatctgccacttggtcatcgcattttcttcggtctctttgtcctcttcgctgatcgcttcgccaaacagctcttccgccgtgccgaggccgtaggattccggagagtcgctaccgtagcgcaggccgataaagccaacgatcagcgcaataatcgacgggaagataaacatgccgatcacatggccgtcgaacagatagttggcgccaaacagcgccacgcccgccgcgcccgcgccgccgaggttgtgggagatattccagaagccgaggaaagtgccgcgtttgcgtctgggcgtccacttggtgatggtggaatagctgcacgagccgccggtgctctggaagaaaccgctcagcgcatagaaggcgatcatcaggaacaggctggtagaacccgcccccatgctggcgctaaagcccagcatacagatggcggagaggatcagcataaacggcaggaactgcttggtgtttttgccgtcggcataataagagaccagcgtcttgcccacgccgtaggtgatggagaagcccaggccaatcatccccagctgggtcatgctcagcccgtaggtggagatcatgtcgttctgcgcgatgttaaagttcttgcggatcaggtacatggtcaggtagccgatgaagaccaccagataggactgcatgaaaggtttgaaccacattttgcgccgcacatcgagcggcagatccagggtcggcttgcgcacctgattcagaaaggccagcatgggtatctcctgagctgattttttatgcctgcgtaataaccaggcattgtaaaaaccagcgcgccgtctggcctgagacggcgtccaggtaaaaccgggaaaatttcttagttttgtcccgttcgcggcgaaagggtgagctacatcacgcttcgctggcggtacgcggcgcctgcgcgtttaaaaacggcagcagcagcagcgcggaaatgccggcggcaatcgcaatcaccacgaagaatccggtccagtgccagatatccatcacctgcgccagcggccagccggaaagcgaggcgccaagataagcgaacaggccgacaaacccggttgccgccccggcggcttctttatgcgaacattccgccgccgccatgccgatcagcatctgcgggccgaaaacgaagaaaccggtagtgaagaagcaggccgcctgcatgacatagctggcgaacggcatcagccacaggccgccaaccgacagcaaaattccggcggcgaaaatcaggttcatcggcccacggttgccgttaaacagcttatccgagccccaccccgccaccagcgcgccgataaaaccgcccagctcaaacatggtcaccgccgagttagcggtcaccagatcgacgccgagcgtctccgacatatacagattgccccagtcgttaatcgccgcccgcaccacgtacaccagcacatagcacaacgacagcagccagatgtagggattggccagcacgtagcgggtcaggatcgctttacgagacatcccagcgccttcctgctgctgggcgatttccagcgcatcgtgacgccagtcacccacggcgggtaaccccaccgcctgcgggcgatcgcgcagccgccagcacagatacagtccggcgaggatcgccagacagccggcaatggtcatcccggcacgccagccgtagtgcaacgccgccgctcccaccaccatcgggatcagcgcgccgccgacgttatgcgccgtattccatagcgcccaccagccgccgcgctcggtccgcgaataccaggccgtcagcagtcgggcgcagaccggcgagccccagccctggaagaaggcattcagcgcccacagcagcgcgaaagcccatagtgaggaagaaaaaccgaacagaatattcaccaccccggtggcgataagccccagccccataaaatagcgggcgtcggagcggtcgctgacgataccggagaaaaatttcgacagcccgtaggtgatatagaacagcgtggccagcaggccaatatcgctgcgggtcaggacgttgctggcgagaatttccgggaccgcggcgttaaagcttttgcgggtgaaatagaacagcgcgtagcccagccagatggtcaacaggatatggcgacgccagtagcgataacgcgcatcaagctcgcgtttatcgctaatcggcgcagcgtccggcggggcttttaaaaaggcgaacatcggcgatcctctcaggcgtaacgcagcggtagattgacgcacacccgggtaccatgggtgcaggagatcgtcagtgtgccgcccagggcggtcacgcgctcgcgcatgccggtcaggccgaacccctgcagattcgaccccggcggcaggccgcaaccgtcatcttccagcaccagcattagtcgctcatcctgctgccagccctgcagagtgacagcgctggcgctggcgtgcttgacgatattattcagcccctcctggcaaacgcgaaacagcgtcacgcgctggttctcgctcagtcccgcctcgttaatccgccagtcgagatggctgacaatgccgcggtcctccagctccatctcgcgcatcaacgaacgtaccgcctgctccagcggcaggtcgtcgagctgacgcggacgcagacggcctagcagtctacgcaccgagtcgtaaactcccagcgacagctgttctatcagctgaccgctctggcgcacgctggcattgtccggcgccagccgctgtacgatcccggcctgggtgcggatcgcggtgatggtctggccgatatcatcatggagctcgcgggcgacgtctcgccgcacgctctcttcggtctccagcaggcgttcagccagccgacgattacgcgccagctcgctttgtaatgactggttcagctcgcgtaaccgctggatccccgcccccaacagcagcccggtgaggctctgtgccagcagggaaagcaataaatcgaccgggtgatcgtgccaggtctggctggcaatcaaggcgatagcgttcatcagggtggcgatcagcgcgccctgccagccgtagtgccaggcgagggcgataatcggcagcgccagacaaaacggggtaaagcgggagagctcggcgggcaggccaagctgcagccacaggctaatggtgaataacagcagataccagatcagatgccgcccgcgccagttaaccggctgcgccaccagcgccggccccagcggccgccagacggtgctggtaagatagtgccagaaaaccaggcaggtcggcgccagcgtcaggccgccggtcagcgtcaacagcagggcgttaagcccctcgtccccctccgccagccacggcagcgattgcagcagcgcggcggccattaacgccccgccctggcgcagcagcgtcagccagtcgcgctgctgccggtagcgcgagatcaacgccaccggcagcagagtcagcaggcttccggtcatcaaaattatcgggtgcgccagcgccacctcctgcgccagccagaagataagcagccactcggttcccagcagcactggccagtagccgcgggggcattgcagcattaaccccagccgcaggccaaagggaaacagcagcaccgctaaatccgcgcgttccaccagatgcagactgatgctccacaggcagaaccaggcggccgcgaagataaaggcgcagccgatgaccgacagcaatcgtgagacgacggccttcattgccagctatcgaacatgcggcgcgccagctcaacgtcgttgctgacgcccagcttttccagcaggttggcgcggtgtacgtggacggttttcggcgacagaccgagctcggcggcaatctctttcaccgccatgccctgcgccagcttttccgccacctgacgctcgcgtttggtgagcggatcctggcgcccggcggccagcttcatggcgatatccggcgtgagatagcaaccgcccgccgccaccgtgcgtaccgcggcgataagttcatcggggctgcagcgtttcgacaggaagccgcgcgcgccggcattcaacgcttgctcgatcagcgccgggctatcgtgtaccgacagcatgatggtcgccatccccttcggcagctggctgagcagctccagcccggaaatatccggcattgagatatcgcagatacagacctgcacgccgcgccccggtagccccgtcagcgcctcgcggccgctaccaaattcggcgacaacctgaaaatcagcttccagccccagcagctgagcaaagccggagcggacaatcaaatgatcgtcaataagggcgatggtggtcatggtgtgtcctggtgcctgaaaacgccggatggcggcgtaaacgccttatccggcctacggattcactgcctgtaggccggataagcgcagcgtcatccggtaaaggcgcttaccttagcgataagcgcgtggctgttcaagccttgagcgctattcgaagaacaccgcaattttgttaaacatggtgggatcggactggttacgcgccactttggtgacatcttccagcttttcaatctggctaatcatctgccccagtcgctggtcatcatttaccagcagccagatgcggctgtgttcgctgccctgaattggcagacagagaatgccttcgacgttaaacgcgcgacgggcaaaaagcccgcacacgtgggtcatgacgccgggatggttgcggacggtgagttccagaatgacgttgtcacattgtttttgcatggcttattcccccaccatttcagtattggccgcacccggcggtaccatcggatacactttctgctgtgcgtcgatgcgcacgtggatcagcgccggccccggacggtcgatgatcgcctgcagcgccgcctgcggatcgacttcattatttaaatcacaggtttgcaggccaaaaccggcggcaatctgcataaagttaatcatccccggataggtggcggcaaaaacgccctgctgatagaacaggctctgctgctgatgcaccagccccagcgcttcgttgttcagcaggataatttttacatccagctgattttcggcggcggtggccatctcctgaatattcatcatcaggctgccgtcgccggagaagcagataaccttgcgctgcggattcgccagcgccgcgccgatcgccgccggcaggccgaagcccatggtgccgaggccgccggaggtcagccactggcgcggacgattgagcgggtaggcctgcgccgtccacatctggtgctggccaacgtcggtagtgatgatcgcttcatcatccacgcaggcggccacggcgttaatcaggccgtaatgggagagcgggtcgctttcctgcgggatggcgcaggggaattcgcgctgcaagtcggccaccagctggcgccattcctcgcgcggctgcgcctcaatctgcgggttcagctgggctaagacttccgccacatcgccctgaatcgccacgtgcggttgcttgattttgcccagttcggcgcggtcgatatcgacgtggataatcttcgcgttcgggcagaactgctcggtcttgccaatcgcccggtcatcaaaacgggcgcctaaaacaatcagtaaatccgcctcctgcagaatgaagttggtgctgcgcgcgccgtgcatccccagcatccccagcgacaaaggatgcgccttcggcagcatgcccagcgccattaaggtcatggtggtcggcaggttggctttttccgccagctcacggatcgcctgcggcgcgttaatcaccccgccgcccagatacagtaccgggcgtttcgccgcgttgatcattgccgccgcttcacgcacgctttcaggcgcgaatgccggtgccggggcgcgctcgccaggctcaggcagcgcttccagctcaatggtcgccgactgcacgtccttaggaatgtctatccacaccggcccgggacgcccggactgggcaatacggaaggcgtcgctgatcacctgcggcagctcggcaatgtcgcgcaccagatagttatgtttggtgatggggatagagatgccgtaggtgtccacttcctggaaggcgtcggtaccgatcatcgaggccggtacctggccggtgatgcagaccagcggaatcgaatccaggcgggcatcggcgatcgccgtcaccaggttcgtcgcccccgggccgctgcaggccatacagaccgccggcttgccttcggtacgcgccatcccctgggcgataaagcccgcgccctgctcgtggcgcgccaggatgtggcggatctgcgtgctctggcttaaggcatcgtagataggcaggatggagccgcccggaatgccgctgaccatagtgataccctggcgctccagtaaatgaacaaccagctgcgcgccggtaaagcgcattgtgtttgatgtggtgcccgaacttgccatgctccagtccttttcttctgggccgactttaccggggggctcgccaacaaaaaaccccgctcggtttgcgccggcggggtttggaattcgtgttgttccggaccctacggcgcattgccgacgacgaccaccacagacacgacgaccaccgcggctggcgcggtttttagtagggtcgaagcgatcagggttgcgttcattagggacctgttgtgtcgaaaaataagctgaatttatacaaacacaggttttacgttttcacaatggatttattttcatccacgaaaatttgcgcgaaagatcacagttcggcgcaaaagggcagaaaacaaaaaaccccgccggagcgaggtttttatcagcatggttacaggtggtagccgcaagcacactgtattacgtcaacgccaaaagtatacgcgatcgctgcagttcgcgcaatttaaggtcggtttttctctgtcatagagtatggatgagaggggcggatttgtccaaaaaatactgttcatccatacagtatttatctatactgggtgtgttcactttgtgccattcgggggccgcaagtttgaccggcgcaacgaagtcctggctgaaacgggtggtgccgtcagtgccttaaccccgggagagcacactgtgttacgtcaacaacgtgcagtcactggcccgcgcggcaacgcgtggctcagcgctgcgcacccctgtcgttgcaggcggcgggccgggaagccgttcatggaaaggacgaactatcggccagggcagacgccgccggcgacaggcagggataagctggcaacgggcagcggaaaggtacgtcagcttattgtgctccttaaccacaggagacgcgcgtatgggcggaatggatattattattttgatcctgaaactcatggttgctgtgttgcaactacttgatgcagtcctgaaacagttccgctgattcaggttcaagtcgcacctgaggggggcgggaaaccgcccccctgcaggcgcccgccgggcgtcccgggatgacttgatggaggaagctatgccacccctgttaattgccgccacgacgccggatgccccggggttcgcggcgctacgaattgaaagccttgaacagcatttcaatatgctgcgccgcctggcggaaaactggcagagcggcaaaaaccgctttaacgcgccgggcgaaacgctgctgggcgccttcgtcaaccaccagctggtaggggtatgcggcatcaatagcgatcccttcagtccgcagccgcgggccgggcgcattcgccacctctacatcagcgaacgctatcgtcgccggggcatcggccagcagctgctggtctcggttatcacccactccagcgcctggttcgactttctcaacacccatgccccggcgcaggcctggcccttttatgaaaggcttggttttcgcccggtgtacgatgaaccgcgggtgacgcatcgcctgttttgttcgctttaacccccgctggcaggcagcgcgggcgcgtgttacattccggtgaccttcactgttgaacctgtctgcgatgaccctcaccgtattctgcattttgctgttcgccgccctgctgcacgccagctggaacgctatcgtcaaagccagcgccgataaaatgtacgcggcgatcggcgtcagcggctcggccgcgctgatcgccctggtgatgctcccctttgccccgcagcccgcgctggtcagcgccccctatctgctggcgtcgtgcgcgttacaggtggtgtatacggtgctggtggcgaagacctaccaggtatcggatatgagccagacctatccgctgatgcgcggcactgcgccgctgctggtggcggcgataagcgtgctgttcctcggcgatcgtctgtcgccgctggcctggctgggtatcggcgtcatctgcctggcgattctggcgatggcctttaacggccgcgccagctcgcgcaaaggcatcgtgctggcgctgatcaacgcctgctttatcgccggttatacgctggtggacggcaccggcgtccggctggcgggctcggcgctgggctacaccctgtggaccttttttatgaacggcttctgcctgctgtgctgggcgatggtggcgcgacggcgtgaggccagtcgttatttacgtcagcactggaaaaaaggcatcctcggcgggatcggcaccatgggctcctacggcctggcgctatgggcgatgacccaggccccgctggcggtggtcgccgcgctgcgtgaaacctccattctcttcggcgcgctgatcgcctttatcgtcctgaaagagcaactgatgccgctgcgcatcgtggccgcctgcgggattgccgccggggcgatcctcctgcgcctggcgtagcctgagatggcaacattagttgccgttcctgtttacataatctgcctggaattccctcaacaatcggcactttgcagttgttctgtcattttaatatggtagattcctccatcgtttacgggatgtgccagtcacatattcttcatttctctttactcacaaagtattcatcgacatgaaacggcataagaacttcaatttgttgttgatgctggtactgctggtggccgtcggccagatggcgcagaccatttatattccggccatcgccgacatggcggtcgcgctgaacgtccgcgaaggggcggtacaaagcgtgatggcggcctatctgctgacctacggtatttcacagctgttctacggcccgctctctgaccgcgtcggtcgccgaccggtgatcctcgtcgggatgtcgatttttatgctggcgacgctggtagctattaccacccatagcctgccagtgctgatcgccgccagcgccatgcaggggatgggcaccggggtcggcggcgtgatggcgcgtaccctgccccgcgacctgtacgaaggcgctcagctgcgtcatgccaatagcctgttaaatatgggtattctggtcagcccgctgattgccccgctgctcggcggcatcctcgacaccctgtggagctggcgcgcctgctacgctttcctgctggtcctgtgcgccggggtgaccttcagcatggcgaagtggatgccggaaacgcgcccggaaggggcgccgcgcaccaaacttctggccagctacaaaacgctgttcggcaccggcgcctttaactgctatctgctgatgctgatcggcggcctggcggggattgcggtattcgaagcctgctccggggtgctgatgggcgcggtgctcggcctgagcagcatggcggtgagtattctgtttattctgccgatcccggcggcgttcttcggggcgtggtttgccggccggccgaacaagcgtttcccgaccctgatgtggcagtcggtgatctgctgcctgctggcaggtctgatgatgtggatcccagggctgctgggcatcatgaccgtctggaccctgctggtgcctgcggcgctgttcttcttcggcgccgggatgttgttcccgctggccaccagcggcgcgatggagccgttcccgttcctcgccggaaccgccggggcgctggtgggcggcttgcagaatatcggctccggcgtgctggcctggctgtcggcgatgatgccgcaaaccggtcagggcagcctcggcctgctgatgatgctgatgggcctgttgattctgctgtgctggctgccgctggcctcgcgcttcacccaccatcagcagccggtataagcgcggcagtggttcaccggatggcggctgacgccttatccgggctaccggactggtcgtctgccggcccgcgcaagcgcagtgccgtcattttgccgggtggcggctcacgccctacccggcctccctaacaacaccgagggatagcccggctcattttcaggtcaggctatgcagccactcgataaaggcgtcgattttcggccactgacggcccggcagggtgctcacgtaataatgctgatggcatttcagcgtcatatcgccgaacggggcgatcaactccccactctctaaccgcttctgcaccagccgtttacgccccatcgctaccccgacatgattcatcgccgcaatcaccgctaaatcagaacgatcgaagccaatgcccgacgattgcggcagttcaatcccaaattgttgtgcccaactgaaccattcatcggtgccggaatcattgctccatgcctggcgatcgtgaagcagcgtacagtggcgcagattggcaggatttgacgttaactgcagctggcgggcgtaatacggcgtacataccggcacgatcgcctcatccatcagaaaatggtggcttagctgcgacgacggcgcgtcatcaaaatagattgccagatcgatacccgcccgctgcaggttgacgttatcgttgccggtcagcacggtcagcgagatggccgggtagcggcgactgaaatcccccagcgccggcaccagccagcactgggcgatagagggccgcgagtagaccgtcagactgccggagagctcctggtttttgatgtccagaatctcctgattgaggccatccagcgacgacttcagcgcccagtaaacgcgtttcccttctcgcgtcagctccactttgcggtgcgagcggacaaagagctggatccccagctcctcttccagctgattaatccggtgactgacggcgcttggggtgagcgccagctcgtcggcggcaagggcgaacgactcgtgccgcgccgccacctcaaacgtcgacagcctggagagttgccagccgttcagcaaccgggtacctaaggtttttagcacatccattatgcgctcctggcgataatagggagtctggatgataaaaaaataatgccggaacttccgctaaaggatgagttaatttgacccatagcatatttagaggtcacttttagagctaaatcacctttttgatttaatttggctcatctgaaaggtcatttatatcgtttgtcagcccatgccgagtttctgttcaataaccacacgttacttacggcgaggtggggtatggaatcgcaaatttgggttgtgagcacattgctgattagcatcgtgttaattgtattaaccatcgtcaaactgaagtttcatccgtttctggcgctgctgctggcgagctttttcgtcggggcgatgatgggaatgggcccgctggagatggtcaacgccattgagagcgggatcggcggtacgctgggcttcctggcggcggtgatcggtctcggcaccattctcggcaagatgatggaggtctccggcgcggcggagcgcatcggcctgacgctccagcgctgccgctggctgtcggcggacgtgattatggtgctggtcggcctgatctgcggcattaccctgtttgtcgaagtcggggtggtgctgctgatcccgctggcattctccatcgccaaaaaaaccaatacttcgctgctgaagctggctattccgctgtgtaccgcgctgatggcggtgcactgcgtggtaccgccgcatccggccgcgctgttcgtggcgaataaactgggggctgatatcgggacggttatcgtctatggcctgctggtcggtctgatcgcctcgctggtcggcggcccgctgttcctcaggctgctcggcaaccgcctgccgtttaaaccagtgccagccgagttttccaacctcgacgttcgcgaagaatcgacgctgccgtcgctcggcgccacgctgtttaccgtgctgttaccgattggcctgatgctggtgaaaaccgtcgctgaactgaatatggcgaaaggcggcacgctgtatacagtgctggaatttatcggcaaccccatcaccgcgatgtttatcgccgtctttgtcgcctattacatgctcggcatccgtcggcaaatggggatgggcgttctgctgactcataccgaaaacggctttgggtccatcgccaacatcctgctgattatcggcgccggcggcgcattcaacgcgattttgaaatccagcggcctggccgatagcctcgcggtgatcctgtcgaaccttgatatgcacccgattttgctggcctggctggtggcgcttatcctgcacgccgccgttggctccgccaccgtggcgatgatgggcgctaccgccatcgttgccccgatgctgccgctttatcccggcgtaagcccggagatcatcgccattgccatcggttccggcgccattggctgcacgatcgtcaccgattccctgttctggctggtaaaacagtactgcggcgccagcctcagtgaaacgttcaagtactacacgacagcgacatttatcgcgtcgctacttgcactggccgccaccttcctgctttctttcattatctgagcgcaaagagacgtatgatgaaacacgctgacctgaccaccttaaccgcgaccttcccgcttgtgcaggatctgatcgccctgaaagaaaccacctggtttaacccggcaaccaccaccctggcgaaggggttgccttacgtcggtctgaccgccgacgatgtgcaagacgcccatgcccgccttcagcgcttcgcgccctatctggcggcagccttcccggaaaccgccgcgagcggcgggattatcgaatcagaagtggttgccattccggcaatgaaacgcagccttgagcaaaaattcggccagccaattagcggcgaactgctgctgaaaaaagacagccatctgccgatctccggatcaatcaaagcgcgcggtgggatttatgaagtgctgacccatgcggaaaagctggcgctggaagccgggctgctgacgaccgcagacgattatcgcaaattgctgacgccggagtttaaacagttctttagccagttcagcatcgccgtcggctccaccggcaaccttgggatgtcgatcggcatcatgagcgcgcgcattggttttcaagtcacggtgcatatgtccgccgatgccagggcgtggaaaaaagccaaactgcgcagccacggcgtaacggtggttgagtatgaagaggactatggcgtggcggtcgaacaggggcgcaaggcagcggaatccgacccgaactgcttttttatcgatgatgaaaactcgcgcacgctgttcctcggctatgccgtagccggcgagcgcctgaaagcgcagttcgcgcaagcaggacgcgtggtcgatgccgatcatccgctgttcgtctatctgccgtgcggcgtcggcggcggccccggcggcgtggcatttggcctgaagctggccttcggcgaccacgttcactgcctgttcgccgaaccgacccattcgccatgcatgctgctcggcgtctataccgggctccacgaccagatagcggtgcaggatttaggcattgataacctgaccgcggccgacggtctggcggtcggcagggcgtccgggttcgttggccgggcaatggagcgcctgctcgacgggttctatacccttgacgaccagacgatgtatgacatgctgggctggctggcggcagcggaaaatatccgccttgaaccctccgcgctggccgggatggccggagcgcagcgggtctgcgccagcaaagcgtaccatcagctgcaggggctgagtgagcaacagctgcagcaggccacccacctggtgtgggccaccggcggcggcatggtgccggaagaggaaatggcgcagtacctggcgaaggggcgctaatctttagcgcagcagcggcatcagcgcctctggcggccgctgctgtcgccgcaggtcccgcatcactcgcatatagggcccgctaaaatcgtagaactgccggtaacccgcgcacagcgggtcttcctgttcgccacagcggcacaggcgcagccacgggcagccgtagcaggtgctgttggccgccggcgcgcctggctgggtcagcgtctcgccgcaccaggcgctcagcgtctcgctaaacagtaaaatattgatgcgcccaatatcttcccgcacccagcggtgaaagactgcgcagagaaactctccccaaagcgcggcgtcgccggccgccagctgcggaataaaatggatagcggtgagcccctgttgacgaagctgcgcatagaacgcctgcggttgatggcaatgatgcgcctccaccacgacagcctgaaagggagtgtcatgttgctggccgggggcatgagtgagaggcaaattcgccggacatcctgtcatgacatatccctaatgaataaaacgatcggttgaaggtgagtaacagcaaacaggaatgccagagaaagtactgcgagtgcgatcaaaaatttgtcacgaaccgcccgcggctgtaaaaaatcgctatcgtcgacatccatcagatgacgacggcgggtatagccccagaggatcaccgccacaatcgccagtacgccgatcgacagccagaacggcaggccggcgcggtgccagctgtgcttaatcgccagcgccatcagcgcgccgtagcccaacagggtgcgaaaccaggccagcgaggtgcgctctggctgaagaccgggatcgctttcccgccgcgcccggcgtttatccgccatacaccaccagcagcatcaccgcggccaccaccgccagcagcagaatgctaatcaccagcagcgtgcgggtatagggaaggtcctgcttgaggcgcatcgccttctcgttattcagccagcgcagatagccatagatggccatgccgccggcaaagagacacagcagcagggcgagaatttcacggatcagcggcgtggcaaagtccggcgctaactggtcaaggccgacgccggcggcgagaaaaccgagcgccgtgcggatccatgccagaaaggtgcgttcgttagccagcgaaaagcggtaatccggcgcttcgccgaggcgggagattttcattacagttccttgttcatcgcgctgcaggcttcagcatagcgtaaatcaggaaccggggagaagaaccggcgccccgcagggcgccggtattacaacggggattaatgcagctcaggccagtaatctttgttggcggcaatgaggtcgtcgaggatcgctttcgccaccgaggcgctcggcacggttttcgacagggtaatcgcctgccacagcttgtggtacgagcgctgttcccaggcatcgaccaccagtttttccactgccacctgctggctcatcagccctttctggaaatgcgggatgtcgccgaccgtcagcggctccggtccgttgtggcctaccagacaagggatctccaccatcgcgtcggcgtcaaagttatggatcgcgccattgttcggcacaatcagcagcatcctttcctgcgtgttaaaggcgatagccgtcgccagatcgacgatataggaggcatgctcgtcaatctccagatcgccggcggtggatttcccggcggcgatgatcgcccggcaggcgctgaagacgtttttctcccgatgatccatcacctcattggcgcgggtgcgttccgggttggagtgggctaccacatagtccgggaacagataatatttcaggtaggtattcggcatggtctgcggatccagcgcctgcacatctttcgctttggcaaaggtgtcgttccagctggcctcggtgtgcggatcgttcgagggcggcacatagccgtatttcgccacatattcgcgcagtttcggcatcaaatcattgccgtcgaggtcctcaatcgaggtccaccagccgaaatggttgaggccgtagtagcgcacgcgcatctgtttacggtctttgaggccgacaatctgcgccatccgcccttcaatgccgatcggcatatcgcagatgttgaggattttggcgttcggccgcagacgacgagtggcttccgccacaatcgccgccgggttggagtagttaagcatccaggcgttcggcgaatatttttccatataatccaccagctccagcacgccgccgatagagcgcataccgtaggcgatcccgcccggtccgcaggtctcctggcccagcacgccgtggcgtagcgggattttctcatcctgttcacgcatcggatatttcccgacgcggatatgcgccatgacaaaatcaacatcggtaaacgccgcctgcggatcggtggtatagctgaattcaatctccggcgcctgctctttgaggatcactttgcacgcctcggcgatggtctcctggcgcgcgccgtcgttgtcgtaaaatttcagcgaccgcagcggaaaacgatcctggtttgccagcagcatcaggacaatgcccggggtgaaggtgctgccgccgcctgcgataacaactgagaattttttcatgatactgcctccgtcatggtggtatgttcggtcgaaagagaatctttcatcaggttttccagctggtcgcgcacctggggaacgtgcaggccgacgatgacctgaatcccgttgccgcggcgtactaccccgtgggcgcccagcgctttaaagacatcgtcactttgcgttttcgccatatcgaccagcgcgatgcgcagtcgggtggcgcagttgttgatgctttcaatgttgtcggcgccgccgagggcctgcaggaagccagcggcctgacccagccgggtctctggcgcggcggcggccgtggttttacctcgtgccgcctggtaatcggccttgctgtagagcttgatttcgctctcttccctgccaggcgtcttcaggttcagacgcaggatcagggtacggaagactacgaagtagagggcggtgaaacagaggccgatgcctatctgaatgaacatcatcgaagcgtggtgatggaacattgggatccagttttgcggcaagaattgatcgagcaggccgccgccgaagttgcctactaccccgcagatgtacatcaccgtcgccatagtcgccgccagcaccgcatgaacggcgaacagcagcggcgagatgaagaggaaggtgaactccagcggctcagtgatcccgaccagcatcgcggtcagggtggcggggatcagcagtccggcgaccttgacgcggttttccggcgcggcggtgaagtagagcgccagcgcaatccccaccgacccaaacactttcgagttaccgtgcagggcaaagccgccctccgggaacagcgtcttcagcggttccgtactctgactgaacgcctgcagatgctctgcccagtagacctgcagtccgccctccaccaccgcagggccaaagatgaacgggccatagacgaagtggtgcaggccggtggggatcaggatgcgctcaaggaagatgtaaacccacaccccaagcgccccggctgagcgcagaaaggcctgcagcgattcaatacccagctggacctttggccagccgagcagggtcagccaggcgcaagggatcatcgcgaggaaggcgacaatgaccacaaacgatgaaccctgaaagatgccgaggaataccggcaggggtttatcgaaatagcgattgtgcagggccgtcaccagaccggagatgacgatggcgccgataatgctggtgtcgagggttttaatcccggcaatcatcgtcaggccgctgccggccgtgggttcagcggaaaaatcgacgccgaagaagtggccccaggtcatccccatggcgttgataaagtagttccaggtgagaaagctcaccagcaccgccagacaggcccggccctgggcctgtttcgccaggccgatcggcagaccgacggcgaaaatcagcggcatattacgaaagacggtccagccgccctcctcaatgatgtgaacgatctgggcaaacaggctgtcgggtgcggtcagcgcttcgccgacgaacatcgggttgcgcagcatgatggcgataccgaccacaatcccggcaaaaggaaacaataaaaccggggtaaacatggcgccgccaaaacgttgtatttgactgagcattgggaaatcctcatgtaacaactcgtagggtgagtggccttctttttcttgattaccggcctgactggagaataaaaatttgcccgtccgacaacatgccgcgccgttgcgattcgtgatcccattcatggttttaatttggccaaagttgtctacttcgataacaaaagttagacatcgataagtcaggcagcgaaattaactaaatgaatgtgtcttaattgattgtaattaatctatttttttagaaaaaagagcacaaagcgacatccccttttcctgcacaagaggactactggtgatctacaaatccattgctgaccgcctgcggctgcggctgaattccgccgacttcgccatcggcagcccgctaccaggagagaaaaaactggccgaggagttcggggtggcgcgcatgactattcgcaaagccatcgatctgctggtggactggggattggttgtgcgtcgccacggctcgggaacttacgtggcgcgtaaagacgtccatcatgaaaccagcaatctgaccggcctggcggaagtgctgcgcaagcagggtaaagaggtggtgagtcaggtgctggccttcgaggtgatgcccgccccgccggccatcgccagtctgctgcggattaaaattgatgaacggatctacttctcgcggcgggtgcgctacgtcgacgacaagccgctgatgctggaggatagctatatgccggtgaagctgttccgcaacctgtcgctgagtcatctggaagggtcgaaatttgattatattgagaaggagtgcggaatcatcatcagcgggaactatgaaacgctgacgccggtgctggcggacaagcagctggcgcgctcaatgaacgtcccggagcagacgccgctgctgcgtattacctccctttcctacagcgacagcggcgagtttcttaactattcggtcatgttccgcaacgccagcgagtatcaggtggactatcacctgcgccgcgtccaggcgcaaagcccgctagctcagtccccagaacagcacggcgagtagctgcggggtgataatgcgcaggaacatcaccagcggatagacggtggcgtaagagagcgccgctgcgccgctggtggcgtgcaggttgttggcgaaggccagcgccggcgggtcagtcatggagccggccagcatgccgcacagcgtcagatagttcattttcgccagcatgcgcgcgaggatgcccaccgtcagcagcgggatggcggtgatgaaaatgccgtaagcgatccagctcagaccatcgccctgggtcagggtggcgacaaagtccccccccgattttagcccgaccaccgccagaaacagcactatccccagctcgcgcagcgccaggttggcgctcggcggcataaaccagtacagcttgccgatactgccgatacgcccaaggatcagcgccataatcagcggcccaccggccagtcccagcttcaatgctgcagggaagccgggaataaacaacgggatagatcccagcagtaccccgagtccgatgccgataaacaccggcagcatctggacctgctgcagcttctgctgagcgttacccagttcggcggccacggcgtcaattgcctccggacggccgaccaggttgaggatgtcaccaaactgcaggctggcgctgctgctggctaccagctcgacgcctgcccggttaagccgggagatcactacgtcatagcgctgtttgacgtgcagatcgcgtattttcttccccagcactttttcgttagtgaccaccacccgctccactttcagatcggtgccgcgcgtcgacagcgaggtggccacctcctggcctatcaccagctgcgcattgtgcaaatcctcaggtcgccccaccaggtgcagcaggtcgccagcctggataagggtgcccggcgcaggcaccatcaacagctcaccgcgtttcagccgcgaacagacgatgttgtcgttgttgagcatcggcacatcctgaatcgccatctggttgaggttggggttttccacccgcacgttgatggtgtgcaaatgagcgtggccgttaccgctgctctcctcaaaccgctgggcctctttctcgacattgatgcgaaagaacagacgcaccagccacatggtcagcagaatgccgcagatgccgaacggatacgccatcgcatagctcatccccatttgatcgaccacctcgaacggtacgccgagatcgcgcagaatttgctgcccggcccccagcgccggcgtgttggtcaccgcgccggagaagataccgagcaccaccgggagaggaatattgaacagcttatgcagcaccgcggtcaccaggccgccgaggataacgataaggatagcgaacagattgagccgcaggcctgagacccgcagcgaggcgaaaaagcccggccccacctgaataccgatggtgtagacaaacaggatcaagccgaattcctgaataaaatgcagcatcgggctgctgagggtgacccctgcctgatcgacaaagtggccgacaataatcccgccaaacaggacgccgccaatgccaaagccgacgccgcggattttgacattgccgatccacaaccccactaccgccaccagcgccagcacgctgaccgtcaatgctatctcactcatggtaccgtccctgtgaataacaccattaactacagggattatgaccgctgccaggtggattgtatgccgcctggcgcacaataatcatggagtaagatacgctactcaggcgcgttcttatttttcgctgcgatagtgagttgctgaatacttttctccggggaaggaagtgcttcaggcatagtgccacccaggtctttaatagtctggcgtactttttgccctacgtcataatgcgttttgttggcgagttgcttcgaatcaaccgcgtcccgacgtagtttttcttccgtttgggtagcacgaaacaggttggccgcgagctcagtcgatcccatatagtcgagtattttttggcttttctttaggcccttacgctcatggattgctttttggtcaagaccaccatagagacctttataaccatggttttgaaagacagcaaaatcaagagtcgtctcaacaccagcacgttgggccgtttcaaccagatgtttattatgctctttgagctcattgtgcaggaacagtcgcttttcatcctctcgtagagacttaaatatttgatcatcttgcaattcctggcgccgggtttgcaaggcaaagtacgtttgccccgcagcaatcaccggtttcgacggatcgccattttgcactaccagatagcaggcgtagcgtgagaggtggaaatcttcaagattcctgctggcgccagaacctaattcgaccattttgttggtttcaacaaaatggtctgccgagggatgaccactcgcctcacatgaaattatcgcttttgcaatgaccttataaaaattccgccactctttatagtcaagcaggggaccaaggttgcgggcagaccaatactcccgccccgcctcatcgctctttctaatcgcttcaaatggctgctgttcgttcataacgtatccttgtttgagtgagtcccaaagtatgattgttttttaaactgaaacacccgttgcagcaaggaagtttattgtgctctcgcacacaaaaaagccccgaaaatcggggccttataagttattcgcttaattaactatttaatgccggtcgttcgctgatggcgatacgctgcggggcgatctgctcaggctcattgcgggtcagatcgatatgcagcaggccattggtgaaggtcgcgccagagacctccatgttgtcggcgagggtgaagctcaggctgaaggcctggctcaccaacccctggtgcagccatgtggtctctttttccggctgctgcggcgtgcctttcaccaccagacgggtgccttccagttgaatatccagatcttcctgacggaaaccggccagcgcaagggtaatgcggtagtggttatcgtcgcttttttcgatgttatagggcgggaagctttggctttcaccggcggtttgcagggcgctggccagtttgtcaaaaccgatccattgacgcagcaggggggataaatcgtagttacgcatactgttttctccttctaagaagcgagtgaatacctgcgaattctgtaaattcgcatctgctccctgacggcgagcaggttgttacatcaggccgccacgcggcctgaaacggacaattagttgatttcgatgcggcgcggcttgttcgcttccgggatcacccgttccagatcgatatacagcaggccgttcaccaggttggcgccgcggacgtgaatgttttccgccagctggaatttgcgctcgaagttgcgctcggcgatcccctgatacaggtaggtccgctctttctgctcggcggcgtgggcgcctttgacgatcagcagattgtcctgggcagtgatctccagctcgctttcagcaaagccagccaccgcgatagcgatgcgatagtggttttcgtctaccagctcgacgttatacggagggtagccgccgttgctctggctttgattgttttccagcaggttgaacaggcggtcgaaaccaatggctgaacgatatagcggggaaagatcgaagttacgcatagtaaatagctcctgaaaatcagcgagaatcaaatgaccttccatcgtggacaggccgcggtaatccggaatacccctcaggcgtattctcagtgggttacacctataaaatgggtttctccccgtccttttcaagggattgagggcaattttttttgcagtttatcgatgattgcttagactgggtggaggagcacaaaaagcaaagtgcgatgcccgccacagtgcggcgcaataacactatgcattcacgggatggcccgatataaccgctgaaaggttatctcaacgcccgaaacgacaatggaagaacaatgaaaagcagacgactgttaaagctggtcctgttcagcgggataataagcctgagcggttgctccagcgtaatgtcacataccggtggcaaagagggaacctatccgggcacgcgatccagtgcgcaaacgctgggggacagcgataccaactggggtgtgaaatcgctggtggcgctggacatgccgttcaccgccgtcatggataccctgctgctgccgtgggatatgttccgcaccgacagctcaatcaaatctcgggtcgaaaagagcgagaaggctacgctggcgaccaactcggtgatcccgccagcgccgatgcctgcccagtaagttatcgtccggtctgcgtaacccacagctgacgataaccgtccacctcctccatccaggcaatctgtttaccgtctggcgaaaagacgatcgcgtccgccgagggcgcatgcgcatgcgtatcggttaaaaaggtgatatctcccgtaccggcatggcagcaggcaatccgatcctccagcgcaaaacccagccactctcccgacggatgccagttaaacgccgactggatacccgacgcgtgatgcgtcaactgccgcggctcgcccccctgcggggaaataagccacagctgcactacgccggcgtcgtcgcgcatcagaaaggctatcgccgtcgcctggggattggcgcgcacccagtggcgcgggacgttcaccagtcccgggtagcggcgatggtgggtgaaggtcaaacgacgctggctgacgcccgccggcggcgccggcattgtggttgcggtaccggccagcggcgccccgccaggctgcttccagccggcttcatcctgcggcagatcgacaataaacagctcaggcactttatcgccattttccgccagcgtatcgccaataaacgccagagtatggttcccgacccagccctcctcataggcgcgattaatctcatcgctgcccggcgcgggtgccggcgtcgtgcggcttaccagcacgcaccagtggctgccgccatattcgcgcggatgctgtccctgcggcgtcaccggtccatagggcgccgccacgccgacgttgcgcagatccagcgccggatcgcgctcgtgcagcacgtgatcgttgtaggtaaaactgacaaactgaccgttggggctatagacatggacgtggctgccgccgcgcagcgcgccgggcgtgtaggggggggtaatgtccatggcgtccagattctcgacagccccctgaaaggccaccaccccgcggcgatgatgaaaatcatactgccactgcgcatccggccgctcggggccatgaataaacacatagcgctcctgggttggatgcacggttaccacgcccacgtgcgcgccctgcgtggcacgataaatggtctccacagtaccgctgtttacgttcactcgctcaatggtttcgccggtaaacgatgcgccggacggacgaacgtcgaataccagccactggctgtcgggagtccaggtattaatattggtaagctggtgatgacggggagcaaaagtgacttgtttcatgacgataccctgatgcgagacttacgcatcagggtagcgtatcgcaaaaaattagcctacacgtttcacatcgccgaccagcaggatataagacagcgcgcctattaacgccaccacggagatataaaccagcgccgggccaaagccgtaatcctgcgccagatagccaatcaccagcgggacggtgatgccgcccaggccgccaacaaagttaaacaccccgccggtcaggccgatcaggcgcatcggcgccagggaggagaccagcgaccaggtgatagacgcaaaaccgttaccgaagaacgccagcgccatcagcgccatgatccagatggggtcgttggtgtagtttgcccccatgatgcaggtggagatcaacagtccacagatgatcggcgttttgcgcgccacgcccagcgagtagccttttttcaccagcttatccgccagccaaccagacagcaggacgccaaaaaacgcggcgaggaagggcaccgtggtcataaagccggccttcagcgcggtgatgcctttttcctgggttaagtagttcggaaaccaggtcaggaagaaccacagcgtcgaggttaccgcgaactgtccaaggtaaacgccaaccagcttgcggtgaaaaaccagcttccagtccgctttcgataacggttgacgcgcctctttcttcagcggcgcatcgccatccaccaggccgccgccgtcgcggatatagtcgagttcggctttactgatgcttttagtcaggcgtggcggttgataaaccttgaaccagatcagcgaccagataatgccgataccgccggtaacgataaacacccagtgccagctcaatagctcctggatccagatcagcagcggcgtgaggaaagccagacccacaaattgccccgaggtataaaacccgacggcggaagcgcgctcgtgctccgggaaccagctggtcaccatgcggttgttggtcgggaaggctggcgcttcgaagatgccggtaatggcgcgtaaaccgataagcgacattaaaccggtggcgaagccttgtagcaacgtcgccaccgaccagccaaatatagcgataaagtaggtaagcctggatcccacgcggtcaaggaaccaaccgccagggatctggcagagggtatacagccaggcaaaggcggaaaatacgtagcccatttccgctttgctaataccaaactcctcctgaatatgcgccgaggcgacggcgaggttggcacggtctacataacaaataaccacggtaataaagatcatgatgagcgtcagataacggcgacgcccggtttttacagcggtaactgaaatatccatcgcaatctgtctccagattttgggcatagcgaagccgctcaccatgcccggtaatttacagagggtgtttttgttttttattaataactatgttgcgatgcgctaaataattcgtgctggggaaaggcggcaaattttcgcatccctgggagcatacaatagtatgtgaccagggtaagaaaatgcagccaacgcatcaccagtgcgaagtatgacgcgcatttaccattcggcgacagatccatcctcataccgccacaacggatttcgccagtccggcgcgtttttacttaactcaatcacgcgggcctcatcaatttccacgcccagccccggcttcatcagaggtttaaagaagccgccttccatattgaaatcttctttgtttttcacaaaatcaagcagttcggcgcctttgttgtaatggatccccatgctctgctcctggaagaccgcgttatgcgaaacgaaatcaacgtgcagacaggctgccagcgcgatcggccccagcggacagtgcggcgccagcccaacgtcataggcttccgccatgccggcaattttatagcattcggtaataccgcctgcgtgcgacagatcgggttgtaaaatagccaccccgcccgcttccaggacccgtttaaattcaaagcgcgaaaacatacgttcgccggcggcaatgggaatatgggtttgcgccgccagccgcggataatattccgcctgctcggctaataccggctcctcaataaataatgggcgatatggctccagctctttaattaataccttagccatcggcgcgctaacgcggccgtgaaaatcgagaccaaactcaatttcattgccaaacgcttcgcggatttgcgccacggtattcaccgcggcatcaaccgcgcgggaattatcaatgatacccatctcttcgcagccgtttaatttaaaggtgtcaaaaccaatgccgcgcagcttcttaatcccgtcaatcacttcggcggggcggtcgccgcccacccagctgtaggctttaattttgtcgcgcaccagcccgcccatcagttgccacactggggcattcaggaccttacctttaatatcccatagcgcctgatcaataccggcgatggcgctcatcataatcgggccgccgcgataaaagccgccgcggtacattacctgccacaggtcattaatccgcgccggatcctgaccaatcaggtaatcgccaaattcatgaacggctgcctccaccgtacgggcgcgcccttcaatcaccggttcgccccagccgacgatgccttcatcggtttcaatcttcaggaacatccaacgcggaggtaaacggtacgtggtgatattggttattttcatttcactgcctctcgatacgcttttacgaatgcggctgcctgctgcgcggtacgttcaaccggctggccggcacgatagagatcgctacccaatcctgccccaacacagccggcattaatccactgcgccaggttttccggcgtcacgccgccaacggcaaagaccggaacctcgggcggaagcacggctttcaacgctttgatgtaatccgggccaaaagccgatgacgggaagattttcagagcctgcgcgccggcatcgagcgcgctaaaggcttcgctggcggtggcgcagcctggacacacggtcatgccgtaacccaccgctcgccggatcacttccggttgaatgtttggcgtcacaatcagccgacagcccatggccgccagcctgtcgacctgctccggttgcagcaccgtgcccgcgccgataagcgcctgctcgccgtaagcgtcgacgacctgcggaatacttttctcccactgcggcgagttcagcgggatttcgaccgcgtcgaaaccggcgtcgataacggcgccaacgtgagccagcgcctcgtctggcgtaataccgcgcaggatagcgataagtggaaggttagtttgccactgcataagcgatgctccttattcctgtctgaaatgccgtatcgcccgcaaccgcgctgacttcgcggccaatggcggcgaatgcctgctgatagcgggatgttaacgatgacccagcgacgagactgatcgcctgctgtccggcgaatgtgtcgctgagggtggcaacttcagcgccaatcagcaggccggaaagaaattcgctaacctgctcgcgaggcagcgcgcccagcacgtgcgaagcgcgaacttcaaacagctgcggcaggacggcggggttgttgataccgcgctgcagacctgccgcgaatgcggcagcggacgtttcctgcggcggtaagccggcgcccaccagcgagtgctgaagcaacagatgatgcaattcaccggtcaaaacggtacgaaaatcgtgaatttgccggcgatcggccagtacccacttgcagtgggttcccggcatcacgtagacagacgaaggggctaaggcgcgagcgcccagcagctgcgtttcttccccacgcatgacgttatggttatcgtcacgggaaacgcaaaggccgggaattatccagatattgtcgccaacggcagttaactgctggccaatatccgagaaagcggcaggaagcggcaaataaggggcgattttccagcccacgttgctgccgaccatccctgccatcaccaccggtgtggcgccatcgcgccagtgctgtgtgatttccgctaacaccgcagcgggagagcgaccattcaggcgcgttacgcctgcttcagattgcctgctttccaggcattcttcgccctgataaagccaggcgcgtaaattcgtcgatccccaatctattgcgatgtagcgagccgtcatgtgatttccttaagccttcgtgtcgagctggcgatcatcgtcaacgccgcctgctccgccgcgtcgctatcctgatgccgaatggcgtcaaatagcgctttatgttcctggagggttttcggcatgttgccttcatcgcccatccaggtccgttcaaataccgcccgctgcagcgaactgatcgccacgctaagctgctgcaaaaccgggttatgtactgactgcagcaccgcctcgtggtagcgaatatccgcttcgttaaaggcatcccggttttggttgttggcgatcatgtcattgagcgccgactcgatttccgccagatcgcttgaggtggcgcgttccgccgcccaacgggcaatggcgggttcaaccaggttgcgcacttcactcatcgcgctgataagacgcgggtcatagtcattttccagtacccactgcagcacctcggtgtcgaggtagttccactggtttctgggagcgacaaacgcgccgcgatagcgcttcatttcaatcagccgcttcgccatcagggaacgaaacacttcgcggatgatgttgcgcgaggtttcaaactcctcacagagttccgcttcggccggaagcgccgaacccgggacgtatttaccgctgacgatctgtttgcccagcgagatcacaatgcgatcggtcttattgagagtcatggagagtccttgtgctctatgtgtactgctctactttaccgtcgctgctgaatttcgcctcatgtttgtactactaacgtgatgctgtacgttatcaacatgagcgtaatgtagtacaacattattgtattgtactacaatttggatcacaaaaagaacaattcatgaaaattaaagcgcagcggccctggcaagaggcgataagagagaaaattaaggggaggaggcgttaaaacgcttcgccgacctggaagtaaaagccgctgctgcctttgccgataccgtagtcgaggcgaacattaacgcgaggtttgaattcaaagcggtagccaacgcccgccgaaggcagccagcggccattattcagcgacgacagtgagggccccatggttcccgccccggcccaggcgacaatcccgtgccgccaggtgagctgccggcgatattccagctgaccgctgacgacgtttttatcccggtagcgcccctggtagtagccgcgcatccgttcatcgctgccgagcagcggcatcatgctccacggtacctcgccctgggtgaaggcgccatcggcctcccaggcgagcacgcttttctcgctcagggcatgataatggctatagtgcagctgaaattcctcaaagcgggtatcgctacctaatccgggcgcatagtgggtatagcggaggttggcatactgaccccggcgcgggttagggacaaagtcgcgatcgtcccagttaatatcgatgctggcgccggagctgaataccgacggcccctgcggagtgttttctatcttcggccgatcgtcatggtccatctcatcggcattctgcgccgccagcgaccatcccgccccgagataaacatgatcgataagctgccgataaagggtgggtcgcagggtcagtacctgggcggtatacttctctttttcattgtctttatctccggcatgaaaaccctgcccccaataataagtgggcgtattggctatcgacccttcgacaaaaacgcgccacagatcacgatcgaaaaaggtgtagtttttcacgttgaggccaaaggcgccggtagagctggcgtagccgctgagcgtcagggtcgagttctggctggtggtatcctgcgggtcgggacgatacaggccgacgacagcggtgccaatgcccaaccctagttccggcgtatagaacggaccgggcatcacgccccagtcgatgcctttgctggcgtcgaacttatcgctggcgccgagatgctgcagccagccgtcgattttctcgcggctgagcgcctcggcctggctgcctgtcgggcaggccatcagcagcagaaaagtgataaacagtcggctcaaaagcgatactcgccggcaataaagaaactgttacgttcggcaaagccaaactcggtagtaatattaaaattctgcgtcagctcgtattgcgcgcccaccagaacgttccatggcgactgaagatgctgcttcacatcgaagcgaccgttattgtcctggttggccagattaaccatattctgcagcatcggcgacggcatcgagagatcgctgaggctgcctttaaactcctgctgcacatcctgatacatgctgccaacccacagatttagctttccggcggggagatgcagcgcatcgaccgatggcgtactgaaacgatagccaacgcgcggcgaaaaggtaagcgcatcgatgctgccgtcgaggatatcaaagcgcgtttgcgtgtagttggcgtccagcacggtaaaccaattgccgacgccgcccaccagggtggtgcccatcccgtaggtagtacctttaaaatcgagacgaaagtcgagatcctgcatccccggcaggggcaccactttaccgttcggtcccttcaggccgacagctatctgcgaaattgaatgcccttcggtgtgccccaccaggccataaacgttcataaacggcagcagccaggcatccagcttgagcgtctcggttttgctgctttcccgcgtatgaccaacgccaatctggaaagcgttatccagcgagaccggcccattagcgaaaatgttattcacggcgtgcttgcagacaggatccttaccgcaatcgatattgcggccatccagcgacagcccggtgaagtttatgctgtcgacattaatattctgccgcatatccatatagttaatgctgacgccaaacggcagcggcaggacgtagccgcgctttctggcctcatcgcctagcaaagggagtagcgaggacgatgctgccgccgcaggctggcgactttctggcgccggcagatccgcgggctctgcgccgtgataggcatacgccggttcgagcggcgccgttggttccgcggccgcgcaaatctgaacagaggcgaatggcagcgtaaccaacatcaaacggtggtatatattcatgaaaagtatgatgttagttctgagttgctaaaaagagggcgggtagcttatagaatcccctgcaaggattgagggatttaaatgcggattaacatctgttcatgaaaaaagagaagacagacccggcgaacgccgggccggaaagaagtttacgctaaaacgtatttttcaatggcgaaggcaacgccatcttcaaggttcgatttggtgatgaagttcgccgcttctttgaccgcaggaatggcgttatccattgccacgccgacgccggcaaattcaatcatcgcgatatcattttcctgatcgccaatcgccataatctcttccggcttgatgcccagcgcatcggccagcgacttcacgccagtgcctttattgacgcgtttatccagtatttcgaggaagtaaggcgcacttttcagcacggtgtacttctctttcacttccgccggaatacgggcgatggcctggtcgaggattgccggctcatcaatcatcatcactttcagcagctggatctcaggatccattttctccgcttcgcagaacaccagcggaatggttgccacataggattcgtggacggtgtagtagctgatatcgcggttcgcggtatacagcgtattgcgatccagcgcatggaagtgggagccgacctcgcgggagagctgctcaaggaagcgatagtcgtcatagctcagcgcggtttgcgcgacggtgcttccgtcaccagccttctgcaccagcgcgccattgtaggtaatgcagtaatcacccggctgctccatatgcagctctttcaaatagctgtggacgccagcgtaagggcgaccggtggtcagcaccacgttaacaccgcgctcgcgcgccgcggcgatggcggctttcaccgctggagagatggtatggtcgggcagcagcagcgtgccgtccatatcgattgcaatcagtttaatagccatagggtccccgggtaagatgagtctcccctcatgctaacgcgattccgctcaaaaaacagtaaaagtgtcggccagaaagggggatggaaccacagcagcggattcctcttttagcggcaaaagaaaagcccgatcgcgcgatgcgaccgggcttatacatcctgttgccccggtaaaactcgttaccgggaaacatgcggcttaaatatcgatattcgccgctttcagggcattctcttcgataaacgcgcgacgcggctcaacggcatcacccatcagggtggtgaacagctgatcggcagcgatggcatccttgacggtcacgcgcagcatgcgacggctgtccggatccatggtggtttcccacagctgatccgggttcatctcgcccagacctttatagcgctggatggagagaccgcgacgggactctttcaccagccagtccagggcctgctcgaagctggctaccggctgacgacgttcgccgcgctcgatgtaagcatcttcttccatcaggccgcgcagtttctcgcccagggcacaaatacgacgatattccggccccataatgaactcgttatccagcggatagtcggtatccacgccgtgggtacgtacgcgaataaccggctcaaaatgctgcagttctttgttctcgtggagatcgaatttccactggctgccgtgctgttctttctcgttcagctcggagaccagggtgttcacccagcgggtcaccttctgctcgtccgccaggtcggcctcggtcagggtcggctgatagataagctctttcagcagcgctttcgggaagcggcgctccatgcggccaatcattttctgggtggcattgaactcggcaaccagtttttccagcggttcgcccgccagcgccggcgcattggcgttggtgtgcagggtcgcaccgtcgagcgcgatggagatctgatactgatccatcgcttcgtcgtctttaatgtactgttcctgcttgcctttcttcactttgtacagcggcggctgggcaatgtagacgtggccgcgctcgacgatctccggcatctgacgatagaagaaggtcaacagcagggtacgaatgtgcgagccgtcgacgtccgcatcggtcatgatgatgatgctgtggtagcgcagtttatccggattgtactcatcgcgaccgataccgcagcccagcgcggtgatcagcgtcgccacttcctgggaagagagcattttatcgaagcgggctttctcaacgttaaggattttacccttcagcggtaggatcgcctggttcttgcggttacgaccctgtttagcagagccgcccgcggagtccccttccaccaggtacagttcggacagcgccgggtcgcgctcctggcaatccgccagtttgcccggcaggcctgccagatccagcgcgcctttacgacgagtcatctcacgagcgcgacgtgcggcctcacgggcgcgcgcggcgtcaataattttgccgaccacgattttcgcatcggatgggttttccagcaggtattcgctcagcagttcgttcatctgctgctccaccgccgatttcacctcggaggagaccagcttgtctttggtctgcgaggagaatttcggatccggcaccttcacggataccacggcaatcaggccttcacgcgcatcgtcgccggtggcgctgactttcgcttttttgctatagccctctttgtccatataggcgttaagagtacgggtcatcgccgcgcggaagccggcgaggtgagtaccgccgtcacgctgcggaatgttgttggtaaagcagtagatgttttcctggaagccgtcgttccactgcagggccacttccacgccgataccgtctttttcggtggagaaatagaaaatattcgggtggatcggcgttttgttcttgttgagatactcaacgaacgccttgatgccgccttcgtagtggaaatggtcttctttgccgtcgcgcttatcgcgcaggcggatagagacgccggagttcaggaacgacagctcgcgcaggcgtttcgccaggatgtcatattcaaattcggtgacattggtgaaggtttccaggcttggccagaaacgcaccatggtgccggttttgtcggtttcgccagtcacggccagcggtgcctgcggcacaccgtgttcgtacatctgcttgtgaactttgttatcgcgctggataaccagctccagcttctgcgacagggcgttaaccaccgagacgcctacgccgtgcagaccgccggaaactttataggagttatcatcgaatttaccgccagcgtgcaggacggtcatgataacttccgctgcggagacgccctcttccgggtgaatgccggtcgggatgccgcggccgtcatcctggacggagacggagttatcgctgtggatggtgacaacgatatctttgcagtaacccgcgagcgcttcgtcgatagcgttatccacaacctcgaataccatgtggtgcagaccggtgccgtcatccgtgtcgccgatatacatacccgggcgcttacgcaccgcatccagccctttcaggactttgatactggaggagtcataagaattcgacatcaacgtttctcgctcatttaatcttgggttaatccgttattttacctttttccacgcggaacatcttcgaatttttgtccgacatgtccataacgtgttcagcgctgatcgcgctgacgaaaacctgcgactgcgtcgctttcaggcggctggataacagaccgcggcgggcatcatcaagttccgaggcaaaatcatctatcaggtacaggcagcgccgcccgctgacgcgggtgaggaactctccttgcgccagacgcagggcgcacatcagcagcttaagctgcccgcgcgacaaggtatcttccaccggcgccccgtcggcgcgaatgcgaaaatccgctttatgcgggccgtgggcggtgtaggttaacattctgtcgcgctcgaaattccgctccaacacctccgcgtagtcggtctctttttcccagccgcgctggaaagagaaggtgagcgtgaattccggtaaaaattgctgacaggtatccgccatgtcttcgacgatagcggcgctgtattcggcacgccagcggctgatctgctccgccagcgggattaattccagatcccaaggccgcagctgggcatagcggctgacctgacgcagcgcggcgttgcgctgcttgaccaggcgcttcagattgctccaggcggtgaagaatccggcttcgttatgaaagcatccccagtcaaggaatgctcttctgtatttggggccgccgttgagtaaagtaaacccctccggcgtaatcagctgcatcggcatcaggtgcgccagctccgccactttgtggccgtcggtgccgtcgatacgcaccttgctgtcgccctgtttgtctttggtcaggccgatggcggtttcccgctcttcgccctgcagacggccatgcagaacaaacgcatcctgctcgtggcggatcacccggccaatttgcaaactgcgaaatgcccggccgtggccaagcgtatagatagcttccagcacgctggttttgccgctgccgttcgcgccaaccaggaagttaaagccgggagataaagcgagatccgcatgttcaatattgcggaagtctttgatgagcaagcgcgtcagtgacatatcagcgttctttgggccagggcgttatcggcgcagccagtttcaacgcggactgcgcgcagaccctggagcgtacacaaagtacgtgacaggggcgagcacagcccaggttgaaaatggcaagtaagatagcccgatattttccactacaatctcataggcatgacgacataggctgcggattgagaggccgcatcctcaatctgcacgctcgacaccgaatccgtcagcagaatgcgtacattctcgcacttcagcgcattcagcacatccagcacatagctaacgttgaagccaatctccatctccgttccggcgtaggtcacatccaaaatctcttccgcttcttcctgttccgggttattggcggtgattttcagctggttttcgctaacgtacagccgcacgccgcggaatttttcgttggagagaatcgccgcgcgcgcaaaagcctgcttcagaatatcgcagcccgcttcgaggtgtttatccggatttttcggcaatacgcggcgataatccgggaaacggccatcaaccagcttagaggtgaagataaaatcgccaacgtgggcgcggatattgttgctgccaatctgcacgcgcagcggggtatcgccgccgtcgagcatccgcatcagctcaatcacccctttacgcggcacgatcaccgaatggttcggcagcgacgcttccagaggcatcgaacagaccgccaggcggtgaccatcggtggccaccgtgcgcagttcgctgccttcggtttcaaacagcatgccgtttaagtagtaacgaacatcctggtgcgccatcgagaactgggtggcttcgatcagacgcttcatggtcgcctgcggcagggtaaactccacttcactctgccagtcatccagattcgggaaatcggcggcgggcagggtcgacagcgagaagcggctgcggccggaacgcaccagcatgcgatcgccttccaactgaaccgcgatctccgcgccttccggcaggccgcggcagatatcaaagaatttccgtgccggaacggtcgttgcgcccgcttcgtgcggctgaaccagcgccacgcgcgccaccatctccatttcaagatcggtaccggtcagcgacagcgcgccgtccgcgacctgaagcagcaggttaccgagaatgggcagcgtcggacgaccacctaacggaccgctcacctgttgcagcggttttaataaatgttcacgttctacggtaaatttcatagcgtcacgaggataatgttctgattaaattggaaaaatcttctttaatgtcgtggctttcttcacgcagctgctcaatcttgcggcaggcgtgcagcacggtggtatggtctcggccgccaaacgcatcgccgatttccggcaggctgtggttggtcagctctttggccagcgccatcgccatctggcgaggacgcgccaccgaacgggagcggcgtttggacagcaggtccgctaccttaatcttgtagtactccgccaccgtcttttgaatattgtcgatggtgaccagtttttcctgcagcgccagcagatcgcgcagcgcttcgcgcacgaaatcgatggtgatcgcccggccggtgaagttggcgttggcgataacgcggttcagcgccccctccagctcacgcacgttcgagcgcagacgcttggcaataaagaacgccacttcgcccggcaggcggatgtcgttctcgtcggcttttttcatcaggatcgcgacgcgggtttccagctccggcggctcgatcgccaccgtcagcccccagccgaagcgggattttagacgatcctcaacgccgttgatctcttttggataacgatccgacgtcaggatgatctgctgattaccttccagaagcgcattgaaggtgtggaaaaactcttcctgggatcgttctttattggcaaagaactgaatgtcatcgatcagcagggcgtcaacggagcggtagtaacgcttaaactcttcgatggcgttgttctgcagcgctttaaccatgtcctgaacgaaacgctcggagtgcatatagaccactttcgcgttcggcttacgcgccacaatgccgttccccaccgcgtgcagcaggtgagttttacccagacccgtcccgccatagaggaacagggggttgtaggcgccgcccgggttatccgccacctgacgcgccgccgcgcgggccagctggttagatttaccttcgacgaagttatcaaacgtgtgtttcacgttaacgttagagcggtaggtcggctccgccggcgccgggacattatcccagccagggcgcacgatcgtcggcgccgcgcgcgcggtctgcacctgcgccgccggaatggccgccgcagccgggcttaccgcccctttctgcagcgagctggcgggcttagcgcccacctcaaaacgcagctgcggggcgtccgcaccgcaaaaatcattgaggagtccattgatattattgaggtatttgtcccttacccagtcgagcacaaaacggtttggcgcatacagtgccagcgtgttatcgctcagttccgcctgcaatgggcggatccacatgctgaattctgtggctggtaactcatcctgcaatcgggcaagacactgctgccaaagcgaaagtgacacggcggactccactcgaacataaaatcgatatcaaagaaaaactgaaacaatcgtgattgttggcacacgtcgacaagaccctgcattagccgaaaagcccctgcacaaaaggggtgacgtgcgaaccgctatctgcggttattacccgctgcggatccggggatcgcgatcgggaccggggatcatagcctaaactgagaaagagatcttgtgtttctcaacagattcttcccgatttatccacaggaaggatcgaaaccgggtaagtgtaatcgatcctgcggggagtgaagcacgatttccgccgcatattggaaaaattaatgagctatgccgcttttgggcggaaacgatctaataaagatccttgcggatccttgcgctttactggccaggccgtataatcccccacccggcgcgtaatgcccgttttcgtcacgcgtctcagcttattttttgtgcgacgaggtgcgagaaataaggaaagagaattgactccggagtgtacaattattacaatccggcctctttaatcacccacgctgaggcgtaagtcgttcgaagttcgttcgggtctacgcaaaagtcagtgaatttattcaagtttaggtagaaatcgccatgaaacgcacttttcaaccgtctgtactgaagcgcaaccgttctcacggcttccgtgctcgtatggctactaaaaatggtcgtcaggttctggcacgtcgtcgtgctaaaggccgcgctcgtctgaccgtttccaagtaataaagctaaccctgcgtggttaagctcgcatttcccagggagttacgcttgttaactcccagtcatttcactttcgtcttccagcagccacaacgggctggcacgccgcaaatcaccatcctcggccgcctgaattcgctggggcatccccgcatcggtctcaccgtcgccaagaaaaacgtgaaacgcgcacatgaacgcaatcggattaaacgtctgacgcgtgaaagttttcgtttgcgtcaacatgaactcccgccaatggatttcgtggtggtggcgaaaagaggggttgccgacctcgataaccgtgctctctcggaagcgttggaaaaattatggcgccgccattgtcgcctggctcgcgggtcctgatcggcctgattcgagtttatcagcgcctgattagtccgctactcgggccgcattgtcgtttcaccccaacctgttctcaatacggaattgaggccttacgcaggtttggagtgataaaaggcagttggttgacgatgaaacgcgtattaaaatgccaccctttacaccctggtggtgacgatcccgtcccgcctggaccatttgataccagagaacactaacgatggattcgcaacgcaatcttcttatcatcgctttgttgttcgtgtctttcatgatctggcaagcctgggagcaggacaaaaatccgcagccccagcagcagaccacgcagactacgaccacagcagcgggtagcgccgccgaccagggcgtaccggccagtggccaggggaaactgattacggttaaaaccgacgtgcttgagctgactatcaacaccaacggtggcgatattgagcaggcgctgcttctggcgtatccaaaaacgctgaaatcgaccgaaccgttccagttactggaaaccacgccgcagtttgtctaccaggcgcagagcggcttaaccggccgtgacggcccggataacccggcaaacggcccgcgtccgctgtacaacgtcgataaagaggcgtttgtgctggccgatggccaggatgagctcgttatcccgctgacctacactgacaaagccggcaacgtcttcaccaaaaccttcaccctgaagcgcggtggctatgcggtgaacgtgggttacagcgtgcagaatgccagcgagaagcctctggaagtctcaaccttcggtcagctgaagcagaccgctgcgctgccgaccagtcgcgatacgcagaccggtggcctgtccacgatgcatactttccgtggcgccgcgttctccactgcggattcgaaatacgagaaatataaattcgataccattctggataacgaaaacctgaacgtcagcaccaaaaacggttgggttgccatgctgcagcagtacttcaccaccgcatgggtgccgcggaataacgggacgaataacttctacaccgccaacctcggcaacggcgttgtcgctattggctacaaatcgcagccggtactggtgcagccaggccagaccgacaaactgcagagcacgctgtgggtcggcccggctattcaggacaaaatggctgccgttgcgccgcatctggatctgaccgtcgactacggctggctgtggttcatctcccaaccgctgttcaagctgctgaaattcatccacagcttcctcggcaactggggcttctcgatcatcgttatcacctttatcgttcgtggcatcatgtacccgctgaccaaagcgcagtacacctccatggcgaagatgcgcatgctgcagccgaagattcaggccatgcgtgagcgtctgggcgacgataaacaacgtcaaagccaggagatgatggcgctgtataaagcggaaaaagtaaaccctctgggcggctgcttcccgctgattattcagatgccgatcttccttgcgctgtattacatgctgagcgcctcggttgaactgcgtcatgcgccgtttatcctgtggatccacgacctgtctgctcaggacccgtactacatcctgccgatcatcatgggcgcgaccatgttcttcatccagaagatgtcgccgaccaccgtgaccgacccgatgcagcagaagatcatgacctttatgccggtcatcttcacggtgttcttcctgtggttcccgtctggcctggtggtgtactacatcgtcagcaacctggtcaccattattcagcagcagctgatttaccgtggtctggagaaacgtggcctgcatagccgcgagaagaagaaatcctgatactcttcattcttcaagccaacgcatctgcgacttggataatttagagtagttacggtaacgttaatgccagagaaggcggtcaatggaccgccttttttacatctacatagagagtcaccatgagccataacgacactatcgtcgcccaggcaacccctccgggacgcgggggtgtgggcatcctgcgtatctccggtcttaaggcgcgcgacgtcgcgcaggcggtgctgggcaagctgccgaagccgcgctatgccgactacctgccgttcaacgacgttgacggtaccccgctggatcaggggattgcgctgtggttccccgggccgaactcctttaccggggaagatgtgcttgagctgcagggccacggcggcccggtcattctcgacctgctgcttaaacgtattctgaccctgccgggcctgcgcatcgccaggccgggtgagttttccgagcgcgcgttcctcaacgacaagctcgatctggcgcaggcagaggccatcgccgaccttatcgacgccagttcagagcaggcggcgcgctcggcgctgaattcgctgcagggggcgttctccgcgcgggtgaatcatcttgtggaagcgctcactcacctgcgcatctacgtggaagcggccattgacttcccggatgaagaaatcgatttcctttccgacggcaaaattgaagcccagctgaacgaggtgatggccgatctcgacgccgtccgcgcggaagctcgtcagggcagcctgctgcgcgaagggatgaaagtggtgatcgccgggcggccaaatgccggtaaatcaagcctgctgaacgccctggcgggccgcgaagcggcgatcgtcaccgatatcgccggtaccacccgcgacgtgctacgcgagcatatccatatcgacggcatgccgctgcatatcatcgataccgcaggcctgcgcgatgctaatgacgaagtggaacgtatcggcatcgagcgcgcctggcaggagattgcccaggccgatcgggtgctgtttatggtcgatggcaccaccaccggcgccgttgacccggcggagatctggccagactttatcgagcgcctgcccgctaaactgccgattaccgtggtgcgcaataaagccgatgtcaccggcgaagcgctgggtatcagtgaagtaaatggccactcacttattcgcctgtcggcacgtaccggcgaaggcgtggaggtgctacgtaaccacctcaagcagagcatgggcttcgataccaatatggaaggcggcttcctcgcccgccgccgtcacctgcaggccctggaagaggcggcgaaccatctgcagcagggcaaagcccagctgctgggcgcctgggccggcgagctgctggcggaagagctgcgcctcgcgcagcaggcgctgagcgagatcaccggggagttcacttccgacgatctgctgggccgcatcttctccagcttctgtatcggtaagtaaccgtcagtccgtaaacgttcactaacccgtattaacgccgcgttaatgcgggttttttcttgccctttgcaacgcaacgttctctacttttatctccccctctgccgcgagactaaaacatgaccgttgaatataccgtgatcgagaaggtgccctccgccgaagcgttttgccacctgcgggtagccgccggcatgtcgccgcgccccctggaaggcgccagagccggactgccgcatagctgttatggcgtacatatcctctggcaggagacgccgatcgcgatgggacgcatcgtcggcgacggcgcgattaatttcgatattgtcgacgtcgccgtcgatccggctcaccagggaaaaggccttggccggctggtgatggagaagctggtcgcctggctggacgctaacgcctttgatggcgcctacgttacgctggtggcggatgtgccggaactgtacgcgaagttcggcttcgaaagcgttcgcccggagagcgaggggatggcccgcgtctggcgaacccgcagtcgttagctcgcatttcctgccaggaaaagagcgttgtccaaatggcaactcgtcttacggcgcgttcctcactatgctgaacgccattcacatcgcgaggatcccatgacacgctttcttctctgcagctttgccctggttctgctctacccctccggcatcgatatgtatctggtcggcctgccgcgtattgctcaggacctgggggccagcgaggcgcaattacatatcgccttctcggtctatctggccggtatggcctccgcgatgctgtttgctggccgcatcgccgaccgctcggggcgtaagcctgtcgctattgtaggtgcagcgatctttgttatcgcctccctgctctgcgcccaggcgcataccagcagccacttcctcatcggacgctttatccaggggatcggcgccggcagctgctacgtggtggctttcgctatcctgcgcgatacgctggacgaccgtcgccgcgccaaggtgctgtcgttgctcaacggcatcacctgcattatccccgtcctggcgccggtgcttggccacctgattatgctgaaatatccgtggcagagcctgttctacacgatgaccggcatgggcgtcatgatcgctgtgctgtcggtctttatcctgcgtgaaacgcggccgacggcgcctccgcaggcagcgtcaccgcagcatgacgctggcgaatcgctgttgaaccgctttttcctcagccgcttactcattaccaccctcagcgtgacggtgatcctgacctacgttaacgtctcgccggtactaatgatggaagagatggggttcgaccggggaacttactcaatggcgatggctctgatggcgatgatcagcatggcggtctccttctcaacgccgttcgccctgtcgctgtttaatccccgcaccttaatgctgacctcacaggtgctgtttctggcggcaggcgtgacgctgagcctcgccactcgccaggccgtcaccctgatcgggctgggcatgatttgcgccggcttctccgttgggttcggcgtcgcgatgagccaggcgctggggccgttcacgctgcgcgcgggcgtcgccagctcggtcctcggcatcgcgcaggtgtgcggttcatcgctgtggatttggctcgccgccatcatcggactcagcgcaatgaatatgctgatcgggatactcattgcctgtagcatagtgagccttgttttgttactggtcgtcaccccgccgcgggttgcgcaatacgatgaagaagccgctgtcgagtcttgatcttaatttactcctctgcctgcagctcctgacccaggagctcagcgttacccgtacggcgaagcggatgaacgtttcgccgtcagcggtgagcaagtcgctggccaaactgcgcgcctggtttgacgatccgctgtttgtgaaaaccccgctgggcctggcgcccacgccgctggtcagcagcatggagcaggatctggcggactggatgcagatgggcaaccaaatcctcgataaaccgcaccataccatgcccagcggcctcaaattcgaactggcggcggaagcgccgctgctgatgatcctgtttaacaccctctctcagcgcatctatcagcgctatccgcaggcattgattcgtttgcgcaactgggactacgactccctggacgccatcatccgcggtgaggtggatatcggcttctgcggacgcgaaagccatccgcagtcgcgtgagctgctgagcctgctgccgtggtatatcgattttgatgtgctgttcaccgacctgccgcaggtctggctgcgcgccgatcatccggcgctcagggaagagtgggatctggcggcattcttacgctatccgcatatcactatctgctgggaacaacgcgatacctgggccctggacgacgtgctgcaggagctggggtataagcgtaacgtggcgctgaccgtgccggggtttgagcaatcactttttatggccgctcagccgcagcacaccatgctggccaccgcgccgcgctactgtcagcactataatcagcagcaccagctgccgctcgtctcccggccgctccccctggaggcgcagcatctggaaaagctgcgcgttcccttcaccctgctatggcataagcgcaacagctacaacccgaagcttgtctggcttagagatacgctgaaagcgctctattccggtacgctttaagccttgtttcgtgcccatagcaccttatttgcgcaagaatttgtaaaattcaaacaaattcccttttcaatgggggatttcggcattaaaacctgttaataccaggcgataatagcgcccgcagttttatccagaccattactcacggagcgacgtatggcaacgcattttgcaagagggatactcagtaccggggagccgctatcgacacgtttgtcagcggcctgtcatcaatccgcacgtcttctcccgacatatcgccaggctcgcttttgcgcgtcgcgctcgctgcttgccgagctgctgtttatgctttacggcatcagcgagctgcctgaaatcatcaacgaagccaatggccgaccggtttttagcgatcgccaactcccccgcttttcgatcgcttatactggcaatatcgttggtgttgccctcaccaccgagggggattgtggcctcgacatggaactgcagcgcactgtccgcagccacgacgccgaccggcacaatttcagtaacaatgagaatctgtggattaacatacagcatgatccggacgaagcgcgcagccagctggtagcgctgcgccgcagcgtgctaaagctgaccggcgaagcatcaacgcagctgcagctgctgcccggctctggccgcctgcgcaccgccggcagtcagccaatcgaagcggtatgtgacgccgaatcgctgctggtatggtccattgccgcaaccccgaacatcggctcgctgaaggtctgggaatatgatgctaagggaggtgactggcgcagcctggcggatgcgcagcagcgcgcacgcgaaccgtcagcccgcctgatgcgctttaccagcttacccatggaaaaaaccttatccctcaattgaccggtcttgccggcatcatgatccaaaggagcaatcatgtcagataccttgaaagtggttacgttactcggcagcctgcgtaaagggtcgtttaatggaatggtcgcgcgcaccctgcccggcatcgcgccagcgggcatggatatctccgcgctgccgtcgatcggtgatatcccgctgtacgatgctgatatgcaggaggaagaaggttttccgcagcgcgtgcaggagattgcgcaacagatccgcgaggcggatggggtagtgatagtcactccagaatataactattccgtgcctggcggcctgaaaaacgccatcgactggctgtcacgcctgcccgagcagccgctgtccggcaaaccggtactgatccagaccagctccatgggcgctatcggcggggctcgctgccagtatcatctgcgccagattctggtcttcctcgatgcgatggtcatgaacaagccggagtttatgggcggcgtcatccagaacaaagtcgatccgcaggcgggtgaagtggtcgatcagagcacgctggaccatctgcgcggccagctgaccgcctttggcgactatattcggcgggttaaagcataaaaaaagcccggcagcgatgccgggctttttcatcatgcgtgcggattaatgtgcatcgataaagacaattttcagcacgaacagcagcgaaacgataatcacacacgggctgagctcgcgcagccggccggtaccgatcttcatcacgcagtaagagataaagcccagggcgataccttcggtgatcgagaagctaaacggcatcatcactgcggtgatgaacgcaggcaccgcctcggtcaggtcgctccacttcacgcgcgcgaggctggaggtcatcagcacgccgacgtatatcagcgcgcccgcggcggcatagccaggaaccatccccgccagcggagagaggaaaataaccagcaggaacaggataccaacgacaacggcggtcaggccggtacgcccgcccacggaaacgccggaagaagattcgatataggccgtcaccgacgaggtaccgatgaaggagcccgccaccgacgagacgctatcgacaaacagcgcttgcttcatgcgcgggaatttaccgttggcatccgcgagacccgctttatccgtcacgccaatcagcgtcccggaggagtcaaacaggttgaccagcataaaggagaagatcacgccggccaggcccaggttcagggagcccgccagatcgacctgaccaatcaccgaagccacgctcggcggcgccgagacgatcccggtgtaatgcacgtcgcccagcatccagcccagcagggtggtcacaacgatagagaccagtaccgcggcgtgaatgttgcgcgacgccagaatcgcgatgataaagaagcccagcacgcccagcagtacgctgtgggaagtcaaatgaccaatgctgaccagcgtttccggattggcgacaatcaccccggcgtttttcaggcccatcatgccgataaacaggccgataccgctggtgatacctacacgcaggctaagcggaatattggcgatcatccagtaacgtacgcggaagatggtcagcagcagcaggcccacggcgccccagaagatggcgcccatgcccacctgccacggcagccccatcgcctgcaccaccacaaaggcgaaaaaggcgttcaggcccatcgccggcgccagggcgaccggcaggttcgcgaacagacccatcaggatactgccgaaagcggcaatcagacaggtggtcacaaacacggcgctggtatccatgcccgctacgccaagaatttgtgggttaacaaaaacgatatacaccatcgtcaggaacgtggtgaaaccggcgatggcttcggtgcgcaccgtggtgccgtgctcgcgcagcttaaatacgcgctccagcagaccctggccagaagactggctggtttgttgttgactcattatcggtttccgaacgtaaggagggaaaattcgaggctatcctataccaaattacggcaccaggcgcggttgtatggtaatttttttcatttattttgcttatacggcaacgattgcgtcgcggcattgagcattacgaaaacgttaaacttgttaatatggaaaggctatgactcaaccagaagcagtattttttgactgtgacggcacgctggtcgacagcgaggtgatttgctcccgcgcctacgttcacatgtttcaggaattcggcattacgctggacctcgccgagatttttaagcgcttcaaaggtgtgaagctgtacgaaattatcgacaccatcaacgctgagtatggcgttaatctgcaaaaggccaccctggagccgatttaccgggcggaggtcgctcgcctgttcgatagcgagctggaggtgattcccggagcccaggcgctgctggatgcggtaagcgtcccgatgtgcgtggtttccaatggcccagtcagtaagatgcagcactcgctcggacgcaccggcctgctgcgccatttcactgaccgcttgtacagcggctacgatattcagcgctggaagcccgacccggcgctgatgtttcatgcggcagaggccatgcaggtaaaagccgaaaactgtattctggtggatgactccagcgccggcgctcagtcggggattgccgccggcatggaagtgttttatttctgcgccgatccgcacaaccagccgatcgatcatcccaaagtgacgacctttaccgatctggcagagctgccggcattgtggcaggcgcgcggctgggatatcacgcgttaagggcctggtgagcggcacgttggcatcgatgaacccccgctatgcgtctgcgtaagcggggaatagaactagcggctttttattgctgcaactccgccgccgccgctttatcggcaataatcaccagtgaagggtgcaatttgagcactgaagccggcacctgcacgctgaccggaccttccaccacttgctttaacgcgtgcgcttttgccgcaccgctgacaattagcaataaatttttcgccgccatcacgcttctcggccccatggtgacatagctgtctggtactgccgagatatccccgcccatctcgctgttagcgataagagcaatcatttccccatgaatcggcacttcgaccgtctgatcatgaaagcgggtggtattcggcaggttgccgcaaaaatggccgtcggcccccagccccagcaccatcagatccagaccgccagcctcttccagctggcgatcgtgctgagcggcgttgtccagcgtcagcttgtgaatgttctcttctttgatctgcgccggggtaaaaaacagctggcgcaaattagatatcgtgacgccttctcgcgactggccgcgaaaagggatctcatcgaagttgtaatagtgcacccgatcatagaatgctttgcctttcacggcggcggtcaaatgctcatacatccgctttggcgtgctccccgccgtcaccgccagattcacccgccgcggcgccgtgatatagcccagaacatgatggctggcgaccaggctcatctcttcataatcttcggtcacaatcattttcatcttgtcgtccttcacaagcacaaaacgggggctgaaggccccctaaaggttatttaaacagtttttgcacaaactcggcgtaggccgggcgccagacgtccatttcatggttcaggccgggatactggtggtaatcaaatttaatctgctgtttttccagctcgcttttcagaccagcaatgtctttaccggtcacagaatctttttccccgacgaccacggtaaagttacgcagctgcttattgatcgcgtcaggctgcttcagctgcgcttccacgccggcattcggcaccgtggtagtcgtaacgccgctaaaggtggcgagccagccaaagctctccagatgattcattccggaaaccagcgcctgataaccgccctgcgagaggcccgccagcgcccgaccgtcggcatctttacgcacgttaaatcgggcatcgatcagcggaataatatcctgcatgagctctttatccgccgcctgcgcattaagtggatagaaggttttgcgccgctcctgcggcgggaagttttccgcgaccgcttccgggatatcggtttcggtatccgggaccaccactagcatcggcttaatcttgccctccgccagcaggttatccatgatttgcgggatccgcccctgatcgatggccgacaggccgctgtcgccaaagccatgatagaaatagagcaccggcagcggatcgccggttccgctatagcccggcggcgtccagacatagagacgacgttcggcgttcagagccttcgagtgataggtgagggtgcgcagatcgccatgcgcaacctcccgatcgtcaagaatactgcccggcaccagaatcaaactggtgttcacctggcgctgcggcttctgatagcggctgccggtatctaccgagcggaagccatccacatcgaaatagtattcatagagattgggcttcatcggctcgcttttccatgtccagactccgtccgctgctttggtcatgtcgtgcgagacaaaggagtccggcgtggcgccagtcactatcgagacccgccgggcatcaggggcaaacaagcggtaagtgatactcttatccgcgttaacctgggtgataaagtggctcaccggcaggcttgggtccgacatcgcgggtaatggcgccgcctggagggtaaacgccgcgccctccagcgccagggcgaaataaattgcatgtcgtttcatcgttgttcctctttcgttgtgtccgttcagttatcgtcttaccaccagatttccgcctgcgcccccacggcaaactgatcgttcttcccgtcttcaaaaatgctggtggtattattcgcggccttatccaggtcaatatccttcgctttaatataggtggcatagaaacgaatttccgggcgcgaggtcagcatactggtattgactttgaaggtatggaacagcgtggtcttgtagccggactcgttatatttcttgccggtaacatctttgttttgctgtttgaagtaccccagctcgacgccggtctggttatatttatcccagatataagccggtcgcagaaccgtacggatagattcaaaatcggagtgggctccggtttcgtagctatagacgtcgttaccaaaagagtagacgatggcattcgccataataacgtcatcgcgtaaataggtttccccctgcgtggttaagcgcacggcggtgccattggtatgatcgccataatagcggccattaaaggtggtataggggctggatccggcatagcgtgagaagctgctggcaatagagttattggccagtaagaaagagaattcgttaaagccgccgttagcaaatttctgcgttaacgaggtaccagccatccaggtatctttccacggataataaccttcattgccctctttatatttctcagaggaactttggttggcggcgacatagcgtccgctaaccatcaggctggctttatcccacagcggaatctctttgtaacgaacgtccagggtgttggtgttaatttgctgcttattgcttaaagaacggtcataatcatcgacatcttcgcgaatcaacgcgatatcgaatttcccggcgcccacctgccagttttccagccctacgccggccgccgcatcggttctctgcgttttccagtccagcatctggatttcaatttttggcgccccgtgtttgccgacccagaaatcggcttccggcgcaaacggcaggaaccctttggtgttaacatacatatccgagaattgaatgtagttttcgccgccggcattgtcaccaaaccagccagtggaatactgctggccgacgttcccgtcgagcatcacgatggcgtcgacgcgtttatcgccttcctgaaacacccgctgcttcagctgcagatcgaaccagccggaatattcattgcccaggcggccaagcgaaccgatcgcccatgattttggcgagccgtgcgaggcggtcccccagccggaacggaagtagccgttatagctaaagccaatttcatctttcacgaacttgctaaagtctttcagcgtcatcgcgctgtaggctggcgcgccatcggtgacaggttgttgatttttaaccagcaccgcatccggtttaaccgccgttttcggcccggcggtcgcccccccggtcttgcgcttctgaccttccgcaggaggagaccatgaggcccaaatctggtctctttttctttcctggtcctgatattttttgagctctttttgcgtgtctttgagcgctttttccagcagctcaagccgttgttccaccgtcaactggctcgctagcagattagttgaataacaaagtggcgccagcaagactatcgccgaagcgatcctgttttttctcatcataatattcccttatataatcattggcgtaaataaaacacgacaacaaccctattccgtgccggtgctaatagccgtatccataccgtttgacgtcgcggcggctgttatttttgcggttagacaaaaacaaaaaaacctgaagaagaccatctgccttggcagataatcctcttcaggttttgcccgcgcatcgcggtagcaaccctcattcagccattattggcccgcataaaacaaaaaacctgatatcgcccccaggagcaatatcaggttttgcctgctgtcgcagtcacaatccgtttaaaccatcctgagcgttaaaactcagtgagtggcagctgattgttacgcgataaaatgaataactcaaacgggcagattgttaattgtgacgataatctcagcaatctcgctgccgcggggtaaaacatatctaattctgataaatccatttaccagaattagacagaatgattattactctttcggatctttgccagcgagcagtttatccagctcatcgccgccaacgtgacggaaatcctgacctttgacgaagtagaaaatatattcgcagatattctggcagcggtcgccgatacgctcgatggagcgcgcgcagaacagcgcggtcaggacgctggggatagtgcgcgagtcttccatcatgtaggtcatcagctgacgcacgatgccttcatactcctggtcgactttcttatcttcgcgatagatacgtaccgcttcgtcgagatccatacgcgcaaacgcatccagtacgtcatgcagcatctgcaccgtgtggcggcccagcgattcgaggctcaccagcagcggctggtgctgctgggaaaacttctccagcgcggtgcggcagattttatccgccacgtcgccaatgcgttccagctcagcgatagtcttgatgatcgccatcaccaggcgcaggtcgctggcggtcggctggcgcttggcgatgatgcgcacgcacgcttcatcgatagccacttccatcatgttgacctgcttgtcgccgtcgatgacgcgtttcgccagatcgctgtcctggttatgcatggcggtgatggcatcagagagctgctgttccaccagcccacccatggtcatcacctgggtgcggatatactccagttcagcgttgaactggccggaaatatgtttgttaagatttaggttgtccatggtgtctcctgattgcccaactggtgagagcctgaaagcacaagggcaaatcaaccgtagcggccagtaatataatcttcagtttgtttcttcgcgggcttagtgaacaggtcatccgtgttgctgaactcaatcagctcgccaagatacataaatgccgtatggtcggagcaacgcgcagcctgctgcatgttgtgagtcacgataacgacggtgtagtcctgtttcagctcggtgatcagctcttcgatacgcccggtggagatcgggtccagcgcggagcacggctcatcaagcagcagcacttccgggcggatcgcgataccgcgggcaatgcacagacgctgctgctgaccaccggagagagaatacccgctctggtgcagtttatctttggtttcgttccataatgcggctttggtcagcgcccactgcacgcgctcgtccatatcggcacgggacagcttttcaaacaggcgcacgccgaaggcgatattgtcgtatatggacatcgggaacggcgttggtttctggaacaccatgccaaccttagcgcgcagcagggcgatatcctgggtgttagtcagaatgttgtcgccatccagcaggatctcaccttccgcgcgctgctccggatatagttcaaacatcttgttgaacgtgcgcagcagggtggatttaccacagcctgacggaccgataaacgccgtcacctggtttttggtgatatccaggttgatgttcttcagggcatggaatttgccgtagtagaagttcaggttacgaactgaaatcttacccggagctgtattcaccatactcatctcaatctcttcctcattcagcgcagcagttgctgcgccgcaaaaaattaaccgtgtttcttcttggcgaagataacgcgcgccaggatgttcagcagcaagacgcacagggtgataatcaacaccccggcccatgccagttgctgccactccgcaaacggactcatggcaaatttgaaaatggtcaccggcaggttagcaatcggctgcatcatgtcggtgctccagaactggttggacagcgcggtgaacagcagcggcgccgtttccccggcgatacgggcaatagccagcaggatcccggtcataatccctgagacggaggctttcagggtgatcgccgagatcatcttccacttcggcgtccccagcgcataggccgcttcacgcaggctatccggcaccagcttcagcatgttttcggtggtacgaataacgataggcacctgcagcagcgccagcgcgataacgcccgcccagcccgagaagtgctgcatctgcgccaccacaatggtgtagacgaacagacccaccacgatagacggcgcggaaagcagaatgtcgttgataaagcggatgatttccgccagcaccgacttgcggccatactccgccagataaattccggcgaggatacccagcggcgtaccaaatacggttgcccacaggatcagcaggccgctgccggcgagggcgttagccagtccaccgcccgccgtattcggcggcggcgtcatttcggtgaacagcgccagactcatgccgtcgaaaccgcgggttatcgtcgccatcaggatccagataagccagaacaaaccaaacgccatggtcgccatcgacagcgctagagcgatacggttcttcatgcggcgtttggcctgcatcttgcgacgggactccgccagttcggcggtagtttgcaattcaatggtcgccattagcgtgccccctcattcttcgcgaggcgcataatcataaacttcgacgcggccagaacgataaaggtgataacgaacaggatcaggcccagctccatcagcgccgccacgtgcaggccggtttccgcttcggcgaactcattagccagcgcggaggtaatactgttccccggcatatacaacgagatgctgtcgagctggtaggtgttgccgatgataaaggtgaccgccatggtttcacccagcgcgcggcccagaccgagcatcaccccgccgatcaccccgtttttagtgaacggtaaaacaatgcgccagataacttcccaggtggtgcagccgatgccataggccgactctttcatcatcaccggggtctgttcgaaaacatcgcgcatgaccgcggcgatgtaagggatgatcatgatggccagaatgacgccagcggcaagaataccgataccaaacgccgggccggcaaacagcgcgccgacgaacgggatggtcgacagaacgttgccgaccggctcctggaagtaagtcgcaaacagcggggcgaaaataaacaggccccacatgccgtacacgatgctcgggattgccgccagcagctcaatcgcaatgcccagcggacgcttgagccaggcgggggacaattctgtcagaaacagcgcgatgccgaagctcaccggaacggcgatcagcagcgcgataaaagaggtgaccagggttccgtaaatcgggaccagcgcgccgaagatctcgttaggcgcatcccactctttggtccacaaaaaggcaaagccaaacttttgaatgctcggccaggaagagatgatcagggaaacgatgatgccgcccagcatcaatagcacaatcagcgcagccagttttaccagcgcactgaaaatcatgtcaccctttttccccggaggggtaaatgcaggcttggttgcagccatagattactctttacgtattaaaacttgttcgaataaatgcccggtggcgttggctcccgggcctacagtctgaaccgtagggcgggcagcgcctgaacgcccccgccatcttcgtcaaaaatctactgttagtacagcgctttaccgctgctgtctttgacgttggttttccatgccgcgcgaacctgctctaccacgctttccggcagcgtcgcgtaatccagcgcattcgcttctttcccgccgtttttatacgcccagtcgaagaacttcagcacttcagcggtctgttccggcttgttggtcgccttatgcaccaggatgaaggtggttgaggtgatcggccatgcattttcgcctttctggttggtcaggtcctgagcgaaagacttgctccagtcaacgccttttgcggcgttagcgaagttgtcttcagtcgggctaaccggcttgccgtcggcagagaccagtttggtgtaggccaggttgttttgcttagcgtaagcgtattcgacgtaaccaatcgagccaggcagacgctgaacaaaggcggcgataccatcgttgcctttaccgcccagaccggttggccagtttacggtagagccggcgccgattttcgatttccactcttcattcactttggacaggtagctggtgaaaacgaaggaggtacctgaaccatcggcgcggcggaccacggcgatgttctgcgacggcagcttcaggcccgggttgagcttagcgatcgcttcgtcatcccattttttaattttacccaggtagatatcaccgagggttttgccatccagcaccagctcgccggatttcacgccaggcaggttaaccgccagtaccacgccgccaatcacggtggggaactggaacagaccttcctgggtcagtttgtcatcagccagcggagcatcagaagcaccgaaatcaacggtgttggcaataatctgcttaacgccaccagaggaaccaataccctggtagttcactttattgccggtttctttctgataggtatcagcccatttggcatacaccggcgcagggaaagttgcgcctgcgccagtcaggcttgctgctgcgaaggcagagaaagcgctcatcgataaggtcgcggcgacaactgttgcgacggtggtacgcataacgttcataatgtctcctgctgggattcgtaaatcattgtttcgaggctatggtgagcaaaataggtcaaagaggtgacagtaaaatgtacgaattatgacagttttatgacaggccgggagagtggattttacgccaaataatacgcttataactcagatggttatctttaatcatgaccgtggaatgacaaaataattttctttttatgacggcgaaatcggaccgtaaaacgatcgtttgtcatctaccgccagccaaaatattgcgcacgtaatcggtggaaaacagcaggtgcaaataaaaagggccgccgtcggcagccctttgcaggataggatgctttactcaaccgttaccgatttcgccaggttacgcggctggtcaacgtcagtgcctttgatcagcgcgacgtgataagccaacagctgcagcggaaccgtatagaagataggggcgatggtctcttccacatgcggcatctcaatgatgtgcatgttatcgctaccgttgaagccggcttcaccgtcggcgaagacgtatagttcaccgccgcgggcacgaacctcttcgatgttggatttcagtttttccagcagttcgttgttcggcgccaccacaatcaccggcatttccgcatcaatcagcgccagtgggccgtgcttaagctcgcccgccgcataggcttccgcgtgaatgtaggagatctctttcagcttcagcgccccttccatagcgatcggatactgatcgccacggccaaggaacagcgcatggtgcttatcagagaagcgctctgccagctgctcaatacgcttgtcctgggagagcatctgctcgatacggttcggcagagcctgaaggccgtgcacgatatcatgctcgatagacgcatcctgacctttcagtcgcgccagtttcgccaccagcatcaacagcacggttagctgagtggtaaaggctttggtcgaggccacgccgatttccgttccggctttggtcatcagcgccagatcggactcgcgcaccagcgacgagcccggcacgttgcagatggccagcgagccgagatagcccagctctttcgacagacgcagcgccgccagggtatcggcggtttcaccagactgggagagggtgatcatcaggctattgcgacgcactgcggacttgcgatagcggaattccgaggcgatttccacatcgcacgggacgccggctaacgcttcgaaccagtagcgggaaaccatcccggagttataggaagtcccgcaggcaactatctgaatatgttcaacctgagccagcatttcattggcgttgggccccagttcgctgagatccacttcgccatggctgatgcgcccggtcagggtgttcttaatcgcgttcggctgctcgaaaatctctttctgcatatagtggcggtagatacctttatcgccagcgtcatactgcagattggattcgatctcctggcgcttcacttccgcgccggatttatcgaaaatcaccaccgaacggcgagtcacttccgcgatatcgccttcttcaaggaagatgaagcggcgggtaaccggcagcaatgccagctggtcggaggcgataaagttttcacccatccccaggccaattaccagcgggctaccggagcgggccgccagcagagttcccgggtcacgggtatccatgatcaccgtaccgtaagcgccgcgcagctgcgggatagcgcgcaggacggcttcacgcaaggtaccgccttgttccagctcccagtgcaccagatgggcaataacttcggtatcggtctcggtgacgaagacatagccgcgagactgcagcagggcgcgcagcggctcatggttttcgatgatcccgttatggaccaccacaatgtgttcagaaacatgcggatgcgcattgctctcagacggttcgccgtgcgtcgcccaacgagtatgggcgatcccggtaccaccgtgtaacggttgctcttctaccgcctgagccagcatctgaactttacccaggcgacgcacgcgggtcatatgaccttcgctgtcgaccactgccagaccggcagagtcatagccacggtattccagacgacgtaaaccttcgagaaggatttcagcaatatcacgctgcgcgactgcgccaacaattccacacatagttaaatttcctgataatggcgatatgccatgcgttgtcgctgacctgtatttgcccgttttccgggcgccccgagccttgtagagagtggggttattgttatggtacttcctgcggacggggatctatgttgaccctctcatcctggttcgccgggaaaatttccccggcgataatccaaattatttcttcttcaccggacgctgccagccctgtttgtggacctgcggtacgcggctcaacactagttcgttatcagcgatattgcgcgtgacggtggtgccggcggcgatcgtgacgccgttgcctaccgtgaccggggccaccagctgggtatccgagccgacaaagacatcatcgccaataatcgttttatgcttgttcgcaccatcgtagttgcaggtgatggtgcccgcgccgatattgacgttatcgccaatctccgcatcgcccagataggtcagatgacccgccttggagcctttcccgagacgcgcttttttcatttccacgaagttaccaacgtgggcgccttccagcagttcggcgcccgggcgcagacgggcaaatggaccgatggtgcaggccgcctgcagctgggcatcttccaccacgctgtaggggctaatttcgcagtcatcgccgatggtgctgtttttgatcacgcagccggcgccgattttcactcgatcgcccagcaccacgttgccttccagaataacgttagtatcgatctctacatcgcgcccgtgctgcagcgtaccgcgcagatcgaaacgcgccggatcgcgcagcatcacgcccgccagcagcagcttttcggcctgctccgcctggtagacgcgctccaggcgcgcaagctgcaggcggttgttgacgccttcgacttcgctcaggcgctgcggatgcactgcgacgatctggtgtccttcctggtgcgccatggcgatgatatcggtgatgtagtattcgccctgagcgttgttattggtgagtttcgccagccagcgctttagatccgctccgccggcgatcaggatcccggtgttgatttcctggatctggcgctgggcctcgctggcatctttgtgctcaacgatgcccgtcacctggccattttcacgggtaatgcggccatagccggttgggtcatccagcttcaccgttaacagaccaatcccaccctgtggtttcgcggcgcgcaggcgctgtagcgtctcaacggagatcagcggcacgtcgccatagagcatcaggatgtcttcatcatcattgaagaatggcgccgcctgctgcatagcgtgcccggttccgagctgctcggcctgcagcacccagttcaggttgtcttcatgcagagtctgacgcagcagatcgccgccgtggccatataccaggtgtaccgcacatgcgcctaaatcgttagcggcatcaatgacatgctgcaccattggcttcccggccagggtatgcagcaccttaggaagatcggaatacatgcgggtccctttgcctgcagcaaggataaccacgctcatcgcactatttgacatactcatcctgacggtagttagaacgaaaagtaaaagcctttcacgttgaaatttctacatatttttcatcataaaacgagacgtggagaaaacgtccaggctcactgttttaccccattttatgacgctatttttaaccactgcaaatcagtttaacgctgaaaaaggagggcggggtggagaatcattaactatctcactgcttttgctgttttttcgccacctgaataaagccgcagcggcaggcgtttatcagcacccacagcgggaagaaccaggataaatattcgccagtcgctggcgggggagggcggtaaagtgattgatgctatccataaaaaacgaaaggccacctatcaggtgaccttcttttcccggtttcacatcgccagtgttgtcgttttgatgggcgatacgtcgtgtcagcgggcgagatagcgcggagcttagaagctcagaacgctaaatttagcgatgattttatggaacagtttcatgatgatttcctgacgcaggtgcagtttataacgctcttttttgtgatatacatcacataaaaagagtttacgcctcatcatttaactaatcaataacaattaagggtgaatgctgttttcacttcatccgctcgtcagcagcgggcaataaaaaaagccagcctggaacccagactggctttttacgttcaagccggtgttacatcgcttttttggtcaactcgataacgcgcagtttagcgatcgctttggccagttccgcagacgcctgagcgtaatccacatcgccgtgagagctcttaatgtgctcttccgctttgcgtttcgcttccagcgctcgcgcttcgtcgaggtcctgaccgcgaattgcggtatccgccaggacggtcacgctgccaggctgcacttcaagaatgccgccggacagatagataaactcttcatgaccgtgctgtttaacgatgcgaatcataccaggcttaatggcggtgagcagcggcgcgtggcccgggtaaatacccagttcaccttcgctacccgttacctggattttttcgaccagaccagagaacatttgttgctctgcgctgacgacgtccaggtggtaagtcattgccatatcaccctccgattaaggcgttaaagttttttggctttttccacggcttcgtcgatggaaccgaccatgtagaacgcctgctctggcaggtgatcgtattcgccttccatgatgcctttaaagccacggatggtgtctttcagcgccacgtatttgcccggagaaccggtaaagacttctgccacgaagaacggctgggacaggaagcgctggatcttacgcgcgcgagctaccaccagtttgtcttcttcagacagttcgtccataccgaggatggcgataatgtctttcagttcctgataacgctgcaggatggactgaacgccacgcgcggtgtcgtagtgttcctgaccaacaaccagcggatccagctgacggctggtggaatccagcgggtcaacggccgggtagatacccagggatgcgatctgacggctcagtactacggttgcatctaagtgagcaaaggtagtggctggggatgggtcagttaagtcatccgccggtacgtataccgcctgtacggaggtgatagaaccggttttggtggaggtgatacgttcctgcagaacgcccatctcttccgccagggtcggctgataacctaccgctgaaggcatacgacccagcagcgcggatacttcagtaccggccagggtgtaacgatagatgttatcgacgaacagcagtacgtcacgaccttcgtcacggaatttctcagccatggtcaggccggtcagcgcaacgcgcagacggtttcccggcggctcgttcatctggccgtacaccagggatactttatcgataacgttggagtcggtcatttcgtggtagaagtcgttaccctcacgagtacgctcacctacgcccgcaaacacagagtaaccggagtgctcgatcgcgatgttacggatcagctccatcatgtttacagttttacctacacccgcaccgccgaacagaccaactttaccgcccttggcgaacggacacatcaggtcgataactttaataccggtttccagcagttcctgagagctggacagctcttcataggacggtgccgcgcggtggatagcccaacgctcttcttcgccgatgtcgcctttcatgtcaaccggttgacccagtacgttcatgatacgacccagcgttgctttacctaccgggacttcgatcgggtgctcgaggtcttttacatccagaccgcggcgcagaccatcagaagaacccatggcgatggtacgtacgataccgccgcccagctgctgctgaacttccagcaccagaacttcattaccattctgtacctcaagggcttcgtacacgcgtggtacggcatcctgagggaactcgacgtcgaccacggcgccgattacctggacaatctttccagtagccatcttaaatcctctacgaaataacctggttaaaccgcggcggcccccgagacgatctcggtgagttcctgagtaatgctggcctgacgagctttgttgtataccaactgcagctctttaatcaggctgccgccattatcggtcgcggctttcatcgccaccatacgggcggcctgctcgctggccaggttttcaaccacgccctgataaacctgagattcgacgtagcggcgcaggagggtatccagcagcgctttcggatcgggctcatacaggtaatcccaggatttacgtttcagatcagcatcttctgatgccggtaacggcagcagctgagtgatcgtcggaacctgagacatggtgttaataaatttgttgctgacaacgtacagcttgtccagacggccttcatcataggcctgcaacatcacttttaccgggccgatcagttcggacagggatgggttatcccccataccggtcacctgtgcaaccacgttgccgcccacggagttaaagaaagaaacgcccttagagccgatcattgcgaggtcgcactgaacgcctttatcggaccatgctttcatttccgccagcagtttcttgaacaggttaatgttcaagccgccgcacagaccacggtcggtcgacaccaccaggtagcccacgcgcttaacgtcgcgttcttccaggtaagggtgcttatattccagattaccgttcgcaaggtgaccaatcactttgcgcatagtatctgcgtaaggacggctggccgccatgcgctcctgcgatttacgcattttggaagcggcgaccatctccatcgctttagtgatcttttgcgtgttctggacgcttgcgatcttactacgtatctcttttgcgccggccatgagcttctcctcaatgccttgcggcctgccctaagacagaccgccagacgttaccaggactgggttgctttgaaggaatcgaggatgcctttcagcttgccttcgatttcgtcgttatagccaccggactggttaatctcttgcatcagcggagcgtgatcacggtcgacgtaagccagcagagcggcttcgaagctaccgattttcgccagttctacatcagccaggtaaccacgttctgctgcgaacagaaccagagactgctgcgcgacggacatcggcgcatactgtttctgtttcagcagctcggtcactttctgaccgtggtccagctgtttgcgggttgcatcgtcaaggtcggatgcaaactgggagaacgccgccagttcacgatactgcgccagcgcggtacggataccaccggacagtttcttcatgatcttggtctgcgctgcaccaccaacacgggatacggagatacccgggttaaccgcaggacgaataccggcgttaaacaggttggtttccaggaagatctgaccatcggtaatagagattacgttggtcggaacgaatgcggaaacgtcacccgcctgcgtttcgataatcggcagcgcggtcagagaacctgttttccctttcacttcacctttggtgaaggcttcaacgtattcggcgttaacacgcgcagcacgctccagcagacgagagtggaggtagaatacgtcgcccgggaacgcttcacgtccaggcggacgacggagcagcagggagatctggcgataagcaacagcctgtttagacagatcatcgtaaacgatcagcgcatcttcaccgcggtcgcggaagtattcgcccattgcgcaaccagcgtatggcgccaggtattgcagtgcagcagattcagatgcagtcgctaccactacgatggtgttagccagcgcgccgtgctcttccagtttacgcaccacgttagagatggtggacgctttctgaccgatagcgacatagacgcacttgatgccggaatcacgctggttgatgatggcatcgatagccagcgcagttttaccggtctgacggtcgccgatgatcagttcacgctgaccacgaccgattgggatcatggcgtcaacggatttgtaaccggtctgtaccggctgatcgacggactgacgttcgattacgcccggcgcgatcgcttcaacggcggagaaaccgtcgttttccagcggacctttaccatcaattggcgcgcccagggtgttaaccacgcggcccagcaggccacggcctaccggaacttccaggatacggccagtacatttcaccttcatgccttcggcgaggtcagcgtacggacccattaccaccgcacctacggagtcgcgctccaggttcagtgcgatagcgtaacggttacccggcagggagatcatctcgccctgcatacattcggcaaggccgtggatgcggataacaccgtcacttacagaaacaatagtaccttcgttatgagcttcgctcacaacattgaactgagcaatgcgctgcttgatcagttcgctgatttcggtggaattcagttgcatgctccagtccccttaagactgcaagacgtctgcaaggcgctcaagacggccgcgtacgctgccatcaatgaccatatcacccgcacggatgataatacctgccataacagacttatcgattttgcaattcagcttaactttgcgtgacagacgtttttccatcgcgctgacgatcctggcaagctgttcatcactcagttggttggcagatattacttctacctctgcgatggcctcactggccgcgcgcaggtgaatgaattgctcaagaacgtccgggagcaccttcagacgattattttccgccatcaccttaatcaggttctggccattttcgtcgagttgctcgccgcagatagcgataaacgcttctgagagcgtttccggcgccaaagcaccggagagaagctctgccatttggtcgtttttggtcacttcggcggcaaacgccagcatatcctgccagcgttcaacactgttgtgttcgacggcaaagtcaaaagctgctttggcgtaggggcgagctaccgttacaaattcagacatcagcccctccctccttacagttcagcgacaagtttatccacgatgtcgctgttagcagcttcatccacggaacgttcgatgatcttctcggcgccagcaacagccaggatagcgacctgcttacgcagctcctcgcgtgcacgtttacgctcagcatcaatttcagcctgcgcttgtgcaacgattttggtgcgttcctgttctgcttcagctttagcttcgtccagaatctgagagcggcgcttgttcgcctgctcaatgattacctgggcttccgctttcgcttttttcagctggtcggtcgcgttggcctgtgcaaggtccaaatctttcttagcgcgttctgcagaagctaaaccgtcagaaatctctttctggcgtttttcgatggcagccattaaaggcggccatacgtatttcatgcagaaccatacgaagataacaaacgcgatggcctggccgaggattgttgcgttcatgttcacagcacaatacctctttaattaactctgtggcttaggtttctaacaacttactacgcgacggcgaacatcacgtacagacccagacctacagcgatcatcgggatagcatccaccagacccataacgataaagaactgagtacgcagcagagggatcagatccggctgacgcgctgcgccttccaggaatttacctccgaggatgccgataccgatcgcagcaccgattgccgccagacccatcatcacagcggcagccatgtacagcagatccatattcaggttttccatgacagtctccagtttgtttcagttaaaacgtagtagtgttggtaaaaaatcaatgctcttcagatgccatcgacagatagacaatcgtcagaaccatgaagatgaaggcttgcagcgtaataatcaggatgtggaaaatggcccaaggcacattcagaacccactgtgaccaccacggcaacagaccagcaatcagaatgaaaatcagctcaccggcatacatgttgccgaacagtcgcagaccgagagagaccggtttggacagcaggcttaccccttcaaggattaagttgacaggaatgaacgcccagtgattgaacggctgcatggtcagttctttaacgaacccaccaacgcctttcattttgatgctgtagaaaataatcaggatgaacacgccaagcgccatcgacagggtgatgttcacgtcggcagacggaaccacgcgcagtgctggcaggccgaaaatgtgttcgccgatataaggaagcaggtcgattggcagcaggtccatcaggttcatcaggaagacccagacgaacacggtcagcgccagcggcgcgataaccttgctcttgccatggtacatgtctttgacgctgccatggacgaagccgatgatcatttcgatgaaggtttggaatttccctggtacgccgctggtcgctttcttagcaacgctacggaacatggcaaggaacagcagaccgagaaccaccgagaagaacatggagtcaatgttgagcgtccagaaggtggctgtgtggttgtgcggatccaccagcgagaatgtacgcaggtccaactgaaggttgttcagatggtgtcctatgtaatcctgcggcgtcatattttctgaagccatgatgcctttaccctttgttgttaattacagctggcgccagaacttgtaccaccagcaccaaaacccacgtcacgatcagtggcaaaaataccacttttaaaacggccagcgccaccgccagaagggcgaaggtcagcaacaccttgaaggcttcaccgaaggcgaaggtccaggccacacggccttttgctggtgtatgcgcctgatgacgccaggcaaaaattataaacatcagatttggcaagaccactgccaaaccgccgcatacagcggaaatgccccagaaggggtctttgaggctgaacagcagtccacttgccattactgccagtaactgaataaacagaagcttgcgagcaacgtttcgactcaagagcgacactgacatcacgtttttactcctgctccctttgaggtatgtcgcgtgtcgtataaaacgtcctttaagacgaagagtcaagcatcaaaaagcggacaaattatacggtgacgccccgtgatttcaaacaataagtagcaaaatagtgaataaatgtttaattattttccaacggacaactttccgtgcatttcagcgttctgtgagcggtcatacaaaactgcaaataacgaggaaacacggcaattaaagcgtgcatcagatcacataataaacatttcaagcgccctttaatgaatcaaggacataaaacactatttttcatgcttttgatattcaagataaaaagtgaggacattatctaaaacaaccccacatacaataaaaaccttttattgacatttataataaaaatttaacatcactatgctgttcatcattgtcgatttttagcaccctgatattttcaaagttgactattttgtcagtgaatcacttacgctaagttaactgcaagaaaagccttagtaaaaacaaggttaaatgcggcccgttaatatcgggggacgtcctttatttttgtaacatgcgcgggccacattttttccacattttttgataaaaattaactcgattttggcttaatcaccaccaggtgccgctccccttccaaccgaggaacatgcagctcaatcacctcgacaatgtcatacccttccggcagactttccatttcttctttttgcgctaaccctttgagcgcatagaagtgaccattcgctgccggcagatgatggcaccagctcaccatatcattaagcgatgcgaaagcgcggcttatcacgccatcaaacggcggctcggccgggaaggcttccacgcgactctgcaccggggtgacgttatccagcttcagctcgtgctgcacctgacgcaggaagcgcacgcgcttgccaaggctgtccagcagggtgaaatgtgactccggacatacgatggccaacgggatccccggcaaccccgggcccgtaccaacatcgataaagcgcgagccctgcagataaggcgccacgatgatgctgtcgagaatatgacgcaccagcatctcattcggatcgcgaacggaggtcaggttataggctttgttccacttatcgagcagtccgacgtaagccaccagctgatttttctggtgatcggtgagcgaaatacccgcttcatccagcagacgagaaagtttgttgagcacggtaagtaccttcaaaaaataatgagcccggaggcgctaacgcttaccgggctatgaatgataaaggcgaacgctgattatgcaactgggaaatcagcgcggcaggcagccgcaatcaggcgctgcggcgcagcatcccctgctttttcagccaaaccagcaaaatagagatcgccgccggggtgatcccagagatacgtgacgcctgccctatcgacgacggtttatggtcgttcagtttggcaatcacctcgttagacagcccagtgacctggcggtagtcgagggtcgctggcagcaaggtattctcattgcgctgttgtttctcaatctcatcctgctggcgcgcgatatagccctcatacttcacctggatctctacctgttcagccgcctgacgatcttccagtcccggggtgaatggcgagagttgaaccagctgttcgtaggtcatttccggacgacgcagcagatcttcgccgctagcttcacgcgacaacggcgcggtcaggtgagcgttcacttcgttggcgctctctgcctgcggattcacccaggtggatttcagacgctggcgttcacgttcgatgctttccagcttctcgttgtagcgcgcccagcgttcgtcatccaccagacccagctcgcgcccctgttcggtcaaacgcaaatcggcgttgtcttcgcgcagcatcagacgatattcagcgcgggaagtaaacatgcggtacggctctttggtacccagggtgcagaggtcatctaccagcacgccgaggtaagcctgatcgcgacgcggcgcccagccctctttttccgcagagaagcgggcggcgttaagtccggccagcagcccctgagccgccgcctcttcataaccggtggtaccgttgatttggccggcgaagaacagaccctgaataaatttgctctcaagcgttggcttcagatcgcgcgggtcgaagaaatcgtactcaatagcgtagcctggacggacgatccgcgcattctccatcccctgcatcgagcggacgatttgcatttgcacatcaaacggtaggctggtggatataccgttcggataaatttcgtttgaggtcagtccttccggctcgaggaagatctgatgctggttgcgatcggcaaagcgcatgactttgtcttcgatcgacgggcaatagcgaggtccgatcccttcgatcactccggcgtacataggactgcgatcgaggttattgcggatcacatcgtgggttttctcgttagtgtgggtgatatagcacggtacctggcgcggatgctgatccgcggatcccatgaacgagaagaccggcatcgggttatcgccatgctgctgcgccagcacgctgaaatcgatggtgcgcgcgtcaatacgcggcggagtaccggttttcagacgacttacgcgcagaggcaattcacgcagacgacgagacagcgggatagacggcggatcgccggcgcggccgccgctgtagttgtccagaccaatatggattttgccgtcaaggaaggtcccgacggtcagcactaccgctttagcgcggaatttgaggcccatctgggtgacggcgcccacgacgcgatcgttttcgacaatcagatcttcaaccgcctgctggaagatcatcaggttcggctggttctccagcgcggtacgtactgcctgacgataaagcacgcggtcagcctgggcgcgggtggcgcgcactgccggtcctttgctggcgtttagtatcctaaactgaatacccgcctgatcgatcgctttggccatcaaaccgccgagcgcatccacttcttttaccaggtgtcctttcccaatgccgccaatcgccgggttgcaactcatttgccccagcgtgtcgatattgtgtgtcaaaagcagggtttgttgacccatacgcgctgcggccattgcggcctcagtgcctgcatgacccccgccaatgataatgacgtcaaaaggatcctgataaaacatggtggtctgcctcgcataaagcggtatgaaaatggattgaagcccgggccgtggattctactcaactttcgtctttcgagaaagactccgggatcctgagtattaaaaagaagatctttatatagagatctgttctattgtgatctcttattaggatcgactctctttgtggataagtcggatccgcgaagtaagatcaaaagcttaagaaggatcactatctgtgaatgatcggtgatcctggtccgtataagctgggatcagaatgaagggttatgcacagctcaaaaaccatactacggttattctttggataactaccggttgatccaagcttttaagcatggttatccacagaagatcgggcgatctttacaattctcagagcaaatttttccaggatcccagccagatttccgctggatcctccggaatttcgtgttcaaggacgttgatcttcagcgtctcaccgatctgttttgccccgcaggccttcagcgccgcttctaatttatcgatcgcgccgcaaaaggtgtcgtattcgcggctgccgatccctatagcgccaaagcgcacggcggaaagatcggcctgcttctcctgcagcgcgtcatagaagggaaccaggttgtcgggaatgtcgccggcgccatgggtggaagagataattaaccagatcccttgcgcctgcagatcgtccaccagcggaccgtgctggatttcagtgctatagccggcttcttccagcttttccgccagatgctctgctacatattccgcactgcccagggtgctgccgctgataagtgtaatgtctgccatagatcgccgatcgcccgctcaactgttcagagtggcgtattgtacgctgtgagcgagctgggatctacctgtggaaaaatgtgggattaaaaaaagcgatcagggcttgatggtgcgcatgatcgggttctgcagcacgatcagagtttcagtggactgaatttcatcgattgtttggatcttgttgataagtacctgctgcagagcatcgatggatttacacatcaccttaataaagatgctgtagtggccggtggtgtagtaagcctcggtgacctcctccagactttccaggcgggcgagggcggagggatagtctttggcgctttttaaaataatgccgatgaagcaaccgacgtcgtagcccagctgcttggggctgacgtcaatgcgcgcgccggtaatgatacccgcctgcttcatcttttcgacgcgcacgtgaatggtgcccgggctgacgctgaactgtttggccagttcggcataggcggtacgggcgttggccatcagcgcatcaagaatgccgcggtcaagattgtcgatctgataattttccatatctttttcttatgaagtttgagggttcttactattttagcgccatattttaatgaattaaaagttgatgcgcctttttattgattgattgttgtattgccgccctgttttgttgcttaatcaatggcaacaggacgcaggagtcataaaaatgaaaaccgcatatatcgcaaaacaacgccagatcagtttcgttaaatcccacttttcccgtcagctggaagagaagcttggcctgattgaagtccaggcgccaatcttaagccgcgtgggcgatgggacgcaggataacttgtccggctgcgagaaagcggttcaggtaaaagtgaaaacactgcccgacgcccagttcgaagtggttcattcgctggcgaagtggaagcgtcaaaccctgggacaacacgacttcagcgcgggcgaagggctgtacacgcacatgaaagcccttcgccccgatgaagaccgtctgacgcctatccattccgtctatgttgaccagtgggactgggagcgcgtgatgggggatgaagagcgtcacgtcggcaccctgaaggcaaccgtcgaggcgatctacgccgggatcaaagccaccgagctggcggtcagcctggagtttggcctgacgccgttcctgccggaacagatccattttgttcacagccaggagctgctgagccgctatccggagcttgatgccaaaggtcgtgagcgggctattgccaaagagctgggcgccgtcttcttaattggtatcggcggcaaactagctgatggcaagcgccacgacgtgcgtgcgccggattatgatgactggagtactgaggtttctgaaggttttgccggcctgaatggcgatatcctggtgtggaacccggtgctggaggatgcgttcgagatctcctcgatggggatccgcgttgacgccgaggcgctaaagcgccagctggcgctgaccggcgatgaagatcgcctgaaactggagtggcaccaggcgctgctgcgcggcgagatgccgcagactatcggcggcggcattggccagtctcgtttgacgatgctgttgctgcagcttgaccatatcggtcaggtgcagtgcggcgtatggccggcgcaggttcgcgaaagcgtttccgcgctgctgtaacgattagcgcagccagcgtcgcagcaggcggctacgcagcccggtgtcaaagcgccagatatgatcgaagatgcgcatgatgccgggtttgccgtgaaccgacatcgccaccgcgtgaaaacggtgctgatgcttacgctgtaactcccccacctgagcaatcacctcatccggcaaccgttgggcaataaagtcggagatcaccacggcatccgcatccacccactgcgggttttgcaaacgttcaataatggcgcgaaaacagctggccagatcggtgccgccgcgaaaacgctggctcaggaaacggatcgcctgctccagtccgctctcgctggtcaactcgtaatgcaccacttcgctggaaaacagcataatgaagcagcgacggttatcggccagcgcgatgcgcatcagggccagacaaaaggccttagcgcactgttcgttaaaaccgcccatcgatcctgacgtatcgacgcagacaatgaacggcccgcgcggttgctcatcaaaatcctgccgcgttaccgggcgttcggtaattttctcgcgccaggcatcgccgtgtagccggtaggtgagcagctgtttctccaccagcttgcgataaaattcaaactccagctccgtgatgccaagcgtcgccagctccggcggcagcaggcgtagaatgtcgtcactctgctggaggccgtcgacctgttcaggcaccgttgctggctcgcgtaccaggctgcggaaggtttccatcggcgcatctttcttcggcacggatttcgcttcccttgaacgccccagctgttccgccagctgcagcagctccggttgctggttaagaaaatcgccatagcgcacgatcagctggtagtcgcctcgtttgagttcgccggcgctcatatcccacaggcgtccggcggcggtatcattttccgccagcaccggatcgagctgaccgctgagcgtcattcgttcctggacctcactgagcaactggtcgcgctcatcgtccagcagctgctggttaaggctggtggcttgcaccaccaggctcaggcgccagcgctgtaaaaacagcgtatgcagcgccggggtaaaggtggcattgtcatccaccagcttctgcgcctgggcggcaaaaggggactggagctggtgcagtttgccgagaatttgcgggagctggacgataaactgcgaggtagagagcagctgagcctgctgataggtttgcacttcggcgtccagatccggcgggatgttaacttcttttaagcgggcgcgaacggcttcccgccagcgcggaatatccgccgcgatgatgtttttcaggcggggaaatttttcaaagaacaccgccagctgaggagaggccaacagcgccagcagcatctcctcgatcattccctcttcgctgactgccagcatgacattcagcatatcgagcgtcatggctgcttcgcctgtttaatctgcgcgccgacgtcctgcaggctggcttcgattcttcccagccattcgaccgggataaacaggcacttttgctgctcgctgaagcggttgtgttgctggtgccactcatcatccagcgcttccagctgctggcgaatttccgccggcatattctcctgcgctgcgctgccgggcagcgcgaggcgtgagccctgcaggctcacatcgcggacgaccagatgctggctggtgtcgacatccatattgagtagttgggcaaagccgatcccgttgagcttaccgcggatctcgccgcccttttccagccagttggctaacgcctcgcgttcaaaagtaatgtggatcacttccatatcgtgaagtttgagcggctgctgcagcagcagcgtcagggtggtcccctggatctccgccggcagttcatagtgcggtttgcggctaaacatcccgccaaggcgggtgaccttcagcgccgttttgtcgctttgctgttgttggatctgaatgcgtcgctgcacaatcgcccccaaccgcgtcagcatcgcctgctgttgccaggcgtgacaggtcatgagcgtttccagctgctgcgacatcaagttcatactttcgacgttgtgccacagacaatctttcagcaggataaggtcgattggcgcgatgctgtcgcggccgctgaagaaggcgctggcctgcagcaggcgaatagcctttttccagcggcgatccgagacgtagggggcatttggctgggcgtccagctgctggcggagctggaatatcagctcaaacaccgcgtccggcagtttaatattgccgatctgctgctgccattgggtaaattcctcgtcgctcacctgcagcgcgctgggcactggattgctgttttcatcctgctggctgaccagcatcgaacggaaattacctttatcctgcactttatcaagccatagacggatcagcattcggtcatacagcgcttccaggctgctgtcggcttccgggagttcgttcgacgcggccaccagcaggcgcattgggattttctcttcatgcgcgccattgcggaagtgacgttcgttaatcgccgtcagtagggtgttgaggatagccggacctgctttccatatttcatcgagaaacacgatttccgcttccggcaggtagccggcggttaaacgttcgtaacggccttcatctttcagcgcctgaatggacagtggcccaaatacctcttccggggtggagaagcgggtcatcaggtattcaaaagcgcgcgcctgctggaaggcgaatttgaggcggcgggcaatcaggcttttggcgatccccggtggaccaagcaaaaaaacgctctcgccgctgagcgccgccagcaggcagaggcgtatcgcgtggctgcgttcaaagagtcctttttcgagtgccgcgctgagccgggaaattctttcagccagtaaatgtgtttgagccataattgagttgcgtgctttgtcatgtatcgttattgggacgagtatagatgttagagccggggcggtaatagcctgaagaatcgatttattttttttgagccaggttaatatggtgtctgttaggggtacgatttcacaaataatcgtgcatactgtgcgctttttgtgggccaagggactaggcacacatttgttttataaacgaaaagactagtctatgagcactgataataaacaatcgttgccggcgttaacgctggcggccatcggcgtggtgtacggcgatatcggtaccagtccactgtataccctgcgcgaatgcctgtcaggtcagtttggctttggcgtagagcgcgatgccgtttttggctttttgtcgctgattttctggctgttaatctttaccgtatcgattaaatacatcaccttcgtgatgcgggcggataacgccggggaaggcgggatcttaacgctgatgtcgctggccggacgtaatacttcggccagaatgacctccgtgctggtgatcctcggccttatcggcggcagtttcttctatggcgaagtggtgattaccccggcgatttcggtaatgtcggcgatagaggggttagaaattatcgccccgcagctcgatacctggattgtccctatctccattatcgtgctcaccctgctgtttgtgatccagaagcacgggactggcatggtcggcaagctgtttgcgccgattatgctgatctggttcctgttgctggcggtgctgggcgcgcgaagcatttacgctaatccggaagttctgcaggcgctgaacccctactgggctgtgcacttcttcctgcaatacaagaccgtttcctttattgcgcttggcgcggtggtgctgtcgattaccggggtggaagcgctgtacgccgatatgggccacttcggcaaactgccgatccgcgtcgcctggttctccgtcgtgctgccctcgttggtgctgaactattttggccagggcgcgctgctgctgaagcacccggaagcgattaaaaacccgttcttcctgctggcgcctgagtgggcgctgatcccgatgctgattatcgccacgctggcgacggttatcgcctcccaggcagtgatttccggggtcttctccctgacccgtcaggcagtgcgtctgggctatctgtcgccgatgcgcattatccatacctcggaaatggagtccgggcagatttacattccgttcattaactggctgctgtacgtttctgtggtcatcgttatcgtcagctttgagcattcgtctaacctggcggcggcgtatggtatcgccgtaacgggcaccatggtgctgacctccattctgtcggcgaccgtggcgcgcaaaaactggcactggaacaagctgtttgtcggtctgatgctggtggccttcctgtgcattgatattccgctgttctcggcgaacctcgataagattgtctccggcggctggctaccgttgtccctggggatggtgatgtttacggtgatgacgacctggaagagcgagcgtttccgcctgctgcgccggatgcacgagcatggcaactcgctggaagcgatgatctcttcgctggagaagtcaccgccagtgcgtgtgccgggtactgcggtgtatatgtcccgcgccctgaacgtgatcccgtttgccctgctgcataacctgaagcacaacaaggtgctgcatgagcgagtgatcctcctgaccctgcgtaccgaagatgcgccttacgtgcataacgttcgccgggtgcagattgagcagctgtcaccgtccttctggcgggtggtggccagctacggctggcgggaaacgcctaacgttgaagaggtgttccaccgctgtggcctggaaggactcagctgccggatgatggagacctcgttctttatgtcgcatgagtcgctgattatcggtaaacggccatggtatctgcgcctgcgcggcaagctttatctgctgctgcagcgtaacgccctgcgggcgccggatcagtttgagatcccgccaaaccgggttatcgagctcggtacccaggtcgaaatctgatgtcaaaaaagcccttccattgcgaagggctttttgtttctcactccggttgttatgtcctgtcgctgcctcgcgaaacgtttcgatggcgatcacatttctctcttctggtgatggttttctgctcacacattgataataattattttagcgaaacgtttcgctagtggagcaaaagagaaaaaatgaaaaaaggcaccgtacttaacgctgatatttccgcggtcatttcccgcctgggccacaccgatacgctggtggtctgcgatgccggattaccggttccccgcagcagcacgcgcattgatatggcgctgactcagggcgtaccttcatttatgcaggtgctggaagtggtgacgacggaaatgcaggttgaagcggctgtcatcgcggaagagattaaaacccataatccgcagctccacgcgacgttgctcactcacctcgagcagctgcagcagcaccagggaaataccattgaaattcgttacaccagccatgagcagttcaaaaaacaaaccgcagacagtcaggcggtaattcgcagcggggagtgttccccgtttgcgaatatcattctctgtgccggcgtcacgttctgaggtcgccgtcatggaagccttattgcaactgaaagggatcgacaaagcgttccctggcgtcaaggcgctctccggcgcggcgctgaatgtctatgctggccgggtgatggcgctggtaggggaaaatggcgccggcaagtccactatgatgaaggtgttgaccgggatctacacccgtgatgccggctctttgctgtggttaggcaaagagacgacctttaacggcccaaaatcctcccaggaagctgggatcggcattatccatcaggaactgaacctgatccctcagttgacgatcgccgagaacatcttccttggccgcgagttcgttaaccgttttggcaaaatcgactggaagcagatgtatgccgaagccgacaagctgttggcaaagctgaatctccgctttaccagccagaaactggtgggcgatctatcgattggcgatcagcaaatggtggagatcgccaaagtgctgagcttcgaatcgaaagtcatcattatggatgaaccgaccgatgcgctgaccgataccgaaaccgaatcgctgttccgcgtcatccgcgaactgaagtcgcaggggcgcggtatcgtctatatctcccaccgtatgaaagagatcttcgagatttgcgacgacgtgacggtctttcgtgacgggcagtttatcgccgagcgcgaggtctcgtcgctggatgaggaccgacttatcgagatgatggtcggccgtaagctggaagaccaatatccacacctcgataaggcgcccggcgcggtgcgcctgaaggtcgacaacctctgcggcccgggggtggataacgtgacctttaccctgcgccagggggagatcctcggcgttgccgggctgatgggcgccgggcggaccgaactgatgaaagtgctgtacggcgcgctgccgcgcagcagcggttccgtgacgctcgatggccgcgaagtggtgacccgttcgccgcaggatggtctggcgaacggcattgtctatatctccgaagaccgtaagcgcgatggtctggttctcgggatgtcggtaaaagaaaacatgtccctgacggcgttgcgctatttcagccgggcgggcggtagtcttaagcataaagatgaacagcaggcggtgagtgatttcatccgcctgtttaacgtgaagacgccttcaatggagcaggcgatcggcctgctctccggcggcaaccagcaaaaggtcgccatcgcccgcgggctgatgacccggccgaaggtgctgatcctcgatgaaccgacccgcggcgtcgacgtcggggcgaagaaagagatctaccagctcatcaaccagttcaaagccgacggcctgagcatcattctggtctcctccgagatgccggaagtgttgggcatgagcgatcgcatcatagtgatgcatgaagggcatctcggcggtgaattcacacgcgagcaggccacccaggaagtattgatggctgccgctgtgggcaagcttaaccgtgtgaatcaggagtaagaaagatgacaacccaggctgtttctggtcgccgctatttcacaaaagcgtggctgatggagcaaaaatcgctgattgccctgctggtgctgatcgcggtggtatcgaccatgagccccaacttttttaccgtcaataacctgttcaatattctgcagcaaacctccgttaacgccattatggcggtagggatgacgctggtcatactgacctcggggatcgatctgtccgtcggctccctgctggcgctcaccggtgcggtggcagcgtcgatcgttggcattgaggttaatgcgctggtggcggtcgcggctgccctcgcattaggtgcggcgatcggcgcagtcaccggggtgattgtagcgagaggccgcgtgcaggccttcatcgccaccctggtgatgatgctgctgctgcgcggcgtaaccatggtgtacaccaacggcagcccgatcaataccggctttagcgataatgccgatctgtttggctggtttggcatcgggcgtccgctggggatcccgacgccggtatggatcatggcgattgtcttcctggcggcctggtacatgctgcaccatactcgcctgggccgttatatttatgccctgggcggtaatgaagcggcgacgcgtctgtccgggattagcgtcaataaagttaaaattatcgtttacgccttgtgcggaatgctggcttcgctggccgggatcatcgaagtggcgcgtctctcctccgcgcagccgacagcggggacgggctatgagctggacgccattgcggcggtggtgctcggcggcaccagcctcgctggtggcaaaggacgcattgtcggcacgctgattggtgcgctgatccttggcttcctgaataatggtcttaatcttttaggcgtttcttcctattaccagatgatcgttaaagcggtggtgattttgctggcggtactggtagataacaaaaagcagtaactgagaactctacaggacatcttaactatgaatatgaaaaaactggcgaccctggtctctgctgttgcgctaagtgcgaccgttagcgcgaacgcgatggccaaagacaccatcgctctggttatctctaccctcaacaacccgttcttcgtgtcgctgaaagacggcgcgcaaaaagaagctgacaagctgggctacaacctggtggtgctggattcccagaacaacccggcgaaagagctggcgaacgtccaggatttaacggtgcgcggcaccaagctgctgctgatcaaccccaccgactctgatgccgtcggcaacgccgtgaagatggcgaaccaggcgaaaatcccggtcatcactctcgaccgtcaggcgacaaaaggcgatgttgtgagccatatcgcctctgacaacgtgcagggtgggaaaatggctggcgattacatcgcgaaaaaagtgggtgaaagtgcaaaagtcattgagctgcagggcattgccggaacttctgcggctcgcgagcgtggcgaaggctttaaacaggccgtggcggcgcacaaattcaacgtcctggccagccagccggccgatttcgaccgcaccaaaggcctgaacgtgatgcagaacctgctgaccgcacatcctgacgtccaggcagtgttcgcgcaaaatgatgaaatggcgctgggcgccctgcgcgcgctgcagaccgcaggcaagtccgatgtgatggtggttggatttgacggcactccggatggcgaaaaagcagtaaacagtggcaaactggcggcgaccgtcgcacagttgccggagcagatcggcgcgaaaggcgttgagactgctgataaggtactgaagggcgaaaaagtggaagctaactacccggttgagctgaagctggtcgttaagcagtaatatgcgattcggactggcaacggtccgagggacaatataaaaaaagaaaagcagggcatgcgccaccggatcccggtggcgcgctttcccgggaacagaaatgatgaaaactgcaggcaaacttgtcgtccttggcagtatcaatgccgatcacattcttaaccttgacgctttcccgacgccgggcgaaaccgtcaccggccaccattatcaggtggcgttcggtggaaaaggggccaaccaggcggtggccgccgggcgcagcggagcggatatcgcgtttatcgcctgcaccggcgatgacgatatcggtgaacgcatccgtcgtcagctggcgagcgataaaatcgacgtggcgcccgtgcgcgcggttgccggggaagcgaccggggtggcgttaattttcgttaacgccgaaggtgagaatgtcatcggtattcatgccggcgccaatgcggcgctttccgtctcccaggttgaggcggaaaaagagcgtatcgccagcgcacaggcgttgttgatgcagctggagtcgccgctggagagcgtcatagcggcggcgaaaatcgcccatcaccatcacaccaccgtggtgctgaaccccgcgccagcgcgtgaactaccggatgaactgctggcgctggtggatattattacccctaacgaaaccgaagcggaaaagctgaccggtattcgcgttgagagtgacgaagatgcggcaaaagccgccgacgtgctgcatgccaaaggcattggtacggtgatgatcaccctcggcagccgcggcgtctggctcagtgccgaaggcgaaagccgccggatcccagggtttcgcgtacaggccattgatactatcgcggccggtgatacctttaacggcgcgctggtgaccgcgctgctggaagggaccgccctgccggaggcgattcgctttgcgcatgccgcagcggcgatcgccgtaacccgcaaaggcgctcagccgtccgtgccttggcgcacagagatcgatgaatttttagcgcaacaggggtaatgcttggctacgatgaaagatgtggcccgcatcgcgggcgtttccacatcgacggtgtcacacgtcatcaataaggaccgctttgtcagcgaggcgattaccgccaaagttgacgctgcgatcaaaagcctcaactacgccccctctgcgctggcgcgtagcctcaagctcaatcaaacccgtaccatcggcatgctgatcaccgccagtaccaatccgttttattcggagctggtgcggggcgtggagcgtagctgctttgagcggggttatagcctcgtgctctgcaataccgaaggtgatgagcagcgaatgaatcgtaatctggagacgctaatgcaaaaacgcgtcgatggattactcctgctgtgcacggagacccatcagccctccccggaaatcatgcagcgctatccgtcggtaccgacggttatgatggactgggccccctttgatggcgatagcgatctgattcaggataactcgctgctcggcggcgatatggcgacccagtatctgattgaccaggggcattcacgcattgcctgtattgccggcccgctggataaaaccccggcgcgcctgcgtcttgaaggctatcatgccgcgatggcgcgctgcggcctgccggttgccgaaggatacgtggtgaccagtgattttgagtttggcggcgggtttagcgcgatgcagcagctgctggcgttgccgcagcgtccgcaggcggtgtttgtcggtaacgatgcgatggcggttggcgcttatcaggcgttataccaggccgggctgcagattccgcaggatatggcgctggtgggctacgatgatattgagctggcacgttatatgacgccgccattgaccaccattcaccagccaaaggatgagctgggggaactggccatcgacgtactgatccatcgcatggccgatccgcagcaaaaacagcagcgcgttcagttaacgccggagctggtggttcgcggttccgcttagcgtttatgccgctcgctaatcaggttgcggccatccttcgctcttaacagcataaacatcagcgccgatataatggttatcacgcccatggttataaaggtgtagtgaaactgctgtaccgtgcttgcattatcaaaaccttcatagaagcgtagcaccgcagcgctgatggccaccccgagactaattgaaagctgctgggtgacggccagcaggctgttgccgctgctggcattatcatcggtcagatcggccagggtaatggtattcatggcggtaaactgcgtggacatcgccatccccagcacgaacagcggcagaagaagcatccacagcggcatctctggcgactgcagcgagaactgggcgatcataaggccaataaacacggtgatccccaccagggtcttacgatagccaaaccagcgcagcacctgggtaacggtggatttcgcaataatcgagccgatagcggtgggggcgatcatacagccggcgataatggccggatagccgaaaccaacctgtagcatcagcggcatcagaaacggtacgcagccggtacccaaccgcgtggcgaggttgccggcaatgccgaccgagaacgtatgggtcttaaataaagagagcgagataagcggcgtcggatggcgacgcgcgtgacgcacataggccacgagcagtaacagactgacggcaatcacggccagcgcctgccatgtcgccacgattttttccccaaacagttcaataccgctggaaaataacaccagacttaagccaaataacagaaaaccgcctatatcgaagcgtcggcgcggcgttgtgaaatttggcatgtatttacgggcgtacagaatgccaattacgccgatcggaatgtttatcaggaaaatccaatgccagctggcccaggtcacaaataccccgccgagtaccgggcccagaatcggccccaccaatcccggcatggtgacaaagttcaggaccggcaacagttcgctgcgggggtaggcacgcagcagggccagcctcgccaccggcatcatcatcgccccaccgatcccctgaattacgcgaaaaatgaccagttccgttaaggaactggagagggcgcaggcgagggaaccgagggtgaacaggctaacggcgatgataaagacccggcgcgtgccgaagcgatcggccagccagccgctgaccgggatcagcatcgccaccgtcagcgtatagctgataatggccgactgcatcgctaagggagaacgattaagactgtgggcgatagccgggagggcggtgttaagaatggtggcatccagcgcctgcataaagaaggccatcgccgcgatccacggcaggccagccatgctgcgccctttttttccgctcatgccaaatccttgttattgatttacgtggtgtggggcgttcaacaatgcctggcaggcgagcaacgcccccggcgcatcactgttaagaatggcatcgacaatcgcctggtggagatcgagcttcaccacttcattttgcgtaatcgacgtgaagtaggtgtggtagaccgaatgaaacagcgaggcgaaagagctgaggaaaggattaccgctcatttcatagatatgctcatgccaggccatatcgacttctatccagcgttcgcgctgaaaatggcgtttcagagcaatcatctcttccattaatgtattgagctgcgctttttgcccggcggtgccgttggcggcggcgagaaagcaggcctgtggctccaggctgctgcgcatgacgagaaagtggcttaccacctcttcgaagttatcttctgttagccaccaggagagcagttccttatcaaggaaattccagctgctgcgcggcatcacccgggtgccaatgcgagggcggggcagcagcatgccttttgcagtaagcgtcttcaccgcttcgcggacggcggtacggcttacgccgaactgctcccccaactccatttcgccgggaagaatgctttccggctgatattcgccagtcagtattttttgggcgagcttttcggccagtacccaggaaatgttcttttgtgccgccagttgctgtgcgcttaaagacataaatgccgttcctttctttcctctactctaacagtatgccaccaggcgccccgtttcgtcggttaaaacggcaaaacggcggttttttgcgacattcctcgccgcattgttgaaaaaagagacggttgaaaactttttttgcatttccccttgtcacctcagaattactccctataatgcgcctccactgacacggaacaacggcaaacaagccgccgggtcagcggggttccggtgagaacctcgcagagaaaagcaaaaataaatgcttgactctgcagcgggaaagcgtaatatgcacaccccgcgccgcagcgaaaacgaagcggcactgctctttaacaatttatcagacaatctgtgtgggcactcaaagtgacatggattcttaacgtcctcggacgaaaaatgaataccaagtctcaagagtgaacacgtaattcattacgaagtttaattctttgagcatcaaacttaaattgaagagtttgatcatggctcagattgaacgctggcggcaggccta

SEQ ID NO: 71 - DNA, 99448 bp, Unknown
  source: /note="Description of Unknown: MKP2_coc_1 Mutant Bacteria sequence"
ggccagcgtgccggcatgcctccccggtggcgctgcgcttaccggggctacggatccgacacggggctacgtccctgtggccggacaaggtgcgcagcaccgcctccgggaaaatccctcctatatcaccgtcgataaatgactattgcctctctaaccaactcacaataaatgtcgcgatctgtggtacattatttaaatccagcagcggaagtgaggtcgcgatcgatacatcgctggccacggcgatggtatgctcatcaattaccagctcttctacacgatggccgctgttttgccgaaaaagcaggatcttcggcacgggttcatgtttgaacccctccactaaaaccaggtccagtttgctggcatccattcgactgaccagccacgtgagatctaattccggcttctctggcgtctcggtcatcaatgcccaccgctgttcgctggcgacaatagtttgcgcagcgcccgccttacgcagttcatagctatctttgcccggcttatccacgtccatatcatgatgggtgtgctttatcagtcccgggcgtaatcctagagcgcaaagctcagggataagacgctttaataatgttgtttttccggtaccgctccatgcggcgatcgccagtaatgggatcatgatggctcctgcatctgctgcaaatcttcgagcgtatttacattaatgaaagcagttttcacatcgctgaaattcaccgggcgcccacccatttgtcgcataaaaaccatcaccctgcgctctccatgtgccagataagcctccagttccggaatgatttgacgatgaactaatgcaacggcaggatgatcccgttcgccgtcatgggcccaaacgaccggtgcgtcccctctctgctggataaagcgctccaccaaaaaggacggaatgaacggcgtgtcgcaggggcaaaaaacaaaccatgggctcgcgacctgctgcatcacagcaagcattccggccagcggcccctgataaccctcctgtatgtctcgaaagaccggatatccgctggcacgccactgttcaagatgacgattggcgctaatgactaactcatctacctgcggggctaatgcttccgcgacgtgtcgccagagagggcgaccatttagcgcctgtaatcctttatcaatgccgcccatccgcgtggccctgccgcccgccagcacgacgccggttatcgcctcgctttgcatatgaatatcgcctctttcattgtgggattgaccctgttaacttgtccctatcaagagtaaggagcatgaccatgaaatgtaaacgtctgaatgaagtaattgaactcctccagccagcctggcaaaaagagcctgaactgaacctgatgcaatttttgcagaagctggcgaaagaggccggctatgatggcgaactgagcgatctttccgacgatattctgatctatcacctgaagatgcgcgactcttccaaagatgctgtcatcccgggtattcagaaggattatgaagaggactttaaaaccgcgctgctgcgcgcccgcggggtaataaaagagtaaaaggttgtaagcgctaccgcgtaaagtgcaatgagatgatatcctgaactattcgtacgattatcggatgtcaggatgcacgataaggcttttacttttcagacgcttcgcccggataccattatcgatgggttattcgatctgggtatgcgggtggactccggtctcaccccgctaaacagctatgagaaccgcgtttatcagttccaggacgaagagcgccatcgctatgtggtaaagttctatcgtcctgagcgctggtccgcagaacagatccttgaagaacaccagtttgcgcttcagcttgtagaagatgaagtgcccgttgctgcgccgctcttatttaatgacagcacgcttcatcagcatcagggattctactttgccgttttcccaagccttggcggtcgtcagttcgaagcggataaccttgatcagatggaatgggttggccgctacctggggcgcctgcaccagactggccgcaaacagcgctttactgcccgcccggaaattggcgtgcaggagtacctgctggaaccgcgtcaggtgtttgagcaggcgacgctgatcccctctggcctgaaggccgatttcctgaaggcgaccgataaactcattgctgccgtcatggagcaatggcacggccgcgggaacacgttgcgcctgcacggtgactgccatgccggtaatatcctctggcgcgacggaccactgtttgtcgacttagacgatgcgcgtaccggcccggcgattcaggatctgtggatgctgctcaacggcgataaggctgaacagcgtatgcagctggagactattgtcgaggcctatgaggaattcagcccctttaacagcgatgaaatcgcgctgattgaacctttacgcgctatgcgactggtttattatctggcgtggttgctcagacgctgggacgatcccgctttcccggtcaatttcccctggttaaccggggaggattactggtgggggcagacgtcgacttttcttgagcaggtgaaggttctacaggaacccccgcttcagttaacgccaatgtattaatgtgatatatccaggagagagtaaatcatgaaaaaagtttggctggcgctggctggtatgattctggcttttagtgcatccgctgcccagatcaccgacggcaagcagtacatcacccttgataagccgattgctggcgagccgcaggtgctcgagttcttttcgttctactgcccgcactgctaccagtttgaagaagtgctgcatgtctctgacaatgtgcgccagaaactgccggaaggcactaaaatgaccaaataccacgttgagttcctgggtccgctgggcaaggatctgacgcaggcatgggcggtggccatcgcgctgggcgttgaagacaaaattactgcgccgatgttcgaagccgtgcagaaaaaccagactgtgcagagtgtggctgacattcgtaaagtgtttgtcgacgctggcgtgaaaggggaagactacgatgccgcatggaatagcttcgtggtgaaatctctggtcgctcagcaagagaaagcggcagccgatctgcagctgcagggcgtaccggctatgtatgttaatggtaaataccagctgaatccgcaggggatggacaccagcaatatggatgtcttcgtcgctcagtatgcggataccgtgaagcaactggtagagaagaaataaaaaaaacgccggtcactgaccggcgttactttatctgttttgcaatagctaccgttctttgtccctcatgatgtcagtcaactgacggtctttctcttcccataggccattcagccagcgctggaagccgcgcttaaagttcttatcgttaacgtaatcgccgtgcagctcttcgccaatagggaccagattgatacggaccacaatgcgcgtcaggcggccgcttaacatatcgtaaaatggtcttgtatgattatccgggtagcacagcgtgacgttcagcagtttatcgaactgcgaaccgagtacgttgagcgccatggcgataccagcggctttcggcggtaacaggttgtggtaaggagagcgcgtttcgcgctttttttcttcggtaaaacgtgagccttccacaaaattgacgatagtcgtcggatgcgcgcgaaatttttcacacgaacggcgggtggtttcgacatctttaccgcggcgctccgggtgacgaataagatagctgcgcgagtagcggcgcataaaaggcatatccagcgcccagcaggcgaggccaatgaagggtacccacgccagctgttgtttaaggaagtacttattcatcggaatatgcttgcggaacagcacgcacagcaccacgatgtctgcccagctgtggtggttgctgatcagcagataccagttctttttgttcaggccttccagaccctggacgtcccattttagccagggattgagatgcaacagcagcgccagcccttcgcaccagcagtacatcataaaattgcaaaaaacggatatagagcgccataccgctggaatggggaccagcagtttaatcagcccggcgacgatgatcggtacagagcagataatggtgactaagatggttaaggcgatactcagcggaagtgttatcgcagcgagtaatctcgacatagttagtttattcagaaagttaggctgacaaagagcgcctttaagctgcgcaagaggctgattttaccagaaaacgcggcaaatgacgggtcttaccagaacagaaaaaaacaaggatcttctatccacatggaagattaggtcatcaaattaatgccaggatcgttgatctgtttttaagtggttgataaatagtaaataatactatttattcatttattttcaggggcggataagctgacgttgtaaaactatgcacaaagttatccacaagctaagttgtcgcgcgatcgcgacgatcgttgaatcttttccgcgaattgcgggaaaaattcaggatttcatgcccgtctgtggcatcctttatccataatctgataaacaggcacggaaattatggttcagatcccagaaaaccctctcatcctcgttgacggctcctcctatctttatcgggcgtatcatgcgtttccgccgctgactaacagcgcaggggagcccaccggggctatgtacggcgtactgaatatgctgcgcagtttgatactgcagtatcaaccgactcatgccgtcgtggtctttgatgcgaaagggaaaaccttccgtgatgaattgttcgagcattacaaatctcaccgcccgccgatgccggacgatctgcgcgcgcagattgagccgttgcataagatggtgaaagcgatggggctgccgctgatggctgtcccgggcgtcgaagctgacgatgtgattggcaccctggcgcgggaagcggaaagggcaggtcgcccagtcctgatcagcaccggcgataaagacatggcccagctggtgacgccgggcatcaccctgatcaataccatgaccaacactatcctcggaccggatgaggtggttactaagtacggcgtcccgccggagctgattattgatttcctggcgctgatgggcgactcctcggataacattcccggcgtgccgggcgtgggcgaaaagaccgcccaggcgctgctgcaaggcctcggcggccttgatacgctgtatgcggaaccggagaagatcgctgaactgagcttccgcggcgcgaaaacgatggcggcgaagctcgagcagaacaaggacgtggcttatctctcttatcagctggcgaccatcaaaaccgacgtcgagctggagctcacctgcgaagagctggaggtgcagccgccggcggcagacgatctgctggcgctgttcagacagtatgaatttaagcgctggaccaccgacgttgaggccggaaaatggctgcaggctaaggggggcaaaccggctgcgaaacctgcagtgcctgcagcagcggcagaagcggaagaagaggttgaagccgctactgcactttcagcagagcattatgtcactatccttgatgaggctacgctgctcacctggatcgataagctgaagcaggcgccgctctttgcctttgatacggaaaccgacagcctggataacatctccgccaacatggttggtctttcattcgctgttgagccgggcgtggccgcctatgtcccggtagcgcatgattaccttgatgcgccggatcagatcccgcgcgagcgcgtgctgacgctgcttaaaccgctgctggaggatgagaaggtgctcaaggtcgggcaaaatctcaaatacgatcgcggcattttggctaattacgacattgagctgcgcgggattgcgttcgataccatgctcgagtcttacattctcgacagcgtggcgggccgccacgatatggacagtctttccgaccgctggctgaaacataaaaccattaccttcgaagagatcgctggcaagggtaagaatcagctcacctttaaccagattgcgctggaagaggctggtcgctacgcggcggaagatgccgacgttacgctccagctgcatctgaagatgtggccgaagctacagcagcatgaaggcccgctgaatatcttccagcacattgaaatgccgctggtgccggtgctgtctcgcgttgagcgcaacggcgttaaaatcgaccccgccgtgctgcatgcgcactcgcaggaaattgcccagcgtctggttgagctggagcagcgggcacatgagatcgccggggaagcgtttaatctctcctccaccaaacagctgcaaacgatcctgtttgaaaaacagggtatcaagccgctgaagaagacgccgggcggtgcgccgtccacctctgaagaggtgctggaagagctggcgctcgattatccgttgccgaaagtgattctggagtatcgtgggctggcgaagctgaagtcgacctataccgataagctgccgctgatgattaaccccaaaacgggccgcgtgcatacctcctatcatcaggcggtcaccgccaccggccgtttgtcgtctaccgatccaaacctgcaaaacattccggtgcgtaacgaagaagggcgccgtattcgccaggcgtttatcgcgccggaagattacgtcattgtctcggcggactactcgcaaatcgagctgcgcattatggcgcacctgtcgcgggataaaggcctgctgaccgccttcgcggaagggaaggatattcaccgggcgacggcggctgaagtatttggcttaccgctggacagcgtcagcagcgaacagcggcgcagtgcgaaagccatcaacttcggtctgatctacggcatgagcgcctttggcctggcccgccagctgaacatcccgcgtaaagaagcgcagaagtacatggatctttatttcgaacgttatccgggcgtcctggagtatatggagcgcacccgcgcacaggcgaaggagcaagggtatgttgaaacgctggatggccgtcgactctatttgccggatatcaagtccagcaatggcgctcgtcgtgccggcgcggagcgtgcggcgattaacgccccgatgcaggggacggctgcggatattatcaagcgggcgatgattgccgttgatgaatggctgcggagcgagaaacctcgcgtgcggatgatcatgcaggttcacgatgaactggtctttgaagtgcataaggatgagctcgatgccgtatcgaaaaagatccacgaactgatggagaacagcactacgctggcggtaccgttgctggtggaagtgggcagcggcgaaaactgggatcaagcgcactaagtatacaaagcgcaacgcgattttctgtaagtaagcaacataacttatagagttttgtgaggatcatttgaatttgctatgtaaatagtgaaaaaaaactacaaaaaatgctttatccgtgagcgaaagaagagtaaagttattcgcgtagggtacagaggtaagatgttctatctttcagaccttttacttcacgtaatcggatttggctgaatattttagccgccccggtcatttatgaccggggcgttttttattgcgcgaaagaaaagttttacgctgtgaaaacaacgtagtatgaacgtccggatagggcgctacgcgccgttatccggaaaaagcgggggttactcggcgtcttcgacggcttcttgcggcgggatttcgttaaaccagctatccagcttctgtcgcagcttatcgacgccagattttttcagcgaagagaagggttcaacctggacatcgccattgaaggccagtaccgcttcacgcaccatattcacttgcgctttacgcgcgccgctggcgagcttatcggctttggtgagcagtaccagcacctgaatatcgctctctaccgcccattcgatcatctgttgatcgagatctttaagcggatgacgtatgtccatcagcaccacgagacccttcaggcacagacgtttttccaggtattcccccagcgcgcgctgccacttgatcttcatctcttcgggtacttgcgcataaccatagccgggcaggtcgacaaggcgcttgccctcagcgacttcgaacaggttaatcagctgcgtacgccccggggttttggaggtacgcgccaggttcttctgattagtcagcgtattcagcgcgctggattttcccgcgttggagcggccggcgaacgccacttcaataccggtatcggcaggaagatggcggatatctggcgcgctagtgacaaagtgcgtcagttgataattccagttggtcaagacggtcgtctccgttaaaacaggctatggcagggattatacctgaacagcagaaaaaggctgtttttaccgcacgccgttcctgtaagtaaaaaccatatggtttgtgagacattgactattctttgtataggacatacctgaggaaaataagacaaaacatatttaaaatattgaaaattaatcaattatagaaatagagaattctgaaaatagatttttaactgccagactggttgtcgatttttgtcaacaaggtaaagtaatacacaacggcggggatgctgaaaggattaggactcaggacgaggagtcaggaagcgccaggaggcgaagaccacaggatagtcaggatgacgcgcgtcttggagacgttttacagggaaaaggaagaaacagggaccgttggacgctaagggaaagacagggtgagtcgttagcgaacagggaaagaagagcccgttaagggtggtcagtgaggaaaaaggcgacagagtaatctgtcgccttttttctttgcttgctttctgctagattccgcctcaattctatactgaatactactgtctgaagattacacatcatgaaaaaaccgacatccgccacccgtggcaaatccggccgcaagtcgcgtgaagagttaaatcaggaagctcgcgatcgcaaacggcagaagaaacatcgtggccacgcggcaggcagtcgcgcgaacggcggcgatgcggcttcagcgggtaaaaaacagcgtcaggcgcaagatccgcgcgtgggtagcaaaaaaccgatcccgctgggcgtgagcgaaagccgcgctccagcccccaagcagcataaaccaaagagcgagaaacctatgctttcaccgcaggctgagctggagttgctggagaatgatgagcgcctggacgcgctgctggaacgtctggaagagggcggcacccttaatgctgaagagcagagctgggtggacgccaaactggatcgcattgatgagctgatgcagcagctcggcctctcttacgatgatgaagatgaagaagaggaagagcgtcaggaagatatgatgcgtctgctgaagggtggaaactaacatttgcatcccatcggattcccggtactccttataacccttctggttatatgttatctgctgtggttattcgttaaactacgacggttgtcgcggcgtcagaaatggctgcgcaaccggctcatgacccgcggtgcggtggggccgggacggcgtacccgtcggcggcaccatcggaaggagtgagcatgtctgagcagataatcgactgggatctggccctgatccagaaatataactattccgggccgcgctatacctcgtatcccaccgcgctggagttttcaccgcaatttggcgcggcggaattcgatgccgctgtggcccgttacccacagcggcccctgtcgctgtacgtgcatatcccgttttgccataagctgtgttatttctgcggctgcaataagatagtcacccgccagcagcataaggccgatcaatatctcgatgtccttgaacaggagatcatccaccgcgcgccgctgtttgccactcgccaggtgaagcaactgcactgggggggcggcacgccaacttatctcaataaggcgcaaatcagtcgcctgatggatctattgcgcagccatttccatttcagcgcggaagccgagatctccatagaggtcgatccgcgtgagatcgaactggatgtcctcgatcatttacgcgctgagggtttcaaccgcctgagtatgggcgtacaggacttcaataaagaggttcagcgtctggttaaccgtgagcaggacgaagcgttcatctttgatttgctcaaccatgcgcgggagattggttttacctcgaccaatatcgacctcatttatggcctgccgaagcaaacgccggagagcttcgcctttaccctgcaaaaggtcgccgagctcaatcctgaccgcctgagcgtgtttaactatgcgcatctgcccacgctctttgccgctcagcggaagattaaagatgccgatctgccctccgctgagcagaagctggagatcctgcaggaaaccatcggctcgctgacgacggcaggctatcagtttatcggcatggaccatttcgcccgtcccgatgatgaattagcggtcgcgcaacgtcacggcgtactgcatcgtaatttccagggctacaccactcagggcgataccgatctgctggggatgggcgtttcggcgatcagcatgattggcgacagctacgcccagaaccaaaaagagctcaagcagtactaccagcaggtagcagagcaagggaacgccctgtggcgcgggatcgcgttaactcgcgatgactgtctgcgtcgcgacgtgattaaagcgttgatctgtaacttccagctggatatcgcggcggtcgaggcgcagtgggacgtggattttgcgtcttatttcgccgaggatctgaagctgctggcgccgctggcgcatgacgggctggtggctgtggatgataaggtcattcaggtgacggcgaaaggccgcctgctgatccgcaacatctgtatgtgctttgatgcctacctacggcaaaaggcccgaatgcagcagttctcacgggttatttaatgttttccccctctcccgcaggagagggggaacaattagctgaacagcccgaccagcgcagcgcacagcaaggcagcgactgccgtttgtggcgtgtgactcgcagcggcgccgctcgatatcatactcaccagtgattcaaacatgatgctctcccctaatgccggggacgatcatactcaactcatcggaacagtaaagtacaaaatagcagcactttgcgccgatcggctatttttcatcatgctgttgtaccctactccatacccaattcttttagcttacgcgtcagggtattacgtccccatcccagcaggcgcgcagcctcctgcttgtgcccctgagtatggcgcagggcggtcgttagaagcgtgcgctccatttcgggttgcgcttctgagagcaggttttgatgaccggatcgcaacgcccgatcggcccactgacccagcagcgtagcccagctgtcaggctgcatctgcgttgggctatcaggaatcgtggtctcaaacagttcgctcggcagatcctgcgtcagcacctcctggccggcggccatgacggtgagccagcgacaggtgttttccagctgacggacgttgcctggccacgccaggcgggtcagcgctgtctccgtttccggatgcagctgtttggcttcaacgccgagctcgcgggcggctatctgcaggaaatggcgggccaggcgtggaatatcttcccggcgctcgcgcagcggcggtaaatgcacccggatgacgttcaggcggtggaacaaatcttcacgaaatttcccctcctgcacgcgctgttccaggttctggtgggtagcggcgatgatccgcacatcgaccttgaccggcgcgtaaccgcccacgcgataaaactgaccatccgccagcacgcgcagcagacgagtctggacatcaagcggcatatcgccaatttcatccaggaacagcgtaccgccgtcagcctgttcaaagcgaccctgacggacggtattggcgccggtaaaggctcctttttcatggccgaacagctcggactcaatcaggtccttggggatcgccgccatattcagcgcgataaacggcgcttttgagcgtggactatggcgatgcagggcatgtgcgacaagttctttaccggtaccggattcgccattgatcagcacgctgatggatgagcgcgacaggcggccaataatgcgaaagacatcctgcatagctggcgcttcgccgatgatgtcggcggttgggctacttatcggcgcatttcgcggctgctgctgctcttgatagtggcttatcgcccggtcgacgagggcgacggcttcatcgatatcaaaaggtttgggcaaataatcaaacgcgccctgctgataagcgctgaccgcggcgtccagatcggaatgcgcggtcattatgatgaccggaagcattggatggcgctgcttaatctgtttgagcagcgccagaccatccattcccggcatacggatatctgacagcagtacatccggggttttggtggtgagggcatctagcacctcattgccgctttcgaacgttgtgcagctcaagccggctccggtgagcgcgcgttcaagcacccagcggatggagctatcgtcatcaacgatccaggctatccctcgttgcataaacacctctacttccgaataggcaggtataccgaaaattcggtatgacccggccagctggtgaattcaattttgccggagtgctgatcgataaggctacgggcgatagataagcccaggccggtaccgccttcgcggccgctgaccatcggatagaacagcgtatcctggagatggggcggaatacccgggccattatcttcaacgtcgatgcgggcggcgaggcgataacgcaccccgtgcagcgtcagctggaaagcggtgcgggtgcgaagaataatttcgcccccttccggccccagcgcctgcagcgcattacggacgatgttcagcaacacctgttcaatttgatccgggtcgtggggtagctctggtaggctggggtcgtaatcgcggatcaacttcacgttgtccggcaactccatggaaaccagtttaactacccgttcggcgactttgtggatgctttcggtaacgtgcatgcccggatgctgtggtccgagcaggcggtcgaccagatttcttagccggtcggcctgctcaatgatcactttggtatattccgttagcgccggatcgggcagcgctttgctgagcagctgggccgcgccgcgcaggccgcctaacgggttttttatctcatgcgccaggccgcggacgaggtcgcgagcggcgacctgctgcgcatgctgcagctgctcctggctcaggcggcgctgattatccatcggcgccatttccagcagaataaagccttccggcagccgctgggcggtcaacgacaggatgtgcgaacggccatcgataaccaacgtcacttcgttatcggtaaacccctggcccgcctgcagactctcctgcatcagcccgatattcaacgaaaaatagctcaacagttcaggtaatggggtgccaaacagtttgcgcgagctctgcgccagcagctgctgcgccgcagggttggcaaagtgcaccgccaggtcatcatcgaccagtaaaatactgttgataagggagttaaggatctgcccagcatcgggcagtgtgcctgttgccattcgacagtctcctgaaaatgagtgcaccaatttagtgcagtatagctttttatcggtaaaaagctcgcgagatcagcgtgttggtggagaaaaaagcccatcctgagatgggctgaaagtttccacggcaacaaaatatcccgggcatctcgcgccacaacacgacataccctggatttacagcaaaattagacgctgtagtacagttcgaactcaaccggatgcggagtcatgcgtacgcggtcgttctcttccatacgcagggcgatgtaggcatcgatagcgtcattggtgaacacgccgccagcggtcaggaactcgcgatcagcatccagggcctgcagggcttcttccagagaaccggcaacctgcgggatctctttcgcttcttccggcggcaggtcatacaggtttttatccattgcttcgcccggatggattttgttcttgataccatcaaggccagccatcagcagcgccgcaaagcacaggtacgggttggcagccgggtccgggaagcgcacttcgatacgacgcgctttcggagaggtcaccaccggaatacggatagaggcagagcggttacgggcagagtaagccagcataaccggcgcttcgtaacccgggaccagacgcttgtaggagttggtggtcgggttcgccagggcgttgatggctttagcgtgtttgattacgccgccgatgtagaacagcgcctgctcagacagacctgcgtatttgtcgccggagaacaggttggtaccgtttttcgccagagacatatggcagtgcatgccggagccgttgtcgccgaacatcggtttcggcataaaggtcgcggttttaccaaagcggtgagcgacgttgtgaacaacgtatttgtaaatctgaatttcatccgcttttttggtcatggtattgaagcgggttgccacttcgttctgacctgcggttgctacttcatggtgatgggcttcaacaaccagacccatctcttccatgatcatacacatggtggaacggatgtcctgagaagagtctactggcggaaccgggaagtaaccccctttcacgcccggacggtgacctttgttaccgccttcgtatttggtagaggagttccacgcaccttcaatgtcatcgatcgcgacatgggagccggagatagaggcgccaaagcggatgtcgtcgaacaggaagaattctggttctggcccgaacaggacggtatcagcgatgccggtggcgcgcaggtactcttcagcgcgtttcgcgatggagcgcgggtcacggtcatagccctgcagggtgcctggctcgaggatatcgcagcggatgatcagggtcggttcttcgtagaacgggtcaatgaccgcggtggacgcgtccggcatcaggaccatgtcagattcgttgatacctttccagccaccaatcgaggagccatcaaacattttgccttcttcgaagaattcggcatttacctgatgagacggaatcgtgacgtgctgttctttacctttggtatcggtgaagcgcagatcgacaaacttcacttcgtgctcgttcagcatcgtcaaaacgtgttcagcggacatacttaaactctcccggattggtcattgtcgtcgtggtaacgaaaacttcatactgcttaaaagtggcgttgttgccttaaaaaatataaagcgaaatctgtgccaacttttaaatgccccataaaacgctgtatcatgcgcaccatagtgcaaaaggactgcaccatgatggagataatgcaccaaaatagtgcttcagtgtgaacattgagcaccattttggtgcaatttttgttacggtgcccttttatcgctccgtgaaagcggtcacaaagaaactctgcaatacttgtttgcggaggatgtttgtgatcctgttcagtccttcgcttaatacgtgtacaataacgcgctatttctaatgcctgaggcaaagttgtgatcgaaaatctgcgtaatatcgccatcatcgcgcacgttgaccatggtaaaactaccctggttgacaagctgctacagcaatccggtacgttcgacgcacgtactgaagcacaagaacgtgtgatggactccaacgatttggagaaagagcgtgggattaccatcctcgcgaaaaacaccgcaatcaaatggaatgattaccgtatcaacatcgttgataccccagggcacgccgacttcggaggtgaagttgagcgtgttatgtccatggttgactctgtgctgctggtggtagatgcctttgatggcccgatgccgcaaacgcgcttcgtgaccaaaaaagcttttgcccacggtctgaagccgatcgtggtcatcaacaaagttgaccgcccgggcgcgcgtccggactgggttgtcgatcaggtgttcgacctgttcgttaacctcgatgcgaccgacgaacagctggacttcccgatcgtttacgcgtccgcgctgaacggtatcgcgggtctggatcacgaagacatggctgacgacatgaccccgctgtaccaggcgattgtcgatcgcgtgccggcgccggacgttgatcttgacggtccgctgcagatgcagatctcccagctggactacaacaactacgttggtgttatcggcatcggccgcatcaagcgcggtaaagtgaagccgaaccagcaggtcactatcatcgatagcgaaggcaaaacccgtaacggtaaagtcggtaaggtactgactcacttgggtctggagcgaattgagagcgacgtagctgaagctggcgacatcatcgcgatcaccggtctgggcgagctgaacatctccgacaccatctgcgacccgcagaatgtcgaagcgctgccggccctgtccgttgatgagccgaccgtttccatgttcttcaacgtcaacacctctccgttctgcggtaaagaaggtaagttcgttacctctcgccagatcctggaccgtctgaataaagagctggtgcacaacgtggcgctgcgcgttgaagaaaccgaagacgctgatgcgttccgcgtttccggccgtggtgaactgcacctgtccgttctgattgaaaacatgcgtcgtgaaggtttcgagatggcggtttcccgtccgaaagttatcttccgcgaaatcgacggccgtaaacaagagccgttcgagaacgtgacgctggacgtcgaagagcagcatcagggttctgtcatgcaggcgctgggcgagcgtaaaggcgacctgaaaaacatgaatccggacggtaaaggccgcgtacgtctcgactacgtaatcccaagccgcggtctgatcggcttccgttcagagttcatgaccatgacctccggtaccggtctgctgtactccaccttcagccactacgacgacgttcgtccgggcgaagtgggccagcgtaacaacggtgtactgatctccaacggtcagggtaaagcggtagcgttcgcgctgttcggtctgcaggatcgcggtaagctgttcctcggccacggcgctgaagtttacgaaggccagatcatcggtattcacagccgttccaacgacctgacggtaaactgcctgaccggtaagaaactgaccaacatgcgtgcgtctggtactgacgaagccacggttctggttccgccggttaagatgaccctggagcaggctctggagttcatcgatgacgacgaactggtagaagttactccgacctctatccgtatccgtaaacgtcacctgaccgagaacgaccgtaaacgcgcgatgcgcggtgcaaaagaagagtaattttttcttcttgttgttcgctaaaccccgcctctccggcggggtttctttttttcattcctgcatcacacgccaatagtcaaatccagcctttcccgctaaagttaattttccacggcgcggaaggagacaaaaatgctctatatctttgatttaggtaatgtgattgtcgacattgacttcaaccgggtattgggagcctggagcgatttaacccgcatcccgctggcgacgctgaagcagcatttcaccattggtgaggctttccatcagcatgagcgcggcgagctcagcgatgaagactttgccgccgccatgtgccatgaaatgaatatgcccctcagctatgaacagtttgctcacggctggcaggcggtgtttgtcgcgctgcgcccggaggtgattaccatcatgcataaacttcgtgcccaggggcatcgggtggtggtgctctccaataccaatcgtctgcacaccacgttctggcccgatgaatacccggaagtgcgcgcggccgccgatcgcatttatctgtcgcaggagatgggattgcgtaagcctgaagcgcaaatttatctgcgagtactggaagaagaggggttttccgccgcagatacggtcttttttgatgataacgtcgataatatagcaggggccaaccggttggggatcaccagtatcctggtgactggtaaggagaccatccctgactatttcgcgaaacagctatgctaaaaaccgttcatcaaaaattactccaccatacccggccgctgctggcgtggctaaagctgctgtggcggcgcattgatgaagaccatatgaccaccctggcggggaacctcgcctatgtgtcattactgtccctggtgccgctgattgccgtcgtgttcgcgctgtttgcggcctttcctatgttctccgaagtcagcgtgcagatccgtcattttatcttcgccaattttattccggcgaccggggatgtaatccagggatatatcgagcagttcgtggccaactccagccgcatgaccgccgtaggcgcctttggcctgatcgtcacctcgctgctgctgatgtactcgatcgacagcgcgctaaacaccatctggcgcagcacgcgcagccgccccaaagtttattcctttgccgtttactggatgatcctgaccctcggcccgctgctggcgggcgccagcctggcgatcagttcctatctgctgtcgctgcgctgggcaagcgacctggacggcgtaattgataatctgctccgcctatttccgctgatcctctcctgggcagcgttctggctgctctatagtattgtaccgactacccaggtacgtaaccgcgacgcggtgatcggggcgctggtggcggcgctgctgtttgaggcaggtaaaaaggcgtttgccctctatatcaccacctttccgtcctatcagctaatttatggcgtgatttcggtggtgccgattttgttcgtctgggtgtactggacctggtgtatcgtcttgcttggcgctgaaattactgtcactctcggtgaataccgcaaacttaaaacagaagaaacagaacaaccatgattgcattaattcaacgcgtatcccgtgcaagcgttaccgtggcggacgaggtgacgggcgaaattggcccggggcttctggtgctgctgggcgtcgagaaagacgatgatgaacaaaaggcgaatcgcctttgtgaacgcgtgctgggctaccgcatcttcagcgatgcggaagggaaaatgaacctgaatgtccagcaggcgggcggcagcgtgctggtggtttcgcaatttacgctggcggccgataccgagcgggggatgcgaccgagcttctcgaaaggcgctgcccctgaccgcgctgaggcgctgtatgagtatttcgtcgcccgctgtcgccagcaggaaatgcacacccagaccggaagattcgctgcggatatgcaggtttctttggtcaatgatggtcccgtgaccttttggttgcaggtatgacccagcttccgggcaggctgcgggtaacaaaagagagtacgactatgtatcaccttcgtgtaccgcaaacagcagaagagttagagagctactaccagttccgctgggagatgctgcgtaagccgctgcatcagcctaagggatcggaacgtgacgcctgggatgcgatggcgcatcatcagatggtagtggatgaagagggcaacctggttgccgtcggccggctatatatcaatgcggagaatgaagcctccatccgctttatggctgtgcatccctcggtgcaggataaagggctgggtacgctgatggcgatgaccctggagtccgtcgcgcgtcaggaaggggttaagcgggttacctgcagcgcgcgcgaagatgcggtggaatttttcgccaagctcggatttgtcaatcagggtgagatcaccaccccgaccaccacgccgatccgtcattttctgatgatcaaaccggtcgcgtcgctggacgatattttgcaccgcggcgactggtgcgcacagctccagcaggcgtggtatcagcatattccgctgagtgaaaaaatgggcgtacgtattcagcagtacaccgggcagaaatttattaccaccatgccggaggcggggaaccagaatccgcaccatacgctgttcgccggcagcctgttttcgctcgctaccttaaccggatgggggcttatctggctgatgctgcgcgagcggcacctgggaggcaccattattctggcggatgcgcatatccgctacagccagcctattagcggccgccccagcgccatcgccgacctcggttctctgagcggcgatctcgaccgactggcgcgcgggcgtaaagcccgcgtgcaaatgcaggtggagctttttggcgacgataaacagggcgccgttttcgaggggatctacatcgtgctgccggcgaagccctttggctcgtacgaagagggcggcaacgaggaagagtaagcgcctgcggcagttatcgtcctggcgatgccacacgccaggcgatatcccgcatggcatcacgcgcggcgttgctgacgcctcccagctgaaagaagccgtggatcacccccagatagcgctgacaggaactctccaccccttgctccgtcagccttcggtacagcacttcgccctcatcacgtaaaggatcgaactccgccgtcaggatgtggaccggtggcagaccgtgaaaatcttcgcgccacagcggactggcatccggatgggtagcgggtgtggccgctaaatacatttcgtagccgctaagcagcgtgtcccgggtaatgatgtaatcctcgccgttgctggcgtagcttgccatgctggcggtagcgtcgagcatcgggtaaatcaggataagctgtgcaggctgccatgttcccgccgctttcaggcgcagagccgtgaccagggcgagatgcccgccggcgctgtcgccggccagggtgatgcgcgaagcatccacgccaagctgttttgcgtgctggtgaataatcgtggcacctcgttctgcatcatcgtgcgccgccggaaaagggtactccggggccagacgatactgcacggcgatcacccggcacccactgaaccaggcaagctggcgcaattgattgtcatgggtggcaaagccgccgctgacaaaacagccgccgtggtagtagataagcgtgggtagcaggccgtcggcagtgggcggtgaaacgacgcggaagtgcataccctccagggtgatatcctccacccgcactcgcgtttccgtctccccggcgagtaccgcactggcgatatagccggccctccgatcatcaatatgctgatcgcgtgatgaaggacgacctgccgcaataaatgcctcaaccagcgaagcaatccctttttccagcgccatatgaagttccttatactgttttaatatccagtgttatagcctggattatggcgaaaagacaggcctgttgaggtcgcctgtgcattatggaaagcggctcgcaaaaaagagtttacctgacaaaatcctgtttgtttccgattccaaaagctctagattgctcataacttcatcactggtgatatacttgaggtatatatgagcatgatggctgaaagggatatgggcagaattcttctcgatttatcagacgatgtcattcaacgtctcgatgacctcaaagtgcagcgtaacattccgcgagcggaactgttacgtgaagcggttgaacaatatctggagaaacaagatcgagctaaagataccatctccagtgcgctgggtctgtggcaagactgcgaagaagacggcatggaatatcaacgtcagctacgcaaggagtggtaatgacctccggatctgcgctttttgataccaatattcttattgatttatttagcgggcgtcgcgaagccaaacaggcgctggaggcctggccaccgcagaatgcgatcagtctgattacctggatggaggtgatggttggcgctaaaaaatatcaccaggagcagcgcacgcgaatggcgctgagcacctttaatatcattaacatctcacaggatattgcagagcgaagcgttgcgctgcggcaggagtataagcttaagctgccggatgccatcattctggcgacggcgcaactccatcgtctggaactaattacgcggaatacgaaggattttgccggtattcctggcgtagccacgccgtacgaaatccaccctgaataattcgagtggcaggaggacgacaagtgagcgataaactcgtctgaaacgaatatctccagccaaaggttggcctctgataacggtcagtgacgcgtgtgaataatccctgcgcacgttcgtgtcacaagaaggaaaacgggcgacaagagccgcccgaaatcatactgcagaacttactccccttcgccggggaacatgaacgggttaattgagcttctggcgaagccctcctgttccatgcgggcgtcgagcaccagggaggccaaatcgtcggcgacggcttcgactttcggatccttctcctgatacataatcttcaggtaggttccgcagtcgccgcagctttcggctttcaccgccgcctgctcgttgtccagcgaccagtagtgcaggtcgcggctctgctcgcagttgctgcacttgacgcgtactacgtgccactcagtttcgcacaggttgcagtgcagatagcgcagcccctgagtggtgccgatttgcacgatgctggagaccggcatcgagccgcacaccgggcagaactggcgctgttcgccgtattcggcgcgcgcttttcctgggatcagactggccatctgcgcccagtagagcgacagcgcagcccagatgaacggcgctttgtcgctactgacggaggcgaaatcggaaacaaacagcgcgctggccatctgctccagctcctgctcagaggctttttccagattctcaatgaccgccagcgccgggccgctcatttccggcttcagctcggcaatcagcgagtgcaacagcttgtgccagtgcttgtcgcgcggcaggacgtggatatccagcggcggcttgccctgttcgctggccgctttaatgcgggcggtgagatccatctgcagcggatggtcgtacagcactacttcctgggcatgggcaatcagcgcggcaaagcgcaggtaatcgcctagcgggttattagcggccagctcgcgcaagcgttcagcgcggcggttatacagatttttcagcctggggaacagtaacggcggaattgcttccgccgtgcgtttctcgctcgaacccagctcgtcttgcgggattatgcgaatactcattcagatgacttttcctgtttctggcggacctctcggtaccagcgcgggtgatgtttcttcgcccacgttttggtaacccagccttccaccatcgcggtaatggtgcctttcacccagagggcggcgtagatatgcaccatgataaccacaattaacgccactgcggcaaatgaatgcagcatcagcgcaaatcggatcaccgggattgagaaagccggcgcaaaatacggacgccagatgatcacaccgctcaccagcagcagtaccaggaagataatcgccgcccagaatacgcatttctggccgaagttatagcgcccggtatcgcccacctcctcgttgacgacgatcttacgaatattcttcgcccaaaagatatcatcccgattgattaggttgtgatgccagtaacggaaaaacatgatgataaacgacgcgaacatcaccaccccgacgaacgggtggagaattcgcgccagctgcggcgtgccgaggatatgcatcagccagttaaaggacgggaagaaaaagcctaacccgctcaccgccgccaggacgaagcagaaggcggtgacccagtggttgatgcgttccggcgccgtgtagcgcacgatggtgtcacgtcttttcatttgcgcacctcgtctttctcttcatgcagattgtcctcttcctcttccgcgcggttcggaccgacgccgacgtagtggaagatactggctgcgaaggtcgcggcgaagccgacggccgccagcggtttccagatgcctttccagaacttgacggtctggctgatctccgggttttccggcaggccgtggtacagattcggcttgtcggcatggtgcagcacgtacatgacgtgggtgccaccgacgccggccggatcgtacaggcccgcattgtcataaccgcgggttttcagctcagccacgcgttcgccggccagcgttttcatatcctctttggagccaaagtggattgcgccggtcggacaggttttcacgcaggcaggctcctggccgacggtcacgcggtctacgcacagggtacatttgtagacgcggttgtcttccgggttcagacgcggtacatcgaacggacagccggcgatacagtagccgcagccgatgcactgctcggactggaagtcgacaatgccgttggcgtactgaatgatcgcgccttctgacgggcaggccttcaggcagcccgggtccgcgcagtgcatgcagccatccttgcggatgagccattccagcttgtcgttttgttccacctccgagaagcgcatgaccgtccatgacttggcggtcaggtccgccgggttgtcatacaccccgacattgtgaccgacttcatcacgaatatcgttccattcggagcaggccacctgacaggctttacagccgatacaggtggtgacgtcgataagcttcgccacctcctgctggtggtcccgcgcctgaggcgcgggggtgaaaccgttagtcgcggaacgacgaataatatcttgcgattggtaagccataagtcgtctccgttacaccttttccacgttcacaaggaaagctttgaactccggcgtctgcgtattcgcatcaccgacgaacggcgtcagggtattggcaataaagccttttttcgccacgccctcatagccccagtgaataggaatgccgatggtatcgatatccttaccgtcaactttcagcgtgcgaatacgtttggtcaccaccgccttggctttgatatagccgcggttggaggaaactttcacggtatcgccgtggccgatgccgagcttattcgccagtttttccccgatctccacgaactgttccggctgggcgatggcgttaagtagcgcatgcttggtccagtagtggaagtgctcggtcagacggtaagtggtgccgacgtacgggaacttctcggccttacccatctgctcgagatcgcctttgaagacgcgagcggccgggttagagaccacgttcgggtgcagcgggttggttccgagcggcgtttcaaacggctcgtagtgttccgggaacggtccttccgccatcttgtcgatagcgaacagacggcccatcccttccggctgcatgataaacggaccgacgtcgctgccaggcgcggcggcgctgtagtccggaatatccacgccgccccatttggcgccgtcccatttcagcaactgacgcttcggatcccacggtttaccctgcgggtccgcggaggcgcggttatacaggatgcggcggttgagcggccaggcccaggcccagcccagggtattgccgagaccggatggatcggcgttatcgcggcgcgccatctggttaccttccggcgtccagctcccggcgaagatccagcagccgctggaggtggtgccatcatctcgcagctgcgcaaaggagctcagctgttggcctttcttgacgatcaccgcgccggttgccgggtcggtgatatccgccagcgctttaccgttgctttccatcgccacttcttccgatgccggctcgtgtggcgtggagtagttccacgtcatgttgagcaccggctccggcgccgggccaccctcttcggcatacatcttacgcaggcgagtgaagataccggcgagaatttcaccatcggtgacggcgatcccgggggcgtccgcgcctttccagtgccactgcagccagcggccggagttgacgatagacccattctcttcggcgaagcaggtggagggcagacggaacacttcggtctggattttcgccggatcgacatcgttcgactcaccatggttttgccagaaggtggacgtttcggtattgagcgggtcgatagtcacgaggaacttcagcttcgacagggaagcgacgaccttgtttttgttcgggaacgaggcgaccgggttaaagccctggcaaatatagccattcactttgccctgattcatcatctcgaagtactgcagaacgtcgtagctcttatcccacttcggcagccagtcatagccccagctgttttccgcggtggctttgtcgccgaagaaggctttcatcatggagacgaagaacttcggatagttgccccagtagttgacctggtctttcagcagcggcttcggcgtgttagccgtcaggtaggtctgcaggtcggcctgtttttcgttcggcagcgacatgtagcctggcaggctggtggagagcaggccgaggtcggtcaggccctggatattggagtggccgcgcagggcgttgacgccgccgcccgccatccccatgttgccgagcagcagctggatcatcgccatggtgcggatattctgcgcaccgatggagtgctgggtccagccgagagcgtacaggaacgatgcggtcttatccggcgcgctggtttcagcaatgtattcacagactttgaggaagtcggccttcggcgtaccgcagatgttttcgaccacatccggggtataacgggaaacatgctgcttcagcaggttccagacgcagcgcggatgttgcagcgtagtatcgcgtttggcgaagccgttttcgtccagctcatagttccagctggttttgtcgtactgacgtttttctgcgttatagccgctgaacagcccgtcgtcgaagctatagtcctcacgcacgatcaggctggcgttggtgtaggcttcggtgtattcgcggttgaatttttcgttattcagcagatacaggatcacgcccgacaggaaggtaatgtcggtaccggaacgaatcggggtatagaaatcagccaccgacgccgtacgcgtaaagcgcggatcgataacgatgagcttggcgccgttatgaattttggcttccatcgcccagcggaaccccaccggatgcgcttctgcggcgttaccgcccatcactacgaccaggttggcgtttttaatatccacccagtggttggtcatagcaccgcgaccaaatgttggagcaagacttgctaccgttggtccgtgtcagacacgcgcctggttatccaccgccagcatcccgagggcgcgggtgaatttttgcgttaaatagccggtttcgttactggaggcggaggcgcacagcatcccggtagtcaaccagcggttgacggtggtgccggcgtcgttttgcgcgataaagttggcgtcgcggtcctctttcatcagcttggcgatgcgatcgaacgcttcgtcccaactgatttgctgccatttatcggagcctggcgcgcgatattccgggaatttcaggcggctttcagaatggataaagtccaccagaccagcccctttcggacagagcgcaccacggttgaccggatgatccggatcgccttcgatatggaaaatggatgctttggcgtttttcgcgccgtcgccgaggctatacatcaacagcccacagccgacagaacagtatgtgcaggtgttacgggtttcgcgcgtgcgcagcaatttgtactgccgtgtctccgcgagcgcagttgccggggcaaagcccagcgctgctgccgtggttcccgccataccgccagcgcagatcttaaagaactgccttctgctgacctgcatggttcgctccttgtttcgacattgtcacatgtagttatttgctttgcggtgaaggccgcaaaggttcagaattagggcaaatttccctcattcctgaagggataaaaacagaataccacattgtgtgtatgcctgttccaatacggttaaagcaaagtgaacaagaagcctctcgaacaaatcaaaaatgtgacgaatgtcacaggatatcgccaggtctccctctggaaacgcgaggatctgcaacaccctcagccagatgagttagcggaagaggtgcccgtcgcgctggtctacaacggtatctctcacgtggtgatgatggcctccccgaaagatctggagcaattcgccgtcggcttctccttatccgaagggattatcgagcaccggcgggagattttcggcatggacgtggtagcggtgtgcaacggccttgaggtgcagattgagctctccagccggcgttttatgggcctcaaagcccggcgtcgcgcgctggccgggcgcaccggctgcggcgtatgcggcgtcgagcagctcaatgatattggtaagccggtccagccgctgccgttcactcagtcgttcgatttagccaatctcgatcaggccctggcgcatcttaacgactttcaaccggttggccggctcaccggctgtactcacgcggccgcgtgggtccggttgacgggcgaactggcgggggggtttgaagacgttggccggcatgtcgccctggataaattgctgggccggcgggcggaagtcggcgaggggtggcagcatggcgccgcgctggtctccagccgcgccagttatgaaatggtgcagaaggcggcgatgtgcggcgtcgagatcctgttcgcggtctcggcggccaccaccttagcagtggaagttgccgagcgctgcaatctgacgctggtgggcttttgcaagccgggcagggcgacagtttacacccatccgcagcgtttaattgcgggttaaatattggtcaataaatttgaacaatgacagcaaatccttccgctttttgtttagcgatgtgcgggctactatttaacacatcaaggcacagcgccttatctaaacaactaaatgaaagggtttatatcatgaaaagcatcaaaacttttgtcgcagtaatcgctatggccgcctctttcgcttccttcgctgctgaaaccgtgaccgcaaccgcctccacaatggacggcgcggaagcgaaaatcgccgcacaggcgcaggctgccggcgcttcgtcttacaaaatcaccgaagcgtttaccggcaaccgcgtgcatatgactgccgaactgaacaaataagcgtatagcaactgtcgaaagagcgcctcagggcgctttttttgtttttgtttttcgcttcccgtctctgcgaaatttgccaatattttcctctgctacgaaaaaaatgtggcactaatcacgtttccgttcttttcttaaatcctcctttttatggcaaaggaaaggtcagcacgcctgaatatctcgattttttaacgccatgaaatttaaagaaataaaaaacagaaagcgatggagatcactctctttaaatgggatgcgtatcacaaaaataggtgtttcgccgtacctgtcaactattcactgcggtaatttaatacgcattatgtgatcttcattgcaaatagaaggcttgtactcagggaaaaatgttgtcaggcaaatgagcgaggatgcgtcatgaaaattggtatcgttattagcggcggggatgtttctggaatgaataattttatattccagatagccaggcaggctaatgctgatatcacgctgtttaatggcggtattccagggctactggagaaaagtcatcaggatatggcgtggcgcgatctggttgattattcaattaccgcggtgccgatcattacctcggggcgaaccagtcgcaaactgcagcgcagtgaatatgaaagcattgctaaaaaacttaaatctctgcgtattgatgtgctcattatggccgggggggatggcagcctgcagtttctgaatacccttagtgaatttgagattaattgctttggtgtgggaatgactatcgataatgatgtgtatggcagtgattatacgattggtttttccacggcctgtgagcaaattattaaagaagtctctcgtttaagaaataccggaagagcgctgcccggtcgggtttttatggttgagatattaggaggctattgtggagaactaacgttgcagtccgccattaaatgtaatgcggatattgccctgatcccggaggcacagatgccgttggccgtgctcgcggaacggattacccggaagctgagtacgcagaatagcgtcgttatcctctgctcagaaggctataccaaagagtactctcccggctttcagggggcgattgataccatgattaaacagctggaaccacaaataggtgtccgtatccgtaaaacgatcgtcggctatggtttacgcagcggtgatccaacctgcgaagagatttatcagggcactattatggccagtgaagtggttcgctgtattcagtcaggtatgaaaaataaagccataataattaattccagtaacaaacctattccgattgatttagtcagtatgaaaaaacgtctggtcgatactgaaggacatcattataaacttgccaagcaactcaatattatttgaggagaccctccatgctgaaaattttatgcgtatgtggctgcggcctcggttcaagctttgccattgaaatgacggcgaaggcagttttaaagaagctggaaattcccgctcatattgaacacaccaccgtttccgaagctggggcctttaaatcggatatgattctgacgcaaaaaacctttgccgacatcttaaccgccgatgccagtgaagaagaaattaaacgtgtcgtggtattgaataaacttactgataaagaggagattgaaactaagatcgtcgcattcttaaaagaacgtcatctgaaggtggctgattatgaatagcttcgtggcgtttatcgttaaggatttactcggccaggcatccattcttattgcttttattgccatgcttggcctgatcctgcaaaagaaatcgccaggcaaaaccgcggaagggacatttaaaacgctgctcggtttcttaattatgatggccgggataaacatcattgtcgccacgctgaccttcctgaatgatatcttcacccagggatttggcatgaaaggctatattaccgatgtggccgccatcgccgggttagcgaatcgggaattaggttcggaggtggcgctgacgctgctggtgatctttgccgtcaatattattatcgcccggctgacgccgctgaaatatatttttctgaccggccaggcgctgctgtggatggcgacgatcggcgccgtgattggctataagtccgggctcaccggcgtaccgctgattttaaccgggggcatcttcggcggcgtgatggcggtgttaatgccggccctggcgcagccggtggtcaggcgcattaccgggtctgacgatgtggccctggggcacttctgtactatcggctatctggtgcaggctgcggtcgctaaagttgtcggaaaaggctctcgctccacggaagatctcgaactgcctgataactttaagtttctgcaggatacctatctggccatggcggtggtgatggtgccgatgtatctcatcccggctatcgcggcggggcctcagtacatcgcgcagttctccggcggcattaattacctgatgtatgccttcatgcagtccattcagtttgtcgccggggtctttgtcctctatagcggcgtgcgtttattactcaatgagctggtgccggcttttcgcggtatcgcgatgcgtattgtcccggatgcaaagcccgctctcgattgcccggtgctatttccctatgcgccgaatgcggtgattgttggatttctggcaacgactatcggctcgattatcggcatgctggttttcccgatgttcggcctggcgatgattctccccgggctgttaaccaactttttcgccggcggtacggcaggggtatttggcaatgcgctgggcggacgtcgcggggcgatgatcggcggggtgattcacggcctgtttatcacatttctgccggccattctggtacccatgctggagagctacggctttacgggcgtcaccttcagcgattcagacgtcatcagctccggtctggtattaggccacgccttccagaataactggctctttgtcgccttgtttattgtgtttgtcgccgcactggcatggtttgtaaacggtaaatccgctaagccgaaaggggaaagtgttcatgagtctgtataattttaatgagattttaaaaatcgctcaggaaagagattttaaagcgattggctcgtttaacttgcactgtattgagatgttaccggcttttttcaaagccgcgcaaaacagccgcagcccattaatgatccaaatatcaaccggtaccgcagagtatctggggtatcggttactggtcgatgccgtgcgttcattagcagacagtgaaaatatcccgacctgcctgcatctcgatcactgctccgatattaaagccatcgagacggcaatgaatgcgggcttttcttcggtgatgtacgacgggtctcacttaagcctcgaggaaaatatcggtaacacgcggattgtggtggaaatggcccggccgtggaatattacggtagaaggtgagctgggggcgatcggcgggtcagaggatggaaaagcggtggctgccgaagatatctgtttcactaccgtcgaagacgcgacgcgttttgtgaaggagacacaggtcgatatgctggccgtctcggtgggcactgtgcatggcctgtacaccggtaaagcgcagatacagcatgcgcggctgaaggcgataagcgaagcgacgggcgtgccgctggtcctgcatggcggcacaggtgtcagcgatgaggatatgcggctggccgtcaccgaagggattaataaagtgaacgtcggaacggaaatgaacgtgcagtgggtcgatcgctgtaaatcaacgtttgagaaaggaaaagtaaatgacagcgtacggaaatttttaattcccgccaaccaggcagtgactgccgtattaatggaaaaaatggcgctatttaaatagcgtttttaccgacacatatcttttgttgccctgtcttccgccagggagggagcttgctatgtttgaatcattgaaaacgctgtggaaaaaagagcaaaacccgctgcaggattatgatcaacagtcccgtcagctggcggaagagatcgccagactggaaggcgaattacagcgccagcccgataatagcgacgtgcaaaaaacattgatgttgacttacaaccgggcattatcggtatatgccaaaagtaagagccaccggcaggatatcgatgcgctgtttctgcagattgataatttacgcaatattattcgccgcaatatctaggaacagagaatgaccataaaagaactgcttattgaggccgatgccattcaggttggcgttgtggagtccgactggcagcgggtaataaagctggctgcccgcccgctggaggcaaaaggctttatttcgacggaatatagccaggcggtgatcgacaatactttaaatcatggcgcttattacgtttttgatgaagggattgccatcccccatgcccgccccgaatgcggcgtcagacgcaactgctttagcctggtggtgctggaaaagcctattccctttgcggacagtgaaaaagcggacattgttattatgtttggcgcccgggacagcaatgcgcatatcgaggagggcatccgttccatcgtcgcgctgctggataataatgacaccatggccaaactgcggacggcccgcagccgggaggaggttgtcgcattactatgaacagacatctgaccccaggctgcaaaacggccattttaatcaacggcattccggcgtcggggaagagcaccattacccgtttgctggcggagacctttagcctgccggtattgacgatcgacggcatcaaagagccgtttatggcgcgcctggcccctgtcgaccggccgatgaatcgccagctgggctgcgcggcgtatgaggtgatctggtcgattgtcggcgcatcgcctgccagcatggtctggttgatcgacgcctggttcggctttcagccgcgggagaccttgcagagactgctacagcaggcgggcgtggagcaggtgattgaggtctggaaccatatctctccggagctggccgtcgcgcgctatgcctcgcggctggcgacgcggccgccgggccaccccggagaagagtatttgccggagctggcccagctggccgggcgggcgcagcccatgtcgttaggacctgtactgacgatagaccagcggcacccgctgcaaatcgaaccggttattcagtggcttgtaggcacgatcgccggacagcacagcggttttacagattacgcttactcgtcctagggcatacccgccaggcgcagcagcgcggtcaccacggcggcggcgataatcacgccgatcagcgggaccttgcgccaggcgaggaacacagcgaaagcaacgcccagaacgcgcgccataccggcgaaatgtgcgccctcatagaaagtggtggccagggcgacggaaaaaagcagcaccgtcgccgcatcggaaagcagcgcctgcgagcgctcggaaaatgccagccgattgccgagcttcgcgccgccgaggcgcatcagataggttcccagcgacaggatggcgataccggcgataaacagcgtcatattgcccattattttttcctcgacagtaaaccgaacagcgaaagcagcactggcagcccggtgggcacaaacggtacggcggcaagcgccagcgcggcgccgctggcggcgcggatcagcgtagtgcggtttttaaaggccgggatcaccagcgccagcaggatcgccgggaagaccgcatcaagcccgatggtttccggcgctggcagcagtttgccgacggccgcgccggttagcgtaccgaggggccagatcagcgcgacgccagcgccgcacagccagtaggccgctttgcgctgcgcgggggtgggctgcgacaagccaaagaccacgctctcgtcgttcataatgtggcacccgataaagcttaaggcgcgccgaccaaccagttcgcgtacggtcaccccgaacgggatatgacgcgcattgactaacaggccggcggcggcggcggccagcggactaccgccgctggcgacaatgccgataaacatgaattcagaagcgcctgccagcacggacaccgaaagcaagagcggcacccataaagggaagccgtaagccaccgccagcgacccataggacatgcccaccaccccgacggcaaggcagaccaaaacaatcgcttttatcgtgtctccgctgagactggagagagtttgtttcatatcacttagccatatcgaacgaatttccattataatgaacacataatgatcgtttttcaaggcgaacgaattgttcgatataaaaaacaaggggcgggtatgacacagccaatcagcgttatcgccaaaagtctggtgcgggagcgggcgcggaccgggctttcgctggcggaagtcgcgcgtcgggcgggtatcgcaaaatccacgctatcgcaactggagtccggcaacggcaacccgagtctggaaacgctgtggtcgctctgcgtagcgctggatattccatttgccaggctgcttgagccgcaggtgaacaaaacgcaggtgatccgccgcggcgaggggaccaaagtggtggcagagcaggcgaactatcaggccattttgctggccgcctgtccgcccggcgcgcgtcgggacatctatttgctgctcacccagcccggcgccgaccgcatttcgcatccgcatccgccaggctcggtggaacatattatcgtcacccaggggcgggcgcgggtagggctgacgtcggcgccggaagagctcggcgagggcgactatatctgctacccggcggatcaggagcatgtttttcaggcgctggagccggatacgcaggccctgctgatcgctgagcaaaactgacatcgcgtcggcgggggacgcgcgctcgctggacgtcatagccatattgcgggaaactagctttcctatgcgaaaacagggatttttatgtcgctgaaagccattgccaaacaacttgggatctccgtcacgaccgtcagccgggcgttgaacggctacgacgatgtgtcgcaggagacccgcgcccgggttgaggctgaagcgcagcgccggggctatcgccccaacactttcgcccgccgtctgaaaatgggcaccatcgatgccgttggtctcgtctttcctgtccgccccgcgccgctcaacaataacgtttttctcgagatggtcggggagatcagccatgagctggcgcgccatgacattgatttgttgctgatcgccgatgatgagcaggcggataaacatggctatatgcgcatggtgcagggccgtcgcgtcgatgcattaatcgtggcccatactctggatgacgatccgcggctggcgcagctgcaggcctccggctttccgtttctggcgctcggccgtagccgcctggcgcagccctacgcctggtttgatttcgataactatgccggcacctgccgcgccacccgccatctgattcaacagggccaccagcgtatcgctctgctgggcgagaacaacaatcaggcgtttattttgcaaaggcgtaacggctacctcgatgccctgcgcgaggcggggttatccgatgcatggctgcgtagcgtgccggcgacgcgccgcggcggctatcaggccacgctggagctgctgcgtctgcctgagccgcctaccgcgattatcaccgactgcaacacccatggcgatggcgccgcgatggcgctcgcccacctggggcgtttaaccggcgacaaccgcgtcgccctggtggtgtacgacgggctgccgcaggacagcatcattgagaccgatgtcgccgcggtgatccagtccacgcgccagggcgtgggaaggcagattgccgatatggtgcgtcgcttaatcgccggggaggatctcgccacgctgcaggtgctatgctatggcagccggaatttttcccgggtgaaaccgcctgatcttacccctttttaacccgtaattctgaagccgatcacggatccgaaacgttttggttggcatccgaaacgtttcggatcaacagtaagacattccttgtaatggagatgtctgatgtctgattcgctgattcacctgcaaagcgccggtgccgatgttgtgattaaaacccgccctttcgccgaaattgtctactggggaccgcatttaagccacttttcgccgcaggatgccgacagcctgacgcgcccggtcgccaacggcagactggatgtcgattcgccagtgaccttaatggcggagctgggccatggtctgtttggcgcgccgggcattgaaggccatcgtcaggggctggatgcctctccgctgttcaccaccagcgaagtgcggcacgagggccagacgctgaccctggtcagcgaagatccgcaggccggcctgcgcctgcagagcgagatcgcgttggatgccagcggcgtgctgagcgtgcgccatggcgtgaccaatctgcgcgccagcccatggcaggtggatcgcctggcggtcacgctgccggtcgccgaacgcgctcgcgaggtgatggctttccatggccgctggatccgcgagtttcagcctcatcgcctgacgctggagcacgacagctttgtgctggagaaccgccgcgggcgcacctctcacgaacatttcccggccctgatcaccggcagccgcgcctttagcgagatgcagggtgaagtctggggcgtgcatctggcctggagcggtaaccatcgcctgcgggcggaggtgaaaaccgatggccgtcgctatctgcaggccgaggcgctctatctgccgggtgaaatggcgctggcggaaggggaaaccttgtggacgccgtacctgtatgccagctactcggcgaatgggctgaacggcatgagccagcagttccatcgttatctgcgcgaacggattattcgtttcccgggcaacaaaccgcgcccggtgcatctcaacacctgggaggggatctatttcgaccacgacccggactacatcatgcgtatggccgacgaagcggcggccctgggcgtcgagcgctttattatcgatgacggctggtttaaagggcgcaacgacgactgggcggcgcttggcgactggtatctcgatgagaaaaaatacccctacggcctgacgccggttatcgatcacgtgaagtctctgggtatggaattcggtatctgggtggagccggaaatgattaacccggattccgatctgtaccgggcgcacccggactgggtgctggcgctgccgggctataccccgctgaccggccgccatcagtttgtcctgaacctcaacattcccgaagcgtttgattatctgctggagcggatgagctggctgctgggcgagcatgcggtggactacgtgaagtgggatatgaaccgcgagttggtgcagcctgggcatcagggacgcgccgctgcagacgcgcaaacgcgccagttttaccgcctgctggatacgctggtggcccgtttcccgcacattgaatttgaatcctgctcctccggcggcggacggatcgattatgaagtcctcaaacgcagccatcgcttctgggcgtctgacaacaatgacgcccttgagcgcaacaccatccagcgcggcatgagctacttctttccacccgaggtaatgggcgcgcatattggcaatcgccactgtcatgccaccttccgccagcatagtatcgccttccgcggcctgacggcgctgttcggtcatatgggccttgagctggatccggtgagcgccgatgaagaagagcgcgccggataccgaaaatatgcggccctgcataaacagtggcgcgacgtgatccatcacggcgtgcagtggcgaatagatatgccggacgccaccacccttgcccatggcgtcgtcagcccggataaagcgcaggcgatcttcctcgttagccagctggcgatgccggactacaccctgatggcgcccctgcgcctggcgggcctggaggcgagcgcccgctatcaggtgacgctcctcgatcatccgaacattcagatcaccggtgagggcggccacaccatgcggaagctgccggcatggatgacgacgccgcagacggtgagcggtgagtggctgcagcaggcggggctggcgctacccatcctcgacccggaaagcgccattctgattggtctgcaacgcgtgtgatggtatcgggctgcgctgcggcccttcttgaggaaaatataatgaacccgaccgtctgtacccacaaaaacaaccccaacttctggattttcgggctgttcttctttctctacttcttcatcatggccacctgctttccgtttctgccgatctggctgtcggacgtcatcggcctgaataaaaccgaaaccggcctcgttttctccagcctgtcgctgttcgccatctgtttccagccgatcctcggagtgatctctgacaagctggggctgaaaaaacacctgatgtggatcgtgaccgttctgctggtgctgattgctcccttcttcctttatgttttcgctccgctgctgaaaaccaatatctggctcggggcgctgagcggcggcgcctatatcggctttgcattctccgcaggcgccggcgcgatggaggcctatatcgaacgggtaagccgcaacagcgggtttgaatacggcaaggcgcgcacctttggctgcctgggatgggcgctgtgcgcgactaccgccggaatgctgttcagcattaatccagaatgggtgttctggatggggtcagccgccgcgctgctgctggtggtgctggtggccatcgccaaaccgcaggccagtcagtccgcgcaggtgatggattcgctcggcgccaatcgcccggcgatcgatttaaaaacggcggtgcgcatgttccgccagcgtaagatgtggatgtttattctgtatgttatcggcgtggcctgcgtgtatgacgttttcgatcagcagttcgccaccttcttcaaatcgttcttcgcgaccccggaagcgggcacccgcgcctttggtttcgccaccaccgcgggagaaatatgtaacgccatcattatgttcagctcgccgtggattattaaccgtatcggagcgaagaataccctgctgatcgccgggatggtgatggcggcaagaatgattggctcttccttcgccaccaccgccgcggaagtcgtagcgttgaaaatgctccatgcgctggaggtgccgttcctgctggtgggcgcctttaaatacatcaccggcgtgtttgacgtccggctgtcggcgaccatttacctggtgggcttccagttcgccaagcaggtggcagcgatcttcctctccgccttcgccggcaatatgtacgatcggatcggtttccaggagacctatatgatcctcggtggtattgctctgacggttaccttaatatccgcgtttacgttagcgggtaagacgaaaaccgagccgctgcgcgataatgcaatgaccgtttaatcgaccggcctcccgtctggagggaggccagttatttttacgccagataaaacacttctttgagctccgcgctcagcgggctgttgtccgggttgctgggcatcacctcgcgcatgtatttccaccaacgctggcatacttccgtgctggcgaccgcttcccagcgggcttccgattcaatctccaccgtcgcgaacaggagatggcgttctttatcgagataaatggcgtagtggtgcgcgccgtgatccttcaacactgcctccagctccggccagatggggttatggcggcgctggtactcctcgtgcgcgtcggggttcacctgcatgacgaaggctttacggatcataaggcctccagatagagctcgcgaacctcatcgcggctggcggggcgcgggttacacggcgcgcatgggtcggccagcgctttatccagccagccttcgatatcggctttgctgacgccaagctggctgaaaccctgggggatccctacgcgtttgctcagcgtgcggatggcattgatggcctccatgctggcagcttcatcactcatgccgcgagtatcgacgcccatcgcctgcgccacgcgggcaaagcgcgccaccgcgttcgggcggttaaagttttcgatgatcggcagcaggatggcgttgcataccccgtgcggcaggttgtgggtcgcgccaggctgatgggccagggcatgtaccagcccgagaccggcgctgttgaacgccatgcccgccagatactggccaaacgccatctgctcgcgggcctgcagatcgtgcccatcgtctaccgctttcggcagccacaggttaatcaggcggatggcttcgagggcgttggcgtcggtcagcggatgggcgccaacggagacaaaggcctcgatggcgtgggtcagggcatccatgccggtggcggcggtaacggctggcggaatgtcgagcatcacgctggcgtcgtcaacggcgatatccgggatcaggttcgggtcgataatcacctctttcacctgccgctcgctatcgataattaccgcgttgctggtcatctccgccgccgtgccggcggtggtgttgatggccaccagcggcacgccagcgtttttcactttgccgacgccggagtaggcggtggaggggcctgggttggcggtgaggatttttatcgctttggcggtatcaatcgggctaccgccgccgaaggcgatcaggtaatcgcagcgggccgcctggtaagccgcatagccttgctgcaccagcgcttcggtggggttggggaatacctcgtcaaatagctgataagccatctgctgttcatccagcgcggcgaacaggctgtccagcaggcccagcttcaccagctgaccgtcggtgacgatcagcgccttgccccattgtttgcccgctaccagcttgaccatatcaccgatcgcgcctgcgccgtggaggctgattttaggtagtgccaacataaaactcatgataattctccttaatgttgattttgggaaatccgtttcccctcaccccgaccttctcccgcagggagggggccagggtgagggggaaattaacatcgtcttcgctgcatcatccgccgggtaataatcggcagggagatcaccacgatcagcatggcgccgataatcaccgacatcacgatgccggggacgttcagcaggctcaggccgaaggtcaccagccccatcagaaaggcggcgatgatcaccccgggcatgctgccggagccgccgagaatattgacgccgccgagcaccgccatggtgacaaccgccagctcccagcccatcgccagggtggggcgggtactgccgagccgtgaggtcagcaggaccgccgccagcccggccatcagcccaaccagcgcgaacagcaccaggttatgacgcttaacgttgatcccagagaaccaggcgccggtcgggttattgccgatggcgtaggtccggcgaccaaagttggttttatgcagcaggaaggtgaaggcggccgcgaggaggataaacagcgcaaactcaaaagagagcgccccccacacgtacccttggccgaaccaggcaaagctctccggatagtgattgagtgcctgatcgcccagcaggatataggtgatgccgcgatacaggctcatggtgccgatggtgatcacaatggacgacaggttaaagcgggtcaccagcaagccgttgaacaggccgcacagcagacctacgcccaggccgatgaccaccagcagcggagtgtccatccccgctgccgcgcagaagcccatcaccgttgagctgagcgccatcgtcgaggctaccgacagatcgatttcccgggcgataatcagcatcgccatcggcaggacgacgatcgccttctcggtaaaggtaaaggtggcgtccgacaggttccagatattgaggaagtacggggaagccacggcgttgccgataaataccgccagggtgaccgccagtaaaaacccttcccagcacagcaggcggcgcagcggcgacggcgcggccggggcgtttttcatctcttcagataccatcattttgctcatgatttcaccgcctgtttctgtcgggctaacgccgcgttgcgcaggattaaccgcccgtgaccgcgattgccgcgctcgttgagcagcaccgccatgacgatcaccgccccggaaatcgccatctgccagaagggcgagatgccgatcaccggcagggcgttattaatgaccccgaggaacagcgcgccgcacaggcagcccagcacccgtccgcttccgcccatggtgctgataccgccgatcacgcaggcggcgaccacctggagttcaaaaccgttggcgacgtcgacataggcgacggcgaagcgcgagatccacagatagccgcagaagccggccagcgcgccggagagacagaagctgacgaactgcatttttccggcgttaatgccggtgtagtatgccgccgtcgcgttgccgcccgcggtgtataaggcccggccggtgcggctgtagtgcaggaaataacccaccagcagcagcgcggcgatggcgcaccagctcagtagcggcagcccaaggagggggctgcgcggcagactgagaaaatcagcactcatctgatgtgagttaacccagccgccgtcagtcagcaggaagataatgccgcgataaatgctcatggtgcccagggtcaccacaatggcgggaatgccgaggcgccagaccagcaggccgttaattactcccatcagcaggcccagcagagtcgccagcgccagcagcgctaccaccggaatacccggatagtgggcgttaagcagggcgacgatcatcccggtcagcgccaggttggcggccatcgacagatcaatgcctttggtgagcaacaccatcatctggccgagggcgaggatgataaggatggcggtatcgttaaacatctccaccagattgcccggtgaaacgaacgacggcgcccggctgccgatggcgccgatcatcaaaataatgaccaccgccagcagcgcttcgcgatgtttcagccatgcgtgtcccatcatgccgcctcctggccgatgccgctagcggcgctaacgatggtttccgccgtcgcttccccggcccggtactcggcgaccatcagcccttcgtgcattacgataatccggtcggccatgcccatcacttccggcagctctgacgacaccataatcaccgccagcccctggctgaccagctcggacataaactgatgcacggcggcctttgagccgatatcgatgcctttggtcggctcatcgagaatgatcacctcgggctgggtcgccagccatttgccaatcaccactttctgctggttgccgccggagagggtctccaccggctgccgccagctgaaggctttaacctgcaggcgcgaggcgtactcgtcggccagccgccattcccggccgtcgttcaggatgccgttaggattgagcttgctgagctgcggtaaactgatgttctgggcgataggcagggcgatgatcgctccctgtttctgccgctcttccggcacgcagacgatgcccgcgcggatggcgtcggcgggctggtgaaagcgcatggttctgccgttcaggcggatctcgccggaggaggggcgcgaaacaccggagagcgcctgcatcagctcggtgcgtccggcgcccaccaggccgtaaaagccgagaatttctcccttgcgcaggcggaagctgatatgggcaaactcggtaggatgacagagatcggtcacctccagcaccgtttctccgggggtgcagtcgactttcgggtaggtttggctgatcgcccggcccaccatcatcgacaccatccgctcttcggtgatgtcgcttatcgccccggagctgacgtacaccccatcgcgcaggatggtgtaataatcggccagctcgaagatttcatcgaacttatgcgagataaacaggatcgctttgccgtcctgcttcagacgctcaacgatgtgataaaactccaggatttcatgctgggaaagcgcggcggtcggctcatcgaggatcaccacctgggcgtcgaaagccagcgcccgggcaatcgccaccatgtgacgctgggcgatgctgagggttttcagcgtggctcgcgggtcgatctggacttccagccgggtgaggatctcgttggctctgcggtgcatcgtcggccagtcgagcgttttcagcagtcccttatacagatactggccgacgaaaatgttttcgctgaccgagagttcgtcaaacagcacggtttcctggtgaatggcggtgatccctaccttatgcgccgactccggcgttggcagatgaatggggatcgctttatagaggatctcgccctcttcgggctgataaataccggtcatcactttgaccagcgtggatttccccgcgccgttttcgccgattaaggcggtcactttgccgggccagagatcaagctgcacgttctcaagggcgcgcacaccgggaaaaattttggtgatccccttcagcgacagcagtggcgttgatgctgacatgatagttctccacaaaaatcacccctcaccctaaccctcccccacaggggcgagggaacggtccggcgtccgctggccgcatcgcgcagagggccagccgttccccctctccctccgggagagggccggggtgagggaacaaggattagaaaattttcgagaacttatcgatgttgctcgcatcgtagacaaacggcttggccatcgcgccattcccctcggcgtccagcttcactttgcccagcttgcccatactggcttcggttttggtcgccgtgcctttgactaaatcgtcggccagataggtggcggcgtagcccaggtcaatcgggttccagatggcgaagcttttgctggcgccggacttgatcgcgccggccatttccgacggcagccccagcccggtgacatacactttgccgattttgccctggtccttcaccgcctgcgcggcggcaacaatccccaccgacgacggcgagacaatgactttcaggtccggatatgatttcagcagacccaccgcttcgcggtagcttttatccgacagatcgtcaccgtaggcgacggtgaccagctgcaccgacggatactgcggtagcacctttttcatctcctcaatccagatgttctggttcgtggaggttggggtggcgcttaacacggccacctcgcctttctcaacgttcagcgcctgcagcgcatcggcggcaagcttgacgttggtttcgccaattaaggcgttatttgaggggttaagatggatctgacggcctgccggcgccacgccggagtcccatgagaccaccttgatgccgcgctgcatcgcttttttcagcaccggcaccaccgcgtccggatcgttggcggaaatggcgatcgcatccaccccctgggcgatcaacccgttcagcacgtcgatctgcgcctcggcggtggtagtggtcgggccggtgtagatcactttgacatcacctaactccttggctgcctgttgggcgccaacgttggcggcttcgaagaagccatttcccagcgatttcgccacaagggcgattttaacttcggctaaggcggaaccggacaacgccagggcggcaacggtgaggatcaagcttgtctttgttttcattgcttttactccacatgagttagttttgtagggtttgcaggtgatatttcgccccgtctcggtgagcggggcgcgatgttgttatggataaagatctaaagcggactgcagcggctgcacgttgaagcgtttgccaagggcgataagctcgtcgcgggtgatggtctgcttcatcccgcccatcgacaagactttcaccagcacttcggcggacttctcggcggtatcgatcaggccgaaggtctcatccagcgtggggccgctgccgaagacgccgtggaacggccacagcaccagcgagtgtttttgcatggtttcggcggtcgcctggccgatttcatcggtacccggcaccatccacggcagaatgccgacgccatccgggaagaccaccagacattcggtgctaccttcccacagcttacgggtgaaaagatcgctgtggttctccagaacataggtcagggcgatcaggttggtggcatggcagtgcatgatcacccggtctttgccgccggtcagtttgatgcgctcgctgtgcgacaggaagtgtgccggcagctcggaggtcgggacggcatcctccgtcaggccccacaggatatggtatcccgcgccgtcgctgtcgaccttcaccacgccgaggttagcggccgggtcgagctggacgttacggaagaatttgccggagccggtgacgataaacggctggttggccagggttggcatcggctggctgagggcgatatagcgcggtttggcgtggaaatccgccgcgtaaggttcgatatccgcttcatccagacgcagcgtcaggttgccgccgttgcgttcgtcccagcctttcagccaggcgtcggaggtggctttgatcatgccctggacgaaccaggcgtcgataatggtctgcatagtcttgtctttcctgttgattcggtgcggggttgaccccctcaccctaaataggtgcgtgcccccggattgcgccgtaaacggcttatccgggctaccggttcgtagcccgggtaaggcgtcagccgcgacccggggaagctcgtgcattacccgcgctggctcagaaccgcattctcataagcccgtacgctgtccagccactggctacccgccggcgtgtcgtgacgctgacagtacatctcccagatggcctgccaaggcagcgatttttgctcttcgagcagcgccaggcgggcggtgtaatcgccgtcgttctccagctggcgcagctgggcggtcggttccagcagggcgcgcagcagcgcttttttcatattgcgggtgccaatcacccaggccgcgatgcggttgatggaggcatcgaagaagtcgaggccgatgtgcacgcggtcaaacaggttatggcgaatgatttcgctggcgatggcctgggtttcatcatccagcagcaccacgtggtcgctgtcccagcgcaccggacggctgacgtgcagcagcaggcgcgggatgtagagcatggcggcggagatcttgtcggagatcacttccgtcggatggaagtggccggcatcgaggcacagcgccgtctgacggctggtggcgtaacccatatagaactcgttggagccgacggtgtagctttcggcgccgatgccgaacagcttgctctccacggcgtcgatatggtgcgccgggtcgagcttctcgctgatcacctcatccagggcgttcagcagccgctggcgcggggcgaagcggtcaacggtaatatccttcatgccgtccggcacccagatattcatcaccgacggcgtgcccagctgttcgccaaaataagcggatacgcggcggctggctttgcagtggtcgatccagaactggcggatctcatcgttggcgtgcgacagggtaaagccgtcggcgctcagcggatgcgagaagcaggaggggttgaaatccagccccagtttgttggctttcgcccacgtaacccagtttttaaagtgctccggcttaatctcattgcgggctaccggcgcgtcggattccaggtaaatagcgtgcagattgagacgctttggccccgggatcaggctcagcgcctgctcaaggtcggcgcggagttcttctgcattgcgcgctttgcccgggtagttgccggtcgcctggatgccaccggtcaggcttcccgccgggttttcgaaaccggcgacgtcgtcaccctgccagcagtgcatggagacgggcagacggtccagctggcgcagggcctcctcgacatccacgccgacggcggcgtagcgctgcttagcaatttcccaggcttgttcaagttgagtggtcatgcgcaaagctccttggtctgttgtggctgaaactgcgccacgaaacgggcaatttcactatcaggattgggggtaaaagtggtgagcgccgcgttgccgcgcactacctgacgaaactcatcgacattggccagctcgtcgagggtcattaactggatgccgatattgccgagggtggaggcctctatcgggccggccacgacggcgatcccgcaggcgtcagcgcacagctggttgagcagcgtgttctgacagccgccgccgacgatatgcagctggctgaaagggtggccgcgcagcgccgccagctcgttaagcacccgggcgtagaacagcgccaggctgtcgaaaatgcagcgcgccagttcggcatcgctttcaggaaccggctgcccggcgtcgcgacaggcggcctggatctcggcgctcatactggccgggttgataaagcggtcatcgttgcagtcaattatgaagcggcacgccggtagcgcggcggtgcgggcgatcagcccctgcaggtcgctgacgttttgctcttttagcacccgctgcagcagccacaggcccatgatatttttcagcacccgatagcggccttcggctccgccttcgttggtgatattggcctgcagcgccgcgtcgcaggtgtacggcgtcaggctttcaaaccccatcagcgaccaggtgccggaggagagataggcggcatggcggtcggccagcggggaggcgatcaccgcgctggcggtgtcgtggctggcgacagcgactaccggaattcggttaccctgcgggcagatccagtggcctatcacattgccggggtgggtcggctttccgaaccacgccaacggcgcgccggtccagttcagcagcgtctcatcccagctatcgctgttaatattgaccagctgggtggtggtggcgttggtatattcccagttcagattgccggtcaggcggaagctgaaatagtcggggatcagcagggcatgggcagcctgactgaccagctccggctgctgctccaccagcgcgcgcagctgataaagcgtgttaaacggcaaaaactgaatgccgctgcggcgatagatttccgccctgcccagctgcgcttcagcgtgacgcagcaggccctgggtgcggtcgtcacgataggaaatcggcagcccgacgcgctggccctgcttatccagcaggacataatctaccccccaggtatcgatgccgatactgtctatcagaatgccctgctcacacactttctccagcccgcggcggatctcgccttccaggctatctacatcccagcagtcgaagccgtctactttctgcagactattggtgaagcgatgaatttcgcgcagcgtcagggcgcgcggcccgggctgatagctggcgagcatcacccgcccgctggaggcgcctaaatcgacagcgacacaatgacgaatactcatgaaacgatccttcttaaaatcattgtccgcagtctaaaaaaggccgtttactgacaccttctcgctacggacagccaaaactggccgctggcaagaaagcaaaggtgaccgtgagggacatcacagtttgcggttttaggggatggcgagggggatgtgatggcctccgcagttccgcatctttccggctgattcttgaaaaagcggcaggatttacgaatttcgcggtcaaaaattgaaggccggatagccaacccttcattactatcagccggtgactgataatttttctcattacgagggtggcatcatgaccatattgcacagtacggatttctttaaggccgggatctcgacggtggctattgaaccccgcctccctcagtcggcctttccggaacatcaccatgatttccatgaaatagttatcgtggagcagggatcgggtattcacgtcttcaatggccagccctacaccattggcggcggttcggtctgttttatccgcgatcacgaccgccatctttacgagcacacggataatctgtgtctgaccaatgtgctctatcgcgcgccggatgcgtttcgctttctcgccggggtcagtcaactactgccccaggaacaggaaggaaactacccctcgcactggcgggtgaatcaaaccgtcctgcaacaggtgcggcatatcgtggcgcagatcgaggccgtggggagcgaaacggatactcatgccgtcgccagccgtgagatcctgtttatgcagctgctggtgctgttacgtaaaagcagccttgcggaagaggccaccaacaacgatgcgcggctgaatcagctgttggcctggctcgaagaccattttgcgcaggagatctgctgggaggaggtggcggcgcagttttcgctgtcgctgcgtacgctgcaccgccagctgaagcagcaaaccggtctgacgccacagcgctatcttaatcgggtgcgcctgatgaaagcccgccacctgctgcgccacagcgatgaaagcgtgactgatatcgcttatcgctgcggcttcggcgacagtaaccacttttcgacgctttttcgccgggagttcgactggtcgccgcgcgatatccgccaggggcgcgacgccattcttcagtaacgcgagaagagtcaacgtattgcagactaaaaacgcgaataatgcgccgttatccgcgtttggagtgtgagccgtggccggtctgattttacgtaaagaggagtttttcccttccgccacacaggcagtggcggtggcagaccgctacccgcaaaatgtctttgccgaacatacccatgagttcagcgagctggtgctggtgtggcgaggcaacgggctgcacgtccttaacgatcgtccctggcgcattacccgcggcgatctgttctacattcgcgccgaagataaacactcctatgcttccgttaacgatctggttctgcagaacatcatctattgcccggagcggctgcagctcaattttgactgggccggggcgatccctggcctcttcggtacgccgtggaagccccactggcgcatgggcagcacaggtatggcgcaggcgcgccaggtgattagccagcttgagcatgagtgcgcccggcgcgacgcgcagggaaatgcgatggccgaactgctttttgcccagctggcgctgacgttgcagcgccatcgctatgcgacggatgatcccgcggcgacgcagcgcgaagcgctgctggacaaactgctggccgcgctggcggccagccttagccgcccctttgttctggagcgtttctgcgagcaggagggcggcagcgagcgggcgcttcgccagcagtttcgccagcaaaccgggatgaccatcaatcactatttacgccagctgcggatctgccatgcgcagtatctgctgcagcataccgagcgcttaatcggcgatatcgccatgcagtgcggctttgaggacagtaactacttttcggtggtttttagccgggaaatcggcatgtcgccggggcagtggcggcagcgcagtcgcgccgccgcctgaagagcgtcgttgtcaggcagatgatccggtgattaactggccattcccagaccgacgatattggcggcgatgatgatcaccacgcagccgaggctcaggacgctcaccggacgacggccggcgttgttccactccttcagcaccagacccaccacaccgccgcacagcacgtagaaactcatgtgcagcatccagctcatataatcatactgcgccggaatgctggcgtggccccaggcatagaagaagaactggagataccacatcagaccgccgagggcagagagcagaaggttgctgatgataagcggtttggccagcgagaaatcggctttgactgacaggttcttcactttcgccagacgaataaagcagaagccaaggttaaccagcgccccgccgcccataatcaccacgtagcttggcagcgctgcgtacagcgggtcgacgccgagcgccgcggcggcatcatgcatcggtttggcggcgttcatcgcgaacgacatccctgcggagaagataccgcacattaccgccagcagaagccctttcttcagattgaactcttcggctttgatgcccattttgcgctctttcagctggcctgcgcgggtgacgatgccgacgccaatcaccgccaccagcacgccgagcagcgtcatttgaccgccctgggtgcgcatcagcactgcaaactgaccgttaataatcggcgtcatcagcgtgccgacaatcagcgtgatgccaatggcgatgccaatccccatcgacatgccaagatagcgcatggtcaggccatagttgatattaccaatgccccacatggcgccgaacagaaagaccggcagcagcgtggaggcgctaaaagagcggtagtaggcccagaagtcgggtaacagcgtggcgctgatggcccagggcagaatcagccaggagacgatccccccgaccgaccacatggtttcccacgaccagtgttttactttcttgaacggggcatagaaacaggcggcactggcggcccctatcaaatgccaaaaaatacccatcgtaatcgcgtggttcattgattttatcctcatctttttttatcggagacggcggcttccgatgggatgagtgtaaaaattggccgctttggccgccttcaggacgttgccacaggatggcgaaccctggcaaccatgggcttaattagttgttctacatcacaaaacgacgggtatttcttctggttatatccatatgaaaaatacggcattgataagcattttcaataccatttaattaactataatggacaaactgcttacgcggcgttaacacttgagccgctcgacaataatggagatgattatgagctataccctgccatccctgccttacgcttacgatgctctggaaccgcacttcgacaagcagacgatggagatccatcacactaaacaccaccagacctacgtgaacaatgccaacgccgcgctggaaagcctgccggagttcgctaacctgtccgctgaagagctgattaccaagctggatcagctgccggctgacaaaaaaaccgtactgcgtaacaacgccggcggccacgcgaaccacagcctgttctggaaaggcctgaaaaccggtaccaccctgcagggcgacctgaaagcggctatcgagcgcgatttcggttccgtggagaacttcaaagcggaattcgaaaaagccgctgctacccgtttcggctccggctgggcgtggctggtcctgaaaggtgacaaactggccgttgtctccaccgccaaccaggattccccgctgatgggcgaagccatttccggcgcttccggcttcccgattatcggcctggacgtctgggaacacgcttactacctgaaattccagaaccgccgcccggactacatcaaagccttctgggacgtagtgaactgggacgaagctgcagcgcgttttgccgccaaaaaataaggttgcattgcgctaaaagagaagcgagtctgatgactcgctttttttatatctgtagcaaggagagcagccatgcattatccggtgaatgtctttgtcggcaaaatcagggactacgcgggcagtcgccccagcgcgatcgacaaaatccaggtcgacggagaattgcagctcggcgatctcggtctcgatggggaccagcaggcggagaagaaaatccacggcgggccggaccgcgcgctgtgtcattatccgcgcgaacactatgccgactggatccgtgacttcccccagcaggccgagcggttctgcgcgccggcgttcggcgaaaacctctccaccaccgggcttaccgagcaaaacgtttatatcggcgatatctttcgctggggcgaggcgctgatccaggtcacccagccgcgatcgccgtgcttcaagctcaactttcattttgcgatcaatgatatggcgcagctgatgcaaaacagcggaaaaaccggctggctgtaccgggtgattgccggagggcaagtttccagcgatgcgccgctcgagctggtttcccggctgagtgatgtcagcgttcatgaggccggggcgattgcctggcagatgccgtttgatgatgatcagtaccaccgcttattgtcggcagcgggcctgtctgttagctggagccgaacgatgcagaaacggcgtttaagcggcaagatagaggatagttcgcggagattatgggggaaataatcccccatattaagtattcccggggatgctcccggcgcagcgccgcacagcgcaggccgggtcggcgtcaggttcgtttatacagcggcagccagattgttaaacgcagaccacccagcgggctgtcgtcggccttcacccagccgcggtgctgctgaatagcggtttcgacaatcgccagccccaggccggtgccgccggactcgcggtcgcgcgcctcgtcggtccggtagaatggccggaaaatctgttcgcgatcctccgggctgactcccgggccgtcgtcatcgacgttaaccgtaatcccgtctttatccaccgagaagctgacggaaattttcgtatgcgagtagcgcagggcgttgcgcacgatattctccagcgcgctttccagcgcattggggttaccgtacagcggccatgggcccggcggatactcaacggtgaaagatttccccatctgctcagcttcaaacgccgcattgtccaacacttcgttccatagctgattggctttcaccgtctcgctgaccagggcgtttttcgcctgattgcgcgacatcaccagcaggtcgttgatcatgctgtccagccggtgcgcttcggtttcgatacgctccagctccttgctctctccgctgcggcgacgcagcagggcggtacccaattgcaggcgcgtaagcggcgtgcgcagctcgtgcgagatatcggacagcagccgctgctggctggtcatcatccgctccagggccgtcaccatttggttaaaactggcgccagcggctaaaaactcctgcggcccggcttccagctccggatgctggcgcaggttgccctgggcgacttcatcggcggcatttttcagcttacgcgccggtttcgccaggctccacgccagccacagcagcagcggggcgctgaccagcatcgtgacgatcagcagcagcagcggccggtcaaacagcaggttgataaagtcggattgtgaggtgctggcgggacgaatcagatagagctgatagttatcctccccgtcccggacggaaaacgggcccaccatttccaggcggccatagcgttttttctgcggatgatcggcgttatcggcctggccgataaagttacgaatgatctgcatctcgttgcgttctgcgccgatcacgcggccttcgctggtcaccagcagcaggcgttgtcccggaggcgcccatttatcgatggcgcgaaacaaacgacgccaccacatcaggtcgtttggcggatcgttggccagctcggcctcgacgtgctgctcgatcatgatgccctgacgctgctcgctttccagcagctcggtcatctgccgggaatccagtttgggcaacatcagcaccagcatcaacaccagcgccagcgtgagccagaagatggcgaagatgcgtgcagtcaaacttccaatcatgaagcggaaaccatcagatacccgcggccacgcagcgttttaaaccacggatggccatctttgcgctccggcagcttacgccgcaggttggaaatatgcatatcgatggcgcggtcgaacggcgtcaggcgcttgcctaacacttcctggcttaaatgctcacgggagactacctgaccgagatgctgcgctaacagatagagcagggtgaactcggtgccggtgagctccagcgtctggccatcgaaattggcttcctggcggcccggattgaggcttaaggcatccacttccagggttggtgagccggcttcggtcgtctgctgctgctcgctccagtgggaacggcgcagaatcgcgcgtatacgggccaccagctcgcgatcgttgaatggcttaggcaaatagtcatccgcgcccagctcgaggccgagaacgcgatccagctcgcttccgcgcgctgttagcatgataaccggagtctggtgtgtctgacgcagctctttcagcgtatcgataccgtttttcttcggcatcatcacgtcgagcagcaataaatcaacgctgtcgtccagaagggccagcgcctgttccccatcatgggccaccagcacgttaaaaccttccatatcgagcagctcttttaacagggaggtgagctcccggtcatcatcaactaacaggattttattcattgtttaaatacctccgaggcagaaattacgtcatcaaggcccgctaatccatgactttacgttgttttacaccccctgacgcatgtttgcagcctgaatcgtagactgtctctcgttgaatcgcgacacaaacgttttgggagtatgtgatgcgcaatgttatcgctgccgtcatggcctcaacgctggcgctaagtgcatatagccaggccgctgaagtcgttaccagcgttaactggctccccggagacgaagggggacagcgcggtagccaaagccatatgtttgacggcataagtttaaccgagcagcaacgtcagcagttacgggatcttatgcaacgggcacgccacgacaggctccccgttaatgttagcgaaatggagacaatgcatcgccttgtcaccgcagaaaattttgatgaaaacgctgtgcgcgctcaggcagaaaagatggcgcaggaacaggttgcccgccaggtcgagatggctaaggttcgcaaccagatgtaccacctgcttacgccagagcagcaagcggttttaaatgctaagcaccagcagcgtatggatcagttgcgtgaggttgcaaggatgcagaaaggctcagcgatgatgctttcgagtagtagcaacaccctgcaaccccagtaacaaaccctgttttccttgccatagacaccatccctgtcttcccccacatgatgtgggggttttttttgccctttttacggtaaatcaactccttcgcctatcccgtgagcgtcacaagttcgggttatactaagcgcattgcaggagaaggagcctatatgaatcaatcttatggccggttggtgagccgcgccgctatcgccgcgacggctatggcctccgcgttacttttgatcaaaatttttgcgtggtggtataccggttctgtcagtattctggctgcgctggtggattcgctggtggacattgccgcctcgctgaccaacctgctggtggttcgctattcgctacagcctgctgatgaagaacatacctttggtcatggcaaagcggagtcgctggcggcgctggcgcaaagcatgtttatctccggctcggcgctgttcctgtttctcaccggcattcagcacctggtgcgtccggagccgctgcaggccgccggcgtcggggtcgtcgtcacattgatcgccctcgttagtacgctggcgctggtgactttccagcgctgggtggtgcgaaaaacccagagccaggcggtgcgggcggatatgcttcattatcagtctgatgttatgatgaacggcgccattctggtggcgctgggcctctcctggtacggctggcatcgcgccgacgcgttgtttgccctggggattggcatctatattttatatagcgcgctgcggatgggctatgaggcggttcagtcactactcgaccgcgccttgcctgacgaggagcgtcaggacattatcaccatcgtgaccgcatggcccggcatccgcggggcgcacgatctacgaacgcggcagtcagggccgacccgctttattcagattcatttggaaatggaagataacctcccgctggtgcaagctcacgtgattgcagaccaggtggagcaggcgattctgcgccgtttcccggggtccgatgtcattatccatcaggatcccagctctgtggtgccagcggcgcagcagggcttttttgagcgttaggttatagtctgtaaactcgatgtaaaaatgtggggcagatcggcattttttgtataaattaccgccgtttggtctgacctgaatcaattcagcttgaggcgtttgatatactattgtcattagcgtcgtgcactcctggtgagggagcgcttcaggcaacagaattattttttgcttcctaagttcagaggtagtcatgattaagaaaatcggtgtgttgacaagtggcggtgatgcgccgggcatgaacgcagcaattcgtggcgttgtgcgcgcggcattaacggaaggtctggaagtttttggaatctatgacggttacctcggattgtatgaagaccgtatggttcagctcgaccgttacagcgtttccgacatgatcaaccgcggcggcaccttcctgggctccgctcgcttcccggaattccgcgaagaacacatccgcgctgtggctatcgaaaacatgaagaagcgcggcctggacgcgctggtggttatcggcggtgacggttcctatatgggggcgatgcgcctgaccgagatgggcttcccatgcatcggcctgccgggcaccatcgacaacgatatcaaaggcactgactacaccatcggcttctttactgccctgagcaccgtggtggaagcgattgaccgtttgcgcgacacctcctcttcgcaccagcgtatctccgtggtggaagtgatgggccgttactgtggcgacctgaccctggcggcggcgattgccggcggctgtgagttcatcatggtgcctgaagtggaatatacccgtgacgatctggtggcagaaatcaaagccggtatcgcgaaagggaaaaaacacgctatcgtggccatcaccgagcacatgtgcgacgttgacgagctggcaagctacatcgagaaagagactggccgtgaaactcgcgccaccgtcctcggccacattcagcgcggcggttccccggttccttacgaccgcatcctggcttcccgcatgggcgcctatgcgattgagctgctgctgcagggccatggcggccgttgcgtcggcatccagaacgagaagctggtgcaccacgacatcatcgatgccatcgagaacatgaagcgtccgttcaagaacgactggctggattgcgcgaagaaactgtactaagttacgcgccggataaacaaaaggccttctcatggagaaggccttttttatggcggaaggtttattcgatatccagcgggtcttccgacaggatcatcccggtgttatcggcatacagatggtcgccggagaagaaagtcaccccgccgaaattgacgcgcacgtcgctttcgccgatgccttcgccagccgcgccgaccggaatagccgccagcgcctgaataccaatgtccagctcctcaaggtcgtcaacctggcgcaccgcgccatagaccaccaacccttcccattcattctggacggccagacgcgccaggtctgcgtcaattaacgcgcgtcgtactgagccgccgccgtcgatcaggagaatatgaccacggccattctgctcgagcagatcgtagagcaacccgttatcctcgaaacatttaaccgtaatgatctgtccaccaaacgacgaccgtcctccaaagttagagaacagcggttccacgacgttgacatcttcctggtagatgtcacaaagctcggaagtatcgtatttcataggcttaacgttcagttgctgcgagagtttttagtatatcccgcgaatcgcattgttggcaaaatcatcaattgttaattgatatttgtcagttaagccatcagcttactggcaataattccgataacaaacagcaggttggtcagtaaggcccctttgaccgtcttttcgagcattggccgcatcgccagcggatcggattcgcgcaggacgtagcgcgcctgtttcaccagcagcggcgtggcgagaataaacagccagccccaggctgaatgcagcgccagcaggttaaacagcgccagacacagcagggcgccgagcagcaggcaggcatgatagcggcgggcattgaccgggcccaggcgcacggcgagggtgttcttcccgttctgccggtcgctgtcgatatcgcgcagattattgatgttcagcacggcggtcgccagcagaccgcaggctgtcgccggcagaaaaatggccgcttccacattatgggcttgcagataccagctgccgaggacgctcagccagccgaagaaaacgagtactgagatatcacccaggccaatatatccatacggacgggtgcccaccgtgtaggtgatggcggccacgatagacaggcctcccagggcgaggaagccgatgaaatcgccgacgctctgccaggcggcgcacagcagcgccagaccaaacaggcagatgagtacgacggtgacgatcagagcgcgcttcatctgctggggggtaatcacccctttctgcatcccgcgcagcggcccgatgcgatccggtttatcgctccccttaaccgcgtcgccgtagtcattggcgaggttggaaagaatttgcagcaagccggcggtgatcagcgccagcagggcaacccagggatcaaaatggccctgctcccaggcaaggacggtgccaacaataatcgcggcaaatgccagcggtaacgttttaggacgcaggctttccagccacgcctgtgaacggctgatatcagtcatagttattctagccaataaaaatgggggcgatagcccccatcaacagtgatgaaaatgcattgcaccggattataggataaaacggctcagatcttcatctgccaccagaacatccaggtgtttactcacatattcggcatcgatagtgacggtctggccgttcatctcgctggcatcataggagatatcttccaccaggcgctccagcacggtgtgcaggcgacgcgcaccgatgttctcggtggtttcgtttacctgccatgcggcctgggcgatgcgcttgatgccgtcttcggtgaattcgatgttcaccccttcggtcgccatcagcgccttgtactgcacggtgatggaggcattcggctcggtcaggatgcgctcgaagtcgtgggtggtcagcgccttcagctcaacgcggatcggcagacgcccctgcagttccgggatcagatcggatgggctggccacctggaatgcgccggaggcgataaacaggatgtggtcggtcttgaccatcccatgtttggtggagacggtgcagccttccaccagcggcagcaggtcgcgctgtacgccttcgcgggagacgtccgggccggaggtgttgccgccgcgcttacagattttgtcgatttcgtcgataaagacgataccgtgctgctctacagcgtcgatggcttcctgcttcagctcttccggattgaccagtttggccgcttcttcttcaatcagcagcttcatcgcgtctttgattttcagcttacgcggtttctgcttctggccgccgaggttctggaacatagactgcagctggctggtcatctcttccatgcccggaggggacatgatttcaacgcccatcggcgccgcagcgagatcgatttcaatctctttatcgtccagctggccttcacgcagttttttacggaacgcctggcgcgctgcagacggttcctgcgacggctcagtctggccccagttgttcttcgccggtgggatcagcacgtcgagcacgcgctcttccgccagctcttccgcgcggtaacggttcttatcgatggactgcatgcgaaccattttgatcgccgcatcggtcaaatcgcggatgatggagtccacttctttaccgacatagcccacttcggtgaacttcgtcgcttcaactttgataaacggcgcgttggccagttttgccagacgacgggcgatttcggttttaccgacgccggttgggccgatcatcagaatgtttttcggcgtgacttcatgacgcagctcttcgttaagctgcatccgacgccagcggttacgcagggcgatagcaacagaacgcttggcggcgtcctgaccgataatgtgtttgtccagttcgctgacaatttcgcgtggggtcatttcagacatgggagatccttacgctttagaaggtaattcttcgatggtgtggaaatggttggtgtagatgcagatatcacctgcaatatccaacgctttctcggcgatgtcgcgcgcgcccatatcggtattttccaacagcgcgcgggccgcggcctgggcgtaaggaccgccggagccgatagcaatcaaatcgttttccggctgtaccacgtcaccgttaccggtgatgataagcgacgcgttttcgtccgcgacggccagcagcgcttccagtttgcgcaacatccggtcagttcgccagtctttggccagctcaacggcggccttcaccagatggccctggtgcatttccagtttacgttcaaacagttcgaacagcgtgaaggcgtcggcggtgccgccagcgaaaccggcaatcactttgtcgttgtacagacgacgcactttcttcacattgcccttcatcacggtgttgcccagcgtggcctggccatcaccggcaataacaacatggccgttacggcgaacacttacaattgtagtcacgagcagaccccttggttgcaaaagcggaacaggggccccgcgctgtccgcggggccgaatgcaattatagatgggggggattttgagggtttcaacccctggcggcgagacgaatgcagttcgcgtgtccagccatcttcaggcgggtgatcatctcgttggcgctttctttgcctttcaacgggccaataaccacgcggttccagccattgttagtggtaatgtgcgaagcaaacccttcgaaagccagctgagcgcggacggtttcggcctgctcggcgcctttaaaagagccgcactggatcatccagctacgatcgtctttcttctcggcggtggttttcggcgcttcttccacccgagttaccggcgccgcggcctgggtacgcggctgcgtggtattggtatgcgctggcgtctgcagcagatcctggtacggctgctggtttgacgcggtctgcttcggctgttgctgctgaaccggcttcggctgctgaacgcgcggcggctgctgttggacggtctgcgcctgagtctgcgcccactgttgctgctgcgcctgctgctgttgctgcgctaaacgctgacgctgaagcgtctgctggcgctgcgccggcgtttgttcgttccacggcacttcggtcagctgggtcggctgctggcgcatatcggcctgcatctgggcgagcagctggcgctgctcgtcggtcagctgttccggtttcatgacttcgccaccggcggtcggttcggtcggcgcgcggacgccaggctggcggctttccagctctttaatatagcgccagcgctcttccggtttgggcggcaagccgttgccggcggcctggcgattttgcatcgcttccgcttcttctttcttatgatgcgtaatgaaatagaggccaccgataaaggccaccagcacagccgccgcgatcgccaccatcgccggtgaaatcgccggaaggctgctttgcttattccttgagcttcgggtcgtgctctttttgcgccgcgaagaagccggttggctgcggcgtacataatctcgttgtgccactatcgtttcgctgtcttatattcgttcgtcagcccgccatgttacttaagcggcgggcctttgaccagaagagcaggcccgaaagcctgatggttatcgtctgattttttgcgtactgccgcgaacaatcagttcgcaatcgagcagacgcgagccgctgttcacgttatgcccctgcatttgctccagtaatagcagcattccttcacggccgatatcaaaccgtggctgtgaaaccgtggtcaacggcggatcgcaaaattcagacaacgcgatgttatcgaagccgacaattgacaggtcgtccggcactttcagaccgcgacgttttgccagcgataaggcgcccagcgccatcacatcgctatggcaaaagactgccgtgggcggcaccggctgcgccaggagctgctccagcgcattggcgccggcttcgaaggtaaagttgccgcgagcaatatagtgcggatcgacggtgataccgctgcggcgcagcgcctgcacataaccctgcaggcgataatggcacaacggcatatcttccgggccggcgatacagccgatacgctgatgtcccagctcgtggagataatttaccgcgttaaaggccgccgtcaggttatcgatatggacggtgggcagctccagctccggcgcaaactcattcgacatgaccattggcggcaaattgcgctgctcttccacgctggcgtcaaacggcaagcgcgagctgagcagcaccatgccgtcgatctgcttggtgatgataaggtcgataaaggttttttctttctgattctggtgggcgcaatcgccgattaacaccagatagccgtgctcggcggcagtgacttcaataccgcggatcacttcactaaagaagggatcgcagatatccgggacgatcacgaggatcgttcgcgattcgttgcgcttcatattgcgtccgagcgactgcggtaaatagccgacttccagcgccgcctgctcgacccggttacgggtggcttgcgacaccttatcagggttcatcaacgctcgggacacggttgccgtggaaacgtttgccttgagggcgacgtctttcatggtggcggcaaccacttgttttttgggcttcacctggtttctcctcgctgaatggcgctggcatttcccttgggcgctaactgctgcatcatttttatcagatagtcgcggcagtgagttacagaattttcatgaaaaacgtgatgcttgttaaatttttcgatccggctcgcaagagaagccttatccttcaatcggatcgacatccagcacccacttcacttttctcgcctccggaagcgtattgatcagcgccagcgtaccgctaacgatatgttgcagacgcacccgcgaaggatgctgcagcaatatttgccagcgccagcggccgccgcgctttggcgccagcgccggaaccggaccgagcacccatagcttttcgtcggccagcgggctggcctgcagcagattgcgcagctgttgtaaaaacagcggcgcctgctggttgttatggtcttccgcacgaatcagcacatggctggtccacggcggcagctgcatcgtctgccgctctgccagcgcctgttcggcaaaggcgtcgtagcctttatacagcagggtctgcagtagagggtgttccggatggtgggtttgaagaatgacctcgccctgttttcctgcccggcccgctcgtccggagacctgggtataaagctgagcgaaacgctctgcggagcggaaatcagcggaaaacagcgccccgtcgacatccagcagggagacgagggtgacgtccgggaagtggtgccctttggccagcatttgggtgccaatcagaatacgcgccccgccgcgatggacggcggcgagatgctcctccagcgctcctttgcggctggtggtatcgcggtcgatacgcgagataggcacctcagggaacagcggcgccagggcctgctccagctgctcggtgccgatccctaccggcaccagatgcgtggagccgcaggaaggacactggcgcgggattgggcgctggctgtcgcaatggtggcagcgcagatggtgctgcgcctggtgcaacgtatagtaactgtcgcagcgcgggcattccgctatccagccgcaatcgtggcacagcagcgctggcgcaaagccgcggcggttaagaaacaggatcacctggttatccgcttgcaggtgctggcgcatacggctaatcagcgcgggagacaggcccgcctgcagcggttgccctttgagatcgagcacgtgctgctgggccgggcgcgcattgcccgcgcgtttgcttaaggttaactggcggtatttaccctggcggacgttatgcagagtctccagcgccggcgtcgccgagccgagaattatcgggatctgctcgctgtgggcgcgccataccgccaggtcgcgggcatggtagcgccagccttcctgctgcttgtaggagctgtcatgctcttcgtcgatgacgatgacgccgagatctttaaatggggtaaacagcgaggagcgggtgccgatcacgatggccgcttcgccatttttcgccttcagccaggccgagagacgttcgctgtcattgagcccggagtgcagcacttccaccggcgcgttaaagcgctggcgaaatcgggcgatggtttgcggcgtcaggccgatctccggcaccatcaccagcgcctggcgcccctgcgccagcacattctccagcacgctcaaatagacttccgttttcccggagccggtaatacccgccagcagccaggcggagaaacgatcggcggcgctgtggatcgccccgacggcggtggcctgctcggtattcaggcgcaggcgttcgccggcaaccgaatacgcgctgcgccagtcggtgagggcgggcgcttcgcaggccagctccgccagccctttaccgcgcagcgcctgcagcgccgcttcattgaattccagttcgccaacctgatgacgccagattttaccctggcgcagcgccgccagcgcctgctgctgcttccgggagcgtttcaggccgttaaggtcgacaacctgcccctgctcggtggcgaaccagtaccacagcggcgtggcgctggcgggtttgccctggcgcagcataacgggtaatgcatggaacagcacatcgccgatcgggtgatggtaatactcagccgcccacatcagcagtcgccagacagtcgtggagaagaccggctcgtcgtccagcgcttcggcgaccggttttagctcatccagcggcagttcgctgcgctcgctcaccgccgcgacaatgccgatccgctcctgtttgccgaacggcacccgcacccgacagcccgctttgaccgccatgccttcaggcagcaggtagtcaaaagtgcgcggtagcggaacgggtagggcaacgtgggcgacggacatgtcatcttcctgacttgaaatctggcgggatagtatacacattacgataaggcggcgcggatcagtttgcatatgctggtcaaattctgtatgattcgccgcctttgatgcgctttatatcgcattgaagattgaccattaccgcgtgcttcacgctgtcagcagcgtagaaggcgacgggaaattactaatatcgcgtggtgtctggcgttagggctggaagagcgacgcggccttaactgaggttctcccatgaaaaaaggtattcacccaaattacgacgaaattactgctacctgttcttgcggtaatgtcatgaaaatccgctccaccgttggtcacgacctgaacctcgacgtgtgcggcaaatgccacccgttcttcaccggcaaacagcgtgatgttgctaccggtggccgtgttgaccgcttcaacaagcgcttcagcatcccgggcagcaagtaagttgccagaagaagccgcctcagggcggcttttttgtctctcccgcctgcctgggcgggaaagaaaaaagggcggaagattattccgccctttttatcgtctcagtattcccacgtatccgggtcgattcccagttcacgcataatcgctttcgccgcttccgggatctcatcgctgcgctctttacgcaggtcttcatcgttaggcaacggttgtccggtaaaggcatgcagaaacgcttcgcacagcagctcgctgttggtcgcgtgacgcaggttattcacctgacgacgcgtgcgttcatcggtgaggatttttaacaccttcagaggaatggaaaccgtaattttctttacttgttcactcttcttaccgtgctcagcgtatgggctgatatattcgccgctccattcagccatgagataccttaatcctctgtttattagtgaagggccagaatattccgcccgggctataattgcgcgtagtttaccgtatgcgcgggctttctgacatgagataagccgccgacgacgtgcgctaatgcatataattttaacggctatttgcactttgctcaatctatacgcaaagaagtttagatgtccagatgtattgacgtctattgtgacaatgattactctggagcctgacttttcaccgattcagcccaggaacttcccaacatgacgcgtaaacaggccaccatcgcagtgcgtagcggtttaaatgacgacgagcagtacggttgcgttgtcccgccgattcacctctccagtacctataacttcaccggctttaatgaaccgcgcgcccacgactactcccgtcgtggcaatccgacgcgcgatgtggtgcagcgcgccttagcggagctggagggcggcgccggcgcggtgctgaccaataccggaatgtcggcgatcctgctggtgacgacagtgttccttaaaccgggcgatctgctggtggcgccgcacgactgctacggcggcagctaccgtctgttcgacagcctggcgaagcgcggctgctatcgcgtccagtttgtcgatcaaagcgatgagcaggcgctgcgggcggcgctggcggaaaaaccgaagctggtgttggtggaaagcccaagtaatccattgctgcgggtggtggatattgcgaaaatctgtggtctggcgcgtgaggccggggcaattagcgtggtggacaacaccttcctgagcccggcgttgcaaaacccgctggcgctgggcgccgatctggtgctgcattcctgtaccaaatacctcaatggtcactccgatgtggtggccggggtggtgattgccaaagatccggcaactgtcaccgaactggcatggtgggcgaataatattggcgtcaccggcagcgccttcgacagctatctgctgttgcgcgggctgcggacgctgtctccacggatggaagtggcgcagcgaaatgccctggcgatcgttgagtatctgaaaacccagccgctggtgaaaaagctgtatcatccatcgctgccggaaaaccaggggcatgaaattgcggcgcgtcagcaaaaaggttttggcgcaatgttaagcttcgagcttgacggtgacgagcagacgctgcgccgttttctgagcgggctgtcgctgtttacactggcggaatcgctggggggcgttgaaagcctgatttcccatgcggcaacgatgacgcatgccggcatggcgcctgaagcgcgtgccgccgccggaatttcagaaacgctcctgcgtatatcgaccggtattgaagatggtgaagatttaattgccgacctggaaaatggcttccgggcagcaaacgaggaataaagatgagtgtgattgcgcaggcaggggcgaagggtcgtcagctgcacaaatttggtgggagtagtttagcggatgcgaaatgttacctgcgcgtcgcggggatcatgaaggagtattcgcaggcgggggatatgatggtcgtctccgccgctggcagcaccaccaaccagctgatcagctggcttaagcttagccagagcgatcgccttgctgcgcatcaggttcagcagtcgcttcgccgctatcacaccgagctgattggcggtctgctggagcctgcggcggcggatacgttgatagccgcctttatccacgaccttgagcgtctggctggtctgctggacggcggggtttccgaagcggtctatgcggaagtagtcggccatggggaagtgtggtccgcgcgcctgatggcggcggttctcaatcagctgggtatggaagccgcctggctggacgcgcgcgcgttcctgcgcgcggaacgcgccgcgcagccgcaggtggatgaaggattatcctatccgctgctgcagcagctgatggcgcagcatcctaacaaacgtctggtggtgaccggctttatctcccgtaaccaggccggcgaaaccgtcctgctgggccgtaacgggtctgactactctgccacccagatcggcgcgctggcgggtgcctcccgggtcactatctggagcgacgttgccggggtgtacagcgcggatcctcgcaaggtgaaagacgcctgcctgctgccgctgctgcgtctggacgaagccagcgagctggcgcgcctggccgcgccggtgctccatgcccgcacgctacagccggtttccgccagtgatatcgatctgcagttacgctgcagctacacgccggaacagggttccacgcgcattgagcgcgtgctggcctccggtaccggcgcacggattgtcaccagccatgacgacgtctgcctggtggagttccaggtgccggccggtcacgatttcaaactggcgcataaagagctggacgctctgctcaaacgcgcccagctgcgcccgttagccgttggcgtccatgccgaccgtaagctgctgcagttctgctatacctccgaggtggccgacagcgcgctgaaattgctcgatgaagccggtctgccgggcgagctgcgtctgcgtcagaagctggcgctggtggcgatggtgggcgcgggagtcacccgtaacccgctgcactgccaccgtttctggcagcagctcaaagggcagccggtggagttcacctggcagtctgaagaggggatcagcctggtggcggtgctacgcgccgggccgacggaaagcctgatccaggggctgcatcagtccttgtttcgcgccgaaaagcgtattggcctgatgctgttcggcaaagggaacattggttcccgctggctggagcttttcgcccgtgaacaaactacgctctcggcgcgtaccggtttcgagtttattctcgccggcgtagtcgacagtaaacgcagcctgctgaattacgacgggctggatgccagtcgggcgctggctttcttcaacgatgaagcggtggagcaggatgaagagtcgctgttcctgtggatgcgcgcgcacccgtatgatgatttagtggtgctggacgtcaccgccagcgaacaactggccgaccagtatcttgattttgccagccatggcttccacgtcattagcgccaacaagctggcgggcgccagcagcagtgataaatatcgtcagatccacgacgcgtttgagaagacggggcgccactggctatataacgccaccgtgggcgccggcttgccggtgaaccatacggtgcgcgacctgatcgacagcggcgatactattctcggcctgagcggtatcttctcgggaacgctatcctggctgttcctgcagttcgatggcaccgtgccgttcaccgacctggtggatcaggcgtggcagcaggggctgaccgagccggatccgcgcgtcgatctgtccggtaaggatgtgatgcgtaagctggtgatcctcgcgcgggaagcgggctatgacatcgaaccggatcaggtgcgtgtggaatcactggtgccggcgcactgtgaagaggggtcggtcgatcacttctttgagaatggcgaagagctgaacgagcagatgctgcagcgtctggaagcggcccgcgagatggggctggtgctccgctacgtggcgcgctttgatgccaacggcaaagcacgcgtcggtgtggaagcggtacgcgaagagcacccgctggcggcgctgctgccgtgcgataacgtgtttgccatcgaaagccgctggtatcgcgataacccgctggtgatccgcgggcccggcgccgggcgcgatgtgaccgccggggcgatccagtcggatattaaccgcctggcgcagctgctgtaagcgtcgcgttatactcttgaaccagtgaggccactatttgcgttacgcgccctgcggaatacagggcgctctgcgcaaacgcgggtctgtttttcagccatattgtaaaccgtcggctggccgcaaggtctggtagaaaggcgttctcttctacagtgccggcaagccggcagaccattttctgattctcttcctgcgtccaacgctgccatgaattttgccaccagccatgatgggttttcccctgtagctgccacggagccgggctggctgggttccttatctcttcttccacataccatagatcgccttgccgctgacgaaaaagcggcgcccaggcaacgatcgccgcgccgcgtaaaaagcattcatgcgcaataacgtgcgttttcacctctggaaaccgctggctgagcagtttgaaatgaccgtgcgcggcgataaccgggcgcaatatattgccgcgggcatggcgcttttgcattgcgctgccgtactggatttcatcgaactgactgcgttgtaaaaagcgcatttcagtgagagaaatacgttgaataatatcgtcagtctcctccctgtcggcttgtccgccgcgccagtgatagcgtaatgattcgcctaccgcgaaaggagtgaaattagaggtaaaatgaataacattaccgcgcacggcatcaaagcttaataaaaaatagagcttttgcccggcggcattaccctggaatggcgctatcaacggtacgctgcaaatacgtcgtggggcttcaattggggcgatgtgtgggaattttggcgtccagacctttttacagtggcggcactgaaggcgttgcgtaccctgcggattgcggccgtagcgaataatatcccgctgatagcataccgggcaaaaatagccgtagcggcgggcatgatccgtcagataagccgccagccaggggcggaattcccgttcgttaaacagggggggatagctgccgcaggctgcgcagtagagcgccgggtagcccagccgaaaattcgggaaatgatactcagccgcagacggtaaacctaaattgcggcagccaaaagttttacaggcgttaatggtaaagagagtatccactggcaggtcaataccaacgatttttacaggtcgttaattttgtcctgctcaggttgcatacaactgtgaatgctctcacataaaaaagtctttcagaacgtaacttagcggttctttatcactctgaaaggaactccgatgaaactaaaaacaatgagcgcagcacttctgttgactttgcctttctgggcctgcgccaaagatgtcaccataatttataccaacgatcttcatgcccatgtcgaaccttataaagtgccatggatagcggatggtaaacgagatattggtggttgggcgaatatcacgacgatggtgaaacaggaaaaagcgaaaaataacgcgacctggttttttgatgccggggattattttaccgggccttacatcagtagcctgacgaagggcaaagcgataatcgatattatgaatacgatgtcctacgatgcggtgactatcggtaatcatgagttcgatcacggctgggataatacgttgcttcagcttagccaggcgacattcccgattgttcagggcaatattttttatcagaacagcgataaatcgttctgggataagccctataccattatcgaaaaagatggcgtgaaaattggcgtgattggcctgcacggcgtgtttgcttttaatgacaccgtttctgccgcgacgcgagtgggtatcgaagcgcgcgatgaggtgaaatggctacagcattatatcgatgaacttaacggtaaagtggatctgaccgtggccctgatccatgaaggcgtcccggcgcgtcagtcgagccaggggggaaccgatgtgcgtcgtgcgctggataaagatattcagactgcgggtcaggtgaaaggcctggacgttttaattaccggccatgctcacgttggcacaccggagcccattaaagtgggtaatacgttgattctttctaccgatagcggcggcatcgatgtgggtaaactggtgctggattatcaggagaaaccgcaccaattcacggtgaagcactttgagctgaagacgctttatgccgatgagtggaagcctgatccgcagacaaaacaggtcatcgacggctggaataagcaacttgatcaactggtgcagcaggtcattacacaatcgcccgttgaactgacccgtgcgtatggcatctcttcgccgttgggcaatcttgccgctgacgccttgctgttggcagcaggtaggagtacgcagatggcgttaaccaactcgggcgggatccggaatgagatccccgccggggcggtgagcatgggcgccgttatcagcaccttcccgtttcccaacgagctggtcaccatggatctaaccgggaagcagttgcgtagcctgatggagcatggcgccgggttgagcaacggcgtgctgcaggtctcccggggactggaaatgaagtatgacagcagcaaacctgtgggccagcgcgttgtgttattcaggctaaacggtaaaccgattgacgatacgacggtttaccatattgccaccaacagcttccttgcagatggcggcgatggttttgtcgcgtttaccgaggggcaggcgcgtaatacctccggcggctattacgtttcaaatgcggtcgtagactatttcaaagccgggcaaaagataacggatgagcagcttaacgggcagcgcgttgtcgatgtgaagaaataagtttttaaggccgggcagtcagcccggccttaagcgatcagtgggccgcaaataccgccctggcggcaaacaggccgttgagggccgccgggaatccggcatagactgccatctgcatgatcgcttccgtaatctcctcttgcgtcaggccgacgtttaatcccgcggcaatgtgtactttcagctgtggctcggcgttacccaacgccgtgagcgcggcgatggtggcgatttcccggctgcgtaaatcgagccctggcctggcgtaaatatcgccgaaggggaactcaatcagatagcgggcgaaatcgggggcgatatcccgcaggctgtcgacgacggcttccccgcccttaccatccacccgctgaagcatttcctgaccgatgatataacgttcgctggacatcgttttttcctctctgtgatggtgcgttaagaggaagggtagggaagtgtgccggacttgagtaatacccttttcgtgataccttttcagtatgacaacttcaagattacattctctggatattcgcctgctgcgcgcctttgccgtggtagcggaggaaaataacatcagccgggcggcgcagcggttatttatctcgcagccgccgctgacccgccatatccgccatctggaagcgcagctgggggtgacgctgtttcagcgccatagcaaaggcctgatcctgaccgacgcgggtaaagaggtgctggagatgattcaacctctgctggcgctccaggaacgcacgctggcggcattgagtgagctcgccgcccactcgccgcaggctctacgtctgggcgtgacgacggccttcgaacagggcattttcgccgccgttgaggctgcgctgagcgaacatacccgcgcgttgcatatcacccgccacgcctcaccggcgctggctcagcaggtacgcaaaggcaaactcgatgcggcgctggtcgcgttgccgctcaatactgaagggctgcacctgcacccattgccgtatcatgagccgctcattgcggcattacctgcctcctggccggaagccgccaggccagggctgacgttaagcgcgctcaatcatcggccgctgttctggtttaaacgcgagcgtaatcctggtttctttgactacacgcgccgtattttcgaccgggctggctatgccccgacgtatgtggaagagccggccgagcatgatgtgctgctggcgcgtattgcgcgcggggaaggcatgatcctgctgccggcgtccttttccgcgattcagcgtcagggggtggcgttctgcccggtggctgagggcgacgcgatgccgttaagccttggggtgatttatccgcctcaccaggcagagtccgtgcagcaatggctttctctgctggatggcattctggcgactggctagtctcaggctgactcgcgagccaccttatattgcccaccgagccgcttcctgagcgtggccaggtgatcggaagatgaacttttttcaagtaggtgacctattcctcactctttacgcagatttttctattgacgcccgcgcgcttttccgtcatttttacatctggacgtctaaacgtatagaagttcgcaatataacagccattacatgcgattgatgaggtaaggtatgagcttttttcacgccaatcagcgggaagccctgaatcagagcctggcggaagtccagggccagattaatgtgtcttttgaattctttccgccgcgcaccagtgaaatggagcaaaccctgtggaaatccatcgatcgcctgagcagtctgaaaccgaagtttgtttcggtaacctatggcgcgaactctggcgagcgcgatcgcacccacagcatcatcaaaggcattaaagagcgaaccggtctggaagcagcgccgcacctgacctgtatcgatgccagccgcgatgagttgcgcactatcgctcaggattactggaacaacggtatccgccatatcgtcgccctgcgcggcgacctgccgccgggcagcggtaaaccggatatgtacgccgccgatctggtgacgttgctgaaagaggtaggcgattttgatatctctgtcgccgcgtatccggaagtgcatccggaggcgaaaagcgcgcaggcggatttactgaacctgaaacgcaaagtagaagcaggggccaaccgcgcgatcacccagttcttcttcgatgtggaaagctacctgcgttttcgcgatcgctgcgtctcggcaggcatcgacgtggaaatcattcccggtatcctgccggtctccaactttaaacaggcgaaaaagtttgcggatatgaccaacgtccgtatcccggtgtggatgtcaaaaatgttcgaagggctggataacgacgccgaaacccgtcaactggtgggggcgaatatcgccatggacatggtgaagatcttaagccgggaaggggtcaaggatttccacttctacaccctgaaccgcgccgagatgagctacgccatctgccatacgctgggcgtacgcccggcctgagttttcattaacgtttagtgcgatggcgaagccggtattcgccatcgcttttttttgcccaaaacgctgatacaggtcaggggagagcagaagataaagcgcgtatagtgccagcctgataattgacagggatgggttatgcaatggcaaggaagagcgatccactggcgtttggtgggttggcgttattaacgctgatctggagctttagctggatcgcgatgaagcaagtgacgagctatatcggcgcttttgacttcacggcgctgcgctgtatttttggcgccgtggtgctatggatagtgatgttgatccgcggtaaagcgctcaagccgacgcctttcggctacaccctggcaatcgcgttattgcaaacctgtggcatggtcggtctggcacagtgggcgctaatgagcggtggcgccggtaaagtggcgatcctgagttataccatgccattctgggttgtggtgatggccgcgttattcttaggtgagcgcatgcggcgatggcagtatatcgccatcggggtggcatgcgtgggcctgatactcgtacttcagccttggcaactcgactttacctccctgaaaagcgccttgctggcgatcctctccggcgtgagctggggggcaggtgcgatcgtcgcgaagcgtatgtatacccggtatccgcaggttgatttgctggcgctaacgacatggcagatgctatatgccgccgtagtaatgagcgtagtggcctggctcgtcccgcaacgggcggtagactggcagcccgacgttttctgggccctggcttacagcgcaatccttgcaacggcgctggcctggagtctgtggctttttgtactgcgtaatttaccggcaagtatagccggcctgagtacgctggccgtaccggtctgtggcgtgctattttcctggtggctactacatgaaaatccaggaaaggtggaaggttgtggcattgcgttgatagtactggcgttggcgatgatcagtatcaagagacgaggggcatagcctgctccggcctgcagagatgcataaaaaacacccggcatcagccgggtgttttgctctggtttattcccattcctgcaggaagcgctgaccatactggtcggccaccagcagcgcggcgtagacctggtcggaatcaacgccgcccggcatattgtgaatggtttcgccttcagcgcaggcggcttccgccaccagacgcattttggtcgggatatcacctttgatatccagctgcgccagggtgatcggcagcccaacgctgtggcacagcgcggcgacggtctctatttcgtccaccggcgcattttccagcaccagctgcgtcagtgttccgaacgccactttttccccgtgataatagtgatgggcgtcagggatggccgtcatgccgttatgaatcgcgtgcgccgccgcgagaccaccgctttcgaaacccacgccgctcagataggtgttggcttccaccacccgctccagcgccggggtgaccacgtgctgttcggcggccagcatcgctttttcaccctcttcgagtaaggtgttgtagcatagctcggccagcgccagcgccgcctgggtgcacttcccgcccgccatggtggtggcgccgctacgggagcaggcgcgggcttcgaaccaggtagccagcgcatcgccaatcccggcggccagcaggcgggccggcgcgccggcaacgatctgcgtatcgacaatgaccatgttggggttgcgcggcagcatcaggtagctgtcgaattccccttcgtcggtgtatatcaccgacagcgcgctgcacggcgcatcggtggaggcgatggtgggggcgatcgccaccggcacattcataaagtgggccagcgctttcgcggtatccagggttttgccaccgccgatccccagcacggcggtgcacttcgcgttgccggcgatatcgcgtagacggttgatttcattatgcgaacactcaccgccaaacggcgcgatttcggccgccaggccagcgtcggccaggcttttacgcagcatctcttccgcaaaccccaggacgaacttatcaccgaccaccagccagcgctcggccagcggtttcagatagtcgccgaggcgcttgatggcgcctgcgccctggatatatttgcctggtgattgaataatgcgatccatttcgattcctcctcgatgaccgtgacgccgcccgcaggcggctcgcggatccggttacagattcagcgtgccaaaggcgttattccagtcctgttcaaacttctctatggctgactctaccgcaggggtgccgagcatttgttgcgctacatctagtggaagggtgattgcttcgcagccagccagcagacaatccagcgcctggcgtggcgttttgaagcttgccgccagaactttgctctcgggcgcatgcatttccagcagggattgcagctcctgcaccatgcggatgccgtccccgccctgggcgtcgacgcggttaacgtaaggcgcgacgtactttgcgccggccagcgcggccagcaggccttgcgaagcgctgtagacggcggtgccaagggtcgggatgccttctttcttcagcagtttgatagcggcgagcccttcggcggtgaccgggattttgaccacaatgcccggcacggcattgctcagacgtttggcctcttccaccatgccctgcgcgtcgcggctcatggtctgcgcgaagagggtgccctccggaccgacggctttttgcaggcgcggcagcacatcccagaccgggactttaccggcggcgataatgctcgggttggtggttaccccggccagcgggtagatgcgggccaggcgttccacttcggcgacgttggcggtatccagatagagttccattgtgttttcctcaatgcttaattcggtgctgtcgttgaggtaagcatacggctttcgttcgaaggatcgccagatgacaaatttgccaaaaactggataaatgtacgcatcgtgattaaggatgatttagatcacatttatcggcgctggctgggatgggaggttactatagcgcgcacaaaagtcaggtttaacacacaaaaatctagttttttaccggggatgctttttccgtcagctggctatggtactggcggcggtattcagacggcgagcgttccgtagttttgcggaacaggcggcagaagtagttgctgtcggcgaagccgcaggcgtgggcgatgtctttcactttcatatcgtggcccttcagcagcatacgggcctgttcgagacgaatatggtttagatattcattgaagcccattggcccacatttctggaacagatgggaaagatagttgggagagaggtagaacgcctgggccaccgattcccggctcagcggttccgcataatggatgtccatatattggcggatcgcttcaaacaacgcctggctgcgcgaggaggtttgcgcctggctgccgagaagatcatggcagtggctgagcaggctgacgacgatgctgcgggcggtttgctgctcctgcggttgcatccggagttcattgagcgcctgcagcagaaatgatccgacgcgcggcccgcggcgcagcgcctgccgcttgtcgacaacagttatcgccttgccattccagtgctgcagcgagcactccagctgctgcttagcgaacaggatgcttaacagcaggcaaggcgcttgccactgcgggcagttccagctatcgccaggaatatagagcacgtcgttggcttcgaggggaggggcgttatcgccgagcgcctggtcgggcaactgcccatcgaggaggatattcagacggggaaaatccacctgcaccaccggctcagcaggcgagcgcgtctcgccggcgaaataaacccggccgaggctggtctgcttttttagcaatgcatcaataagttgattgatatcgttgtccatcattcttccgttcagcgcatcacccttttcatcataccggacattattccagcggtaaaagcgcttgcctgtcgctcttgcctcccagacaaggtatgttatatcgtaacaatttgtcgccattgatagcaaactcaggagagagtaatgaccagaaagatccccctgctggccttaggattcggcatggctttagccagcgcccaggcgttcgcccacggcaaccatagccatggcccggcgttaaccgaagtggagcgtcaggccagcgaaggcatttttgcggataaagatgtgcaggaccgcgcgctgagcgactgggaaggcgtctggcagtcggtgaacccgtatctgctcaacggcgatctcgatccggtgctggagcagaaggcgaaaaagcccggcggcaagagcgtggaggagtatcgcgcctattataagaagggctacgccaccgatgtggagcagattggcattgaagatgacgtgattgagttccacgttggccagaccgtcaatagctgcaaataccgctattcaggctataaaattctgcattacgcctccggtaagaagggcgtgcgttatctgttcgagtgccagcagggcgatgccaacgcgccgaaatttgtgcaattcagcgaccatatcattggcccgcgtaaatcacagcatttccatattttcatgggcaatgaatcacaggaggcgttgctgaaagagatggataactggccgacctattatccgtatgcgctgcataaagaacagatcgttgatgagatgctgcaccactagaacgggcggaaaacccccggccgggcggccggggagagatagattaaccggtgttacgcataccggcggcgacgccggcgatggtgaccatcagcgcttgttcaacgcgcggatccgggtccttgccctcttcttcagcctggcgtgaacggtgcagcagttccgcctgcaggacgttcagcgggtcggtatagatattacgcagctggatagactcggcgatccacggcaggtcggccatcagatgggagtcgttggcgatggccagcacgacgttgatatcggcagccagcagcttgcgcagctcggaacccagcgcccacagctccggcttcaccaggcgctgatcgtagtactccgccagccacaggtcggccttcgagtaaaccatctccagcatgccgaggcgggtagagaagaacggccagtcgcgacacatggcttccagttcactctgttttccaccttcgaccaccttctgcagcgcagcgccagcgcccagccaggctggcagcattaggcggttctgggtccaggcgaagatccacggaatggcgcgcagcgactcgacgccgccggttgggcgacgttttgccggacgcgaacccagcggcagtttgcccagctcctgctccggggtcgcagagcggaagtaagggacgaaatctttgttttcacgcacgtagccgcgatacatcttgcacgacacgtcggacagctcggccatgatgtcgcgccattctgctttcggctccggcggcggcagcaggttggcttccagaatggcgctggtatacagcgacaggctgctgatggtgacttccggcaggccgtacttaaagcggatcatctcgccctgctcggtaacgcgcaggccgcctttcaggcttcccggcggctgcgagagcagcgcggcgtgggccggcgcgccgccgcggccgatagagccgccgcgaccgtggaacagcgtcagttcaataccggctttttcgcaggttttgatcagcgcgtcctgcgcctggtactgcgcccaggaggcggccatcacgccggcatctttagcggagtcagagtagccgatcatgaccatctgcttgccctggataaagccgcggtaccagtcgatattcagcagctgggtcatgacgtcgttggcgttgttgaggtcatccagcgtttcgaacagcggggccaccggcagagcaaagccaatcccggcttctttcagcaggagatgaaccgccagcacatcggacggcgttttcgccatcgagatcacgtaggcggcgatcgatccgcgcggcgcctcggcgatcaccttgcaggtgtcgagaacttcacgcgtctcttcgcttggctcccactggcgcggcagcagcggacgtttggaattcagttcgcggatcaggaaagcctgtttgtcggcttccgaccagctttcgtagtcgccgatcccgaggtaacgggtcatttcacccagcgcttcggtatggcgggtgctttcctgacgaatatcaatacgcaccagcggtacgccgaaagacttcacgcggcgcagggtgtcgagcagctcgccgttggcgataatgcccatgccgcaggcctgcagcgatttatagcaggcgtacagcggctcccacagctgctcgttctgagtgatcagtcccgccggtttcggcagcttctggcctttcaggcgcgcttccagccaggcctgggtctccatcagctgagagcgcagttttttcatcagataacggtaaggttcctgagcgccctcggcgccagccagggcgcgcagctcgtcggtacactccaccatcgacagctcggagatcagcacctgcacgtctttgaggaacaggtcggtcgctttccagcggctgagcagcagcacgtggcgggtgatgtcggcagtcacgttcgggttgccgtcgcggtcgccgcccatccacgaggtgaaacgcaccgggacgaagtccaccggcagctgatagccaaggttggcttccagctgttcgttcagctcgcgcagatagttaggcaccccttcccacaggctgttttccaccaccgcgaagccccatttggcttcatcgaccggggaagggcggtgcttacgaatttcatcggtatgccacgactgggcgatcagctggcgcagacggcgcattagctgatggtgctcgtagtcagcgatatctttgttgtccaactgcttaaggcagttgttcacttccaccattttatggatcagcgtccggcgggtgatctcggtcgggtgggcggttaacaccagctccagagacagcgattccaccgcttgtttgatggtctcttcgttgagattgggttggtctttgagctttctcagggtacgcgcaatgacttccggattgctggccgcttcgccattggccgaaatgctgtggtactgctcagcggtgttggccagattcagaaactggctgaaggcacgggccaccggcagcagttcgtcgtttgacaaattctgcagcgtggtcagcagctcctggcggttagcttcgttgccggcgcgtgaagatttggacaacttacggatagtttcgacacgatcaagaatattttctcccaatgcatccttgatggtatcgcccagcaccttgccgagcatactgacattactacgcaatgcggaatattgttcgttcatgttaccccagacaccccatctcattttattttgttatatccgctgcgctggaacgtgagcaacggataagcaacccgtcttttataaagccacgtaaatacccccacgtcaattactgcgaaatcgcttcagcaaacgagtaaatcgccgtaatttgcgaaatttaattcagggagcgctggataagtatcgcttatggaaatgtgacgatcgtcaccgttccgccccgggagaacggggcggaaaaagagggcgattttagtgccagcagaagtgatgaaccacctggctaatcagctcccgggtcggcttgataaagcgcgtctccagatactcgtcaggctgatgggcctgattgatggagcccgggccgagaaccagcgtcggacatagcgtctggataaacggcgcttcggtgcagtagttcaccacgtcggtctgcgcgccaagcagtttctcgaccacctgcaccagcttatggtccggcgggcactcgtagccggggatcggcggatgcagctcagagaccgtcaggcggcccggccagcgttcgctgaccggggccagcgcctcgcccaacagaccattaagatcgtttagggtcatccccggcagcgggcggatatccatatgcagttcacagcaggcgcagatacggtttgaggcatcgccgccatggatagcgcccaggttgagggttgggtaagggaccgtaaacgcctcgaagtgatagcgctctttaagcagatcgcgcaactgcataatccggccgatggcgtcgtgcatcagctcaatcgcgttgaccccgcgcgccggatcgctggagtggccggactggccctgaatacggatcgcgttggacatatggcctttatgggcgcggatcggctgcagggaggtgggctcgccgatgatggcgcagtccgggcgcagccgggtggtttcggcaaagtagcgcgcgccggccatgctggtctcttcgtcggcagtggccagaatatacagcggctttttcagcgtggtgacgtcgacatcgcgcagggcgtcgagaataaaggcgaagaagcctttcatatcggccgtgccgagaccgtagagcttgttatcgtgttcggtgagggtgaacgggtcgcgcgtccagcggccatcatcgaacggcacggtatcggtatgcccggcgagcagcaggccgccggcgccgtgtccggtgctggccagcaggttgaatttatggcgcgtatccggcaccggctgtatctcaacattgaagccgagatcgcggaaccagcctgccagcaaattgattaaagactcattgctttgatcgagagcctcttcagtcgcgctgatggacggtgtggcgatcaacgcgcggtaaatctcgataaagggcggtaaattgtttttcattgttgacacaccttgggtcgtgatagtatcaatattcatgcatttattgtgaataaaaatacaatatcgttgagcgtaagaaaacccatcgaatgtaaggagatgcgcttccaatgttaaatacgctgattgtgggtgccagtggttatgccggcgcagagctggtgacctatatcaatcgtcatccgcatatgaacataaccgctttgacggtctccgcgcaaagcaatgatgcgggaaaattaatttccgacctgcatccgcagctcaaaggcattgtcgatatgccgctgcagccgatgtccgatatcagcgaattcagcgctggcgtggacgtggtgtttctcgccaccgcgcacgaagtgagtcacgatctggcgccgcagttccttgccgctggctgcgtggtgttcgatctctccggtgccttccgcgttaacgatggggcgttctacgaaaaatattacggtttcactcatcagcatcccgacctgctcaaacaggcggtgtatggtctggcggagtggagcgcggatgcgcttaaagacgcgcagttaatcgcagtgccaggctgctatccgacggcggcgcagctgtcgctgaagccgctgattgaggccaatctgctggatctcaaccagtggccggtaatcaacgctaccagcggggtgagcggcgcgggtcgtaaggccgcgatcggcaacagcttctgtgaagttagcctgcagccgtacggcatatttaaccatcgccatcagccggagattgccagccaccttggggcaaaggtaatttttaccccgcacctgggtaattttaagcgcggcatcctggaaactatcacctgccgcctgaagccgggcgtcggccatgcgcagatcgcggcggtttaccagcaggcttacgccgataaaccactggtacgtttatatgataaaggcgtgcccgctttgaaaagcgtcgaaggcctgccattctgtgatatcggttttgccgtgcaggacgatcatctcatcgtcgtcgcggcagaggataacctgctgaaaggcgccgcagcgcaggcggtgcagtgcgcgaatattcgtttcggcttcgctgagacgcagtctcttatttaaggtgtgatgatgaacccattaattatcaaacttggcggcgtattactcgatagcgaagaagcgctggagcgcctgtttaccgcgctggttaactaccgtgaagcgcaccagcgtccgctgattatcgtccacggcggcggctgcgtggtggatgagctgatgaagcagctcaacctgccggtgcagaagaaaaatggcctgcgcgttacgccggctgagcaaatcgacatcatcaccggcgcgctggcggggaccgccaacaagacgctgctggcgtgggcgaaaaaacatggtatttcctcggtaggcctgttcctcggcgatggcgatagcgtgaaggtgacgcagctggatgctgagctgggccatgtcgggctggcgcagccgggctccccgacgctgatcaacaccctgttggccggcggttacctgccggtggtgagctctatcggggtgaccgatgaaggccagctgatgaacgtcaacgctgaccaggcggcgacagcgctggcggccaccctgggggcggatctgatcctgttgtctgacgttagcggtatcctcgacggtaaagggcagcgcattgccgagatgaccgccgagaaagcggagcagctgatcgagcaggggattatcaccgacggcatgattgttaaagtgaatgcggcccttgacgccgcacgtgctctgggtcgtccggtggatatcgcctcctggcgtcacgccgagcagctgccggcgttatttaacggcacgccgatcggcacacgtattctggcttaagatttcatgcccggcggcgcgtcgtctgccgggcttacaagaccgtaggccgggcggcacaatgccgccggcggaactaacgaataaaggaagcatgttatggcactttggggcgggcgttttacacaggcagcagatcaacggttcaaacagttcaacgactcgttgcgcttcgactatcgtctggcggagcaggatatcgttggctctgtcgcctggtcgaaagcgctggtaacggtcggcgttctgagtgccgctgaacagcagcagctggaagaagtgctgaacgtgctgctggaagaggtgcgcgccaatccgcagcaaatcctcgccagcgatgccgaagatattcacagctgggtggaaggcaagctgatcgataaagtgggccagctgggcaagaaactgcacaccgggcgcagccgtaacgaccaggtcgccaccgatcttaaactgtggtgcaaagataccgttgtcgaactgctctcggcgaaccgccagctgcagagcgcgctggtggagaccgcccagcagaatcaggacgcggtaatgccggggtacacccacctgcagcgcgcccagccggtgacgttcgcgcactggtgtctggcctacgttgaaatgctggcgcgtgacgaaagccgtctgcaggacgcgctgaagcgcctcgacgtcagcccgctgggctgcggcgcgctggcggggacggcgtatgaaatcgaccgcgagcagctggccggctggctgggctttgcctccgccacccgcaacagcctcgacagcgtgtccgatcgcgatcatgtgctggagctgctttccgatgcggctatcggtatggtgcatctgtcgcgctttgcggaagatctgattttctttaactccggcgaggcgaacttcgtcgagctttccgaccgcgtgacctccggctcctcgctgatgccgcagaagaaaaacccggacgccctggagcttatccgtggcaaatgcggccgcgtgcagggtgcgctgatcggcatgatgatgacgctgaaaggactgccgctggcctacaacaaagacatgcaggaagataaagaggggcttttcgacgccctggatacctggctcgactgcctgcatatggcggccctggtgctggacggcattcaggtaaaacgcccgcgctgtgcggaagcggcgcagcagggctatgccaacgccactgagctggcggattatctggtggcgaaaggcgtaccgttccgcgaggcgcaccatattgtcggtgaagcggtagtggaagccattgcgcaagggaaaccgctggaagcgctgaccctggccgatctgcagaaattcagcccggtgattgcggacgatgtgtatccgatcctgtcgctgcagtcctgcctcgagaaacgcgcagcgaaaggcggcgtctcgccgcagcaggtagcccaggctatcaacgaggcgaaggctcgtttaagctaatccttagatatctgccctccctgacccggccaagcccagcgacgccgggttttttatgcaaaaaaaaagcggacgcaaggtccgcaaaagttcacgttggctttagttgttcgggtagagaaacagtgtgacgggtcagtgattttcacaggtagaccgtctttatgggcgtattattgaacagaaaacttgatagggataatcgttcgttgctatgctatctatcgccatggactatcgtggcgatggaggatgaataatgaatattcgcgatcttgaatacctggtagcgctcgccgaacaccgccacttccggcgggcggctgactcatgccatgtgagccaaccgacgctcagcggacagatccgcaagctggaggatgagcttggcgtcatgctgctggagcgcaccagccgtaaggttctgtttacccaggcggggctgttgctggtggatcaggcgcgtaccgtgttacgcgaagtaaaagtgctcaaggaaatggcaagccaacaaggggaaaccatgtccgggccgctgcatatcggcctgatcccgacaattggcccgtacctgctgccgcacatcattccgatgctgcatcagaccttcccgaagctggaaatgtatctgcacgaagcgcagacccatcagctgctggctcagctcgacagcggtaagctcgactgcgccatcctggcgctggtcaaagagagcgaggcctttatcgaggtgccgctgttcgatgagccgatgatgctggctatctatgaagatcatccgtgggcgaaccgcgatcgggtgccgatgtcggatctggccggtgaaaagctgctgatgctggaggatggccactgtctgcgcgatcaggcgatgggcttctgctttgaagcgggggcggatgaggatacccacttccgcgcgaccagcctggaaacgctgcgcaatatggtggcggcaggcagcggcattaccctgctgccggcgctggcggtgccgcaggagagaaaacgcgatggcgtagtgtacctgccgtgcattaagccagagccaagacgcaccatcggtctggtttatcgtccgggctccccgctgcgcagccgctatgaacatctggcggaggccatccgcggtacgatggatggccatttcgacaaggcgttaaaacaggcggtttaagccgttcagcgcggcaacccggtacgcttccgccatggtcgggtagttaaaggtggtgttgacgaagtactcaatggtgttgccaccgcctttctgctccatgatcgcctggccgatatgaataatttcggccgcgcgctcgccaaagcagtgaatgccaaggatctccttggtttcacgatggaacaggatcttcagcgtaccaacgctcataccgacgatttgcgcccgcgccaggtgtttaaactgggcgcggcccacctcatacggcactttcatcgccgtcagctgctgctcggttttcccgacggagctgatttccggaatggtatagatcccggtcggaatatcttcaatcagatgcgctgaggcttcgcctttcaccagcgcctgggcggcaatgcgtccttgatcgtaagcggcagaagccaggcttggatagccgatgacatcgccaaccgcatagatgtgcgggagggcggtctgatacatgctgttgaccttcagctgaccgcggctgtcggtctgcagaccgatattttccagcgccagggtgtcggtgttgccggtgcggccgttagcgtacagcaggcaatcggccttcagctttttgccggacttcaggtgcatgatcaccccgtcatccaccccttcaattttctcatactcctcgttgtggcgaataaccacgccgctgttccagaagtgataagagagcgagtctgacatctcctgatcgaggaaggccagcagacgatcgcgggtgttgatcagatcgaccttcacctccatgccgcggaagatcgacgcatattcacaaccgatcaccccggcgccgtaaatgatcacatggcgcggctcatgctgcaggctgagaatcgaatcgctgtcatagatgcgcgggtggtggaaatcgacatccgccggatggtagggacgcgatccgcaggcgataacgaatttctccgcggtcacagtctcgaccgtgccgtcatggcactccagcgccagagtatgctcatccacgaagtgggcattgccctgcagaatttcacagtggttgcgctcatagaatccctggcgcatatgagtctgctggttgatgacgctgtcggcatggttaaggatgtcggcgaaagaagagcgaagaaggcgggagtggtcgctgtagagggggttttggttaaactcgataatacggctgacggcatggcggagggctttcgacgggatggtgccccagtgggtgcaaccgccgccgacattatggtagcgctcgatgacggcaacgcgtgctccctgtttcaccagtcccatggcggcgccttccccgccaggaccggaaccaatcactattgcatcataatcccaagagtgtgacatggcattactcacctgttttatacataaaataaacacgatgataacattcgctgcgctttaacccaattatcgttgtgcttttttgcagcataaaagcagaaacggctcgtaaacaatcattcacaatccagggcaaaccgattagttttaatctctggtatagtgccagcagggctattggaaggattcatacatcgtgatgggcgtaagagcacaacaaaaagaaaaaacccgccgttcgctggtggaagcggcattcagtcaacttagcgctgagcggagtttcgccagcctgagcttgcgtgaagtggcccgggaagcagggatcgcgccgacgtccttttatcgtcattttcgcgacgtcgatgagctgggcctgacgatggtcgatgagagcggactgatgctgcgccagctgatgcgccaggcgcgccagcggatagccaaaggcggcagcgtgatccgcacctcggtctccacctttatggaatttatcggtaacaacccgaacgccttccgcctgctgctgcgcgagcgctcgggaacttctgcggcgtttcgcgccgccgtcgcacgcgagatccagcactttattgcggaactcgccgactatttagaactcgaaaaccatatgccgcgcgcctttaccgaagcgcaggctgaagctatggtcaccatcgtttttagcgctggcgcggaagcgctggatgtcggccctgagcagcgccggcagctggaggaacggttggtactgcagcttcgaatgatctcgaaaggcgcgtattactggtatcgccgtgaacaagaaaaaatgtcacatcattccgaataacgtgaaggacgagcaatgaaacactcagttcaagataaaggtacgctgctgctggcgctgattgccgggttatccattaatggcgcctttgcggcgctgttcagttcgatagttccgttttccgtcttccccattttatccctgctgctgacggtctactgtctgcatcagcgctatcagaatcgcagtatgcccgttgggctaccgggcctggccgccgccttttttattctcggggtgctgttgtacagcaccgtcgtgcgtgcggagtacccggatatcggttctaacttcttcccggccgttctgtccgtcgcgatggtcttctggatcggctacaagatgcgtaaccgcaaagataccgcagccgagtaagccgcaagcggtaaaaaaaccggcaatatgacgttgccggtttttttgggcctatttgcgggtcagcaggacgccgcactccatgtgatgggtatacgggaactggtcgaacagcgccagccgggtaacgttgtgcgtctggcttagcgtttccagattgcgacacagcgtttccgggttgcacgaaatgtacaaaatacgcggataggcctgcaccattttttccgtctcgctgtccagcccgctgcgcggtggatcgacgaagatggtttcgcactgatagctatgcagatcgataccctgcagccggttgaactgccgcaccccgttcatcgcctgagtaaactcttccgccgccatgcggataatctgcacgttgtcgatatggttagcggcgatgttgtactgcgccgccgccaccgacggtttggcgatttcggtggccaatacgcgatcgaaattacgtgccagcgccagcgagaagttaccgttgccgcagtacaattccagcaggtcgccagtcgcccctttggtgacatccagtgcccactccagcatctgaatgttcatggccgcgttcggttgggtaaagctgttttccacctgacggtagatcatctcccgcccgccaaccggcaggcgttcatctatataatcctgatcgagctcgattttagttttggtcgcccgcccaatcagatgcacattgagcccctgggctcgcagggcgtcacgcagcgcctccgcttgctctcgccaggcatcgtccagctttttatgatacagcagcgaaacgaccgcctggttgctgagggtggtcagatagtcaatctggaacagcttctggcgtagcacgggattgttgcgtacgccctccagcatggcggtcatcagctgattgatcagcgcgctggcggccgggaagctgtcaacgcgaatccgcgaccgggtctgctgatcgaaaataatatggtacagatcgtcgccatcgtgccacagacggaactcggcgcgcatacggtagtggctgaccggcgaacgaaacacttccggaaccggcgcggcaaaaggcgccatcatggtttgcaaacggacgactttttctgccagctgcgcttcgtattgttcggtaggaaggtgttcgggggtcatgatgtatcctgaataaaataagtacgcggggattgtagggaaagcgccggggatgtccagcctcgaatgccgcgggaaatataattagcagtctggacatctatatggttctgattgtagcattcgcctaccggtcctgtgagttaaaagggaacccagtggaaatctggggctgacgcgcagcggtaaggaaggtgagaaatgagcgcactcggtgcagacactgcggctagccgtgggaagtcattatttcttgaaacagcctccaagcccgaagacctgccggaatacgtcgcactgggttttatcgtcgcgagcaactgataaaacctgcggcatcctttttctgtttcggatgcttttacaatgattaaaaaagcttcgctgatgacggccttatccgtcacggcattttccggctgggcgcaggatagcaattcagatacgttggtggtgacagcaaaccgttttcaacagccggtcaataccgtgctggcgccgaccgacattgtgacgcgcgatgacatcgaccgctggcagtccaaagatttaaacgatgtcatgcgtcgtcttcccggggtcgatattgcccgcaacggcggcatggggcagagcgcttcgctgtatgttcgggggacggaggctcgtcacgtgctggtgctggtcgacggtgtgccgatggcgcgtccggggatctccaacggcgtagatatcagtcagatccctatctcactggtccagcgggtggaatacatccgcggcccgcgctccgcggtgtacggctccggagcgatcggcggggtggtgaacatcatcaccatgaccgacgctgagcgttcgcagatcaacgccggcgcgggtacgaacggctatcagtcctatgacggcgcctttaacaagcggtttggcgatacgttggttaccgctgctggcgcctatcagaccaccaaagggtttaacgtccagccgaattcctcttacagcggcgacagcgatcgcgacggctaccgcaataaaatgctgtggggcggggtacagcatcagttcgatgacaacttctcggggttcttccgcggctatggttattccgccaacgctgactatgaccagggtaactggggctacgcaggtggaaacgatgaagatcaatcctatacccaatcctgggataccggtctgcactaccactccggaatttactcctcccagctgattgctaactatcagcgcatcaaagattacaactacagcagcgacgctggccgctatgccgcgggcaccaccctggatgatatggaacagcgctatatccagtggggaaataatgttgtggtaggccatggggcagtgagcggcggcgttgactggaaacaagagaagctgaaatccagcggaacgaccagtaccgacgtgtataagcgtgacaccaccggtctttatctgacgggacagcagcagattgacagcgtgacgctggaagcttccggccgtgaggatcatgacgagcagtttggctggcacggtacctggcagacggccgcaggctgggaatttatcgacggttatcggacaacgctctcgtacggcacaggattcctcgccccctccctcgggcagcagtacggtgcagaacgctttggcatcgcctctaacccgaatctgaagccagaggagtcgaagcaatgggaagcgggccttgaagggttaacggggccggtcgactggcgcctctccgcatatcgctatgagattcaaaacctcatcgattacgacaacaacgcctattacaacgtcaagtcggcgacgattaaggggctggagtggacggggaatataaccaccgggccggtggagcaccatctgacgctgcagtatgttgaccctcgcgatgatgaaaccaataagatcctctatcgccgggcgaagcagcaggtgaaatacgagctgaacggccaggtctacgatctggggtgggatgtgacgtatcactacatcggcaagcgttacgattatgactacgacaactcgcgtaccgtcaatatgggtgggttgagcctctgggatgtcggtttatcgtatcccgtcacctcacacctgacagttcgtggtaaaatagccaacctgttcgataaagattacgagacagtttatggctaccaatctgcaggacgggaatacaccttgtctggcagctacaccttctgatccacgtcccaccgtgctggtgtttgattccggcgtcggtgggttgtcggtttataatgagattcggcagctgctgccgaatctgcattacatctatgctttcgataacgttgccttcccctatggcgagaagagcgaggagtttatcgttgagcgcgttgtggaaatcgtcaccgctgtccagcagcgttatcccctggcgctggcggtgatcgcctgcaataccgccagtaccgtctccctgcctgccctgcgtgaaaagttcgctttccccgtcgttggcgtggtgccggcgatcaagcccgccgcccgtttaacggcgaacggcattgttggcctgctggcgacgcgcggtaccgtaaagcgtccttatacccgtgagctgatcgaccgctttgccaatgaatgtcggattgaaatgctggggtcggcggagctggtggagctggcggaagcgaagctgcacggcgagcctgtgccgttagaagagctgcgccgtatcctgcgcccatggctgcggatgcaggagccgccggatacggtggtgctgggctgcacccactttcctcttttacaggaggagctgcagcgcgttctgccggaaggcacacggctgatcgattccggcgcggcgattgcccgacgcaccgcctggctgttagagcatgaagcgccggatgcgaagtccagcgacgagaataaagcattctgcatggcgctgacggcagaaacagaacagcttttacccgttctgcgtcgctatggcttctcgacgctggaaaaattaccgctctaagggcgttttgcacaaaaaagagacggttgaataattttttgaaaacagggcttgtcaacgtctcagaactccctataatgcgcctccactgacacggaacaacggcaagcaagccgccgggtcagcagggttttagcggtgaagttcagcgctaaaaactgacagagaaaagcaaaataagggcttgactctgaatgaggaaaacgtattatacgggacctcgcaacggtgagctgaaagccgcgttgcaactgctctttaacaatttatcagacaatctgtgtgggcactcaaagtgacatggattcttaacgtcctcggacgaaaaatgaataccaagtctcaagagtgaacacgtaattcattacgaagtttaattctttgagcatcaaacttaaattgaagagtttgatcatggctcagattgaacgctggcggcaggccta

SEQ ID NO: 72 - DNA, 96846 bp, Unknown
  source: /note="Description of Unknown: MKP2_coc_1 Mutant Bacteria sequence"
gctttattgtaggtgggccagttggtgattttgaacttttgctttgccacggaacggtctgcgttgtcgggaagatacgtgatctgatccttcaactcagcaaaagttcgatttattcaacaaagccattttgggactggatattcctctctcaactatctaagagaatttccatttgatgcgattaagttagacagaacattcattagtggtattgcccacgttgcacgggacttatctattgtaagaagcatagtgtctcttggaaaagctttcagtttaggtatagtcgcagaaggtgtggaaaataatgaacagtttgaattgctaaaaaatatgaattgcgatgaatttcaaggttattattattcgaagcctttgtcaggtgatcaactgattgattttttgaggggccaaaaaaaatagggctgtatgtcctattttttcatatactatcgttttccctttttaatttcatacattctttcgtctgcatcctgcatgatagcagagcattcagtatgaatttcctcatcatattcaataatccctgcagaaaaatctatgttgtattttttttgagaattaagattgtagctggtaatcccggccctcaatttatgaaggaattcttctgcttctttataggttgactcgggtaatagaacaccaaattcatcacctcctaatcttgcaacaacgctttttgaactactaagatcttccagcatatctgcaaaattgcaaagtacttcattaccttctgaatgaccgaagttatcattgattggtttaaaattatcgagatctatgatcagaacacagaatgtttttttcttttttttggcttttcttaacgattcatccgtcattagggcgaaagaacgccggttacatatacctgtcaaaggatcagtagttgcttcgtttattattctaaactcatcctctacgatttctgctaaatctttaagcaataagaagtcatctctggttaatactcttggttctgtatcaataatacatattgttccagctatctcaccatctggcagtcttacgggatgccctgcataaaaccggatataaggatcatttttaactaatttattttctttgaatcttggatcaaggcttgcatcgggcactattaatggttcactaagatctactgctattgtacaaaatgaatcacttctatctgtctcttttatcttcagcccataacatgacttaaaccattgcctgtctctatcaattaatgaaacaagtgctattggtacatcaaagagtttggtggcaatcctcgtcaatctgtcaaatcgttcttcatattttgtatcaaggatccccatagaatataatgataataacctgttctcttctttatggtttgtcataattttcatcttgagtggttattgcagggtagtgttggttatcgctatcttatcagaattgtcctggaactcaataatcccaatatctcataatcatataaaacttaacaagtttccaataaatcatgatgaatagtgaactgttacatctaatcatctgtgacctgaagcgctcattatacacttccatgtattcagaatgcataatgatttgtatattaaaaatcgccataacttacaatgacttattttttgtggcacaattaaagcgcatctgttcaaataaatgtaaagacattaatgcttgatcttcatggtttcttatgaaaaccagtggctgaagaaacgtatggcagttctgaatctgaacaagacgagacggcatgaaaggttcaagaaaattgtccaggaaggtacatagtttccttatccaatattttctactgagggtatattgtatcagcttaagacaggaactgttgatacagaacagaaaagttcaacacagcctgaatctgcgcgacgctaaattttttccttctggcgaaccaacaaacagcccgtttatagagagattctgcagacgacaaaaggattaatccctgaaattgcactgaattgtcacctgaagatgtgcaggacaagccagattactcttacaagggataccatcgtaatttagcaaaaacacctaagacctaaacgacagctaagtacatagtgccggacggatcatgattttttatttaacttacggacttcatttttcagcaattatcttttctcttctgttgtaaacttatgaaagcgttacgcgaaatcccgcaaggttacaggggtgtaccaggccggaaatcgcgtagcgctctcttctcttctgtttcctgcctaacatgtacatcctggcattactccaattctcccaaaaaccgtaaaacagccatcaacccgcgtcattactggcttcatggaggatctgagcagaaaaaggatcctttacgtatttggttttacccgcaataatgcgggataagacaacaaaaggatccgcgcgctgcgatttattgtcatggcaggatcggcccgtcaggtgcaaaatacctgtatccataaacagtgcgtgcgctacgtgaaaaataactcatgaacagcatcattcccctgcagaattcaccagaacgcgtctccctgctgccgatcgccccgggcgttgattttgcgaccgcggtggcactccggcggatggccacctcaacaggtgccacgccggcttacctcctggcgccggaagtgagcgccctcctctggtatatgcctgaccagcgtcaccacatgttgttcgccaccatgtggaataccgggatccgtatcggtgaagcccggacgctcaccccggaatcgttcgacctggatggtctgcgcccgtttgttagggtgctgtcggagaaagtgcgcgcgcggcgcgggcggccaccaaaagatgaagtgcgactggtgccgctgacggatgccagttttgtgcgtcagatggaaagctggatggtcaccacccgcccccgccggcgtgagccgttatggccggtcacggatgagacaatgcgcaactggctgaaacaggcggtgaagcgggctgaagctgacggcgtgcatttttcgatccccgtgacgccgcatactttccgtcacagctatattatgcacatgctttatcaccggcagcccaggaaggtcatccaggcactggccgggcataaggatccgcgctcgatggaagtctatacccgggtatttgcgctggacatggctgccaccctggccgttccctttaccggtgacggtcgcgatgccgcggagatccttcgctccctgcccccggccggctgagattggcacgcctggcatgacgtcctgtattccgctaatacggaatacaggagcagagcgcattcagccccctccctgctccagcacaccagtccatcatgctgatgactgaaccgccgtggtcttacccggtgacctgcaatcctgcaggcatcaacataccgcagacaagacagggcacaatgcaggcattctggccgtgcatcccacggtgcgttatttcctgaaagctcagcgaatcatcccgttaactgcgacagtcattgaccatctgtggcccacatttttctgccatccggctcccgtttcctgatcgcatttagcagcgtgaagctggcgccgggttatacaaacagctgcagtctcatcctgccgggctaaatctgcagtacacaggggaacggataccatcaggtaacatgaccgtctcagcatccgattgagatcttcgtaaggggtatagagctttactgaaaaattgactgtggcatgttatcacccatgaaatagtgaacagaccagggaatacccccgttaaacccgcatgccgtagtcaatatctgcgtatcaagacccgaaatcacatattacagtcaatattgttcgatccgggcagacatgatagagaataaatattgactgcggtatgcgtgatgcatatcacagtcaatggaatgtccttagcggcatacggcagtcatgatatgcatatcgcagtcaattttctggcttcatcgctgagagggcttcagccagtttaagaggatcgatgcccgcagccttcagcgccttaatgacttcgtcataattttgctctggcgccttctcttcttcctcattgcgcggaaccttcacagggccactgatgagtttggggttgcgataatgcacgctgaaataggtggctcggccacgtttaaactcggtgtaatccagataaccaatatcccgcagctgctccatcgccttacgcaccgtgtggttctgcgtatagacatttgaggtgagattcagccgctcacgcatccgtttcatggaaataggtgcaggattctggggaagactttcgatgtaggtataaagcgcctgggctgattccttgcgctgcagggcgtcaatggctttcagccgcagcagtacccttctgtccatgtggtaaagctcaaacagcttaggttcagccttgatctcaacgatatcctcgttgatgtcataataggctgactgcaccagatgggtggtccatcctttggtctcgctctggaacttcaacgtaaccgaggcgagtttaaacagggaattactgatgcgatcgcgcatttttttgtttgaacgacgggagtcaaatccgcacatcttaacgaattcgacgaacgacagttccagggtgtcactttttaccccatactccgacatggagcgaattatccccagccagactttaaaatccgtgtccatatcaagacgcgaaccggtgatcttaacgtcagtgtacccttcgcttttggcaatggacagctgtacaagctcctcagtcgcgtctgtaacgtttttccggttcgccttgctcttccctgttgatttcagagttgggacgaagagaccgagtctcatgagcgctactggctgcacggtactggtgctgttgacatccagcttaacaacttcgccggttgtcttatcaacttcctgaaggttcagaagtaagctgttattttcgctcgtcatcttgatcctcaacggttatccacaaaaggatgtagtaatacgtatcgcagtcaacggatatacatacctctgtaaataccgttgcatatcacagtattagattatgcatataacagtcaacattttacattccgcagtcgatccagacagacgttaaagccagttacagcgcatgctggagcgatccggggatctcttttggatctcactatgatctccttgggatcaattattggatcgagaccatgaataacccagatacaaggccggaagcgccataccagatatccagaaccctggcctgattttcctgaatacgctctggaagattgagatctacaggtacaacaatgaaacattgactgcggtatgctgagtcgtctttcctctttctcgacacagatgcggtaagcatcataccatagtcaatatattacataccgcagtcaatttcattataactggcttatccagagccatctttagcaacccgacgtacgtgcaatctgtgaattctgtgattttccgcttcctcgccgctttctcactccgtgagatcgcttactgcggcgagcggcagtgattaatattgactgcggtatgtactcttttgtaatcccctgcgttctttgcatcacccaatgcggttcactttgcactttttcgtgcactttgcgtttttattgttgctttgcaataaattccaagatttaataaaataatgcaaagtgaagattaaaggatgttcagtatgggactcatggatacactcaaccagtgcataagtgctggtcatgaaatgacgaaagcaatcgccattgcgcagtttaatgatgacagtccggaagcccggaaaataacccggcgctggaggattggtgaagcagctgatttagttggcgtgtcatctcaggctatcagggatgccgagaaagctggccggctgccgcaccctgatatggaaacccgtgggagagttgagcaacgcgttggttataccatcgagcaaatcaatcacatgcgggatgtatttggtacacgactgcgccgtgctgaagatgcgtttccgccggtgattggtgttgctgctcacaaaggtggtgtttacaaaacctcagtatccgttcacctggctcaggatcttgctctgaaaggactccgtgttctgcttgttgaaggcaatgacccacagggaactgcttctatgtatcacggatgggtgcccgatcttcatattcatgctgaggacactctcctgcccttttatcttggggaaaaggatgacgccagctacgctataaagcccacctgctggcctggccttgatatcatcccgtcctgtctggcactgcaccgcattgaaaccgagctgatggggaaatttgacgaaggcaaattacctgctgacccgcacctgatgctccgtctggccattgaaactatcgctcatgattatgacgtgatagttatcgacagtgcacccaaccttggtatcggtacgataaatgttgtatgcgctgctgatgtactgattgtccctactccggcagagcttttcgactacacctccgcactgcagtttttcgatatgctgcgtgacctgcttaagaacgtggatcttaaaggctttgagccagatgtccgtattctgcttactaaatacagtaataataacggctcgcagtccccgtggatggaagaacaaattcgggatgcctggggaagcatggtccttaaaaatgttgtgcgcgaaacggatgaagtcggtaaaggtcagatccgtatgagaaccgtttttgaacaggctattgatcaacgttcttcaactggcgcctggcgtaatgccctctctatatgggaacctgtttgcaatgagatttttgatcgtctgattaaaccacgctgggagattagataatgaagcgtgctcctgtcattccaagacataccacacatactcaatcgactgaagatacttcatcaccggcgccagccgcacctatggtggattcattaattgcgcgcgtgggtgctatggcccgaggtaatgctatctctcttccggtatgtggacgggaagtaaaatttacccttgaggtgctccggggagactctgttgagagcgcttcacgcgtatggtcaggcaatgagcgcgatcaggaactacttaccgaagatgctctggatgatctcattccttcatttttactgaccggtcagcagactccagctttcggccgccgggtttctgatgtcatagaaattgcagacggcagccgtcgccgtaaagccgcaatcctgacggaaagtgattatcgcgttctggttggtgaactggacgatgagcagatggctgcattgtcccgactgggtaacgattatcggccgacgagtgcttatgaacgtggcctgcgttatacaagccggctgcagaatgagtttgcaggaaatatttctgcgcttgccgatgcggaaaacatctctcgtaagatcattacccgctgtattaatacggccaaactgcctaaatccgttgttgccctgtttgcacatcctggagaactgtctgcccggtcaggtgaagcccttcagaaggcttttgcagataaagaagaattactgaagcagcaggctgagactctccacgatcagaagaaagcgggactaatctttgaagctgaagaggtcattagtcttttaacatccgtactgaaacaatctccctctccaagggttaatctgagctcacgtcatcagtttgctccaggggcaacagcattgtataagggcgataaaatggtgcttaatctggataggtcccgcattcctgtggagtgtatagagaaaatagaagccattcttaaggagcttgagaaaccaggagtctgatgcggacacgctttagtctacggttatctccctttacttcatttcctttctcacaggccagaaaacataactggcctaaatattctctctgagaccacggtcccacctgcatcgtcggtcaggttatctttctgggaccacggtcccacctgcgtcgtcggtcagcttagctgcctgggaccacggtcccacctgcgtcgtcggtcaggttatctttctgggaccacggtcccacctgcatcgtcggtcaggttatctttctgggaccacggtcccacctgcatcgtcggtcagcttagctgcctgggaccacggtcccacctgcatcgtcggtcaggttatctttctgggaccacggtcccacctgcgtcgtcggtcagcttagctgcctgggaccacggtcccacctgcatcattgtttaggtttccagcctgggaccacggtcccacctgcatcgttggtcaggttatcagcctgggaccatggttgcattgatgtcaatgacgaactgatttttgacatgattgcatcacgaagagcggaataatcttgcagcagaactgaaatatctggcgattgaatagtaatggatcgggattagagccgagtatactgagtacaatttgtcaaatttcgcagtgtattcggtttaatctcctccagtttttaaaggtcaattgctgccgctacgcgctgttcagaccttcgtccggcaagtaaccaatccaggctattttcacaacccagggtgaataacatcattccgtcatcagcatagccacatcatgcatttcgtcacactgtatgatctggggatttcagagacattacttatcacaggttatgcagatgaataagactcaatagattgtttatccacagtgacggggatatacatgtgggtagcttcttgaaagacttatgatgtaaatccagcctcttgactctcacattgccaatatatagctcgtgacctgctccccgttgattagtacaccccgatgttagtaatgtcttcataagccacatgaggacatccccatgaagaagcgtttttccgacgaacagatcatcagtattctccgcgaagccgaagctggggtacccgcccgtgaactctgccgcaagcatgccatttccgatgccacgttttacacctggcgtaagaagtatggcggtatggaggtgcctgaagttaagcgcctgaagtcgcttgaggaagagaacgccagactcaagaagctgcttgccgaagccatgctggataaagaggcgcttcaggtggctcttgggcgaaagtactgacgacagaccagaagcgggaagccgtgatgctgatgtgtgatgcgaccggtatgtcgcaacgtcgtgcctgcaggcttacaggtttatccctgtcgacctgccgctatgaggctcaccgtccggctgctgatgcgcatttatcagggcgcatcactgagctggcactggagcgcaggcgttttggctaccgtcgtatttggcagttgctgcgccgtgaagggcttcatgttaatcataagcgcgtgtaccggctttatcacctcagtggcctgggcgtaaaacgcagaagacgtcgtaaagtgctggcaacagaacgtctgccgctgctccgtccggcggcgcccaatctgacctggtcgatggatttcgtcatggacgcactttccaccggtcgcaggatcaagtgtcttacctgcgtcgatgatttcacaaaggaatgcctgacggtcactgttgcctttgggatttcaggcgttcaggtctcgcgtattctggacagcattgcactgtttcgaggctatccggcgacgataagaactgaccaggggccggagttcacttgccgtgcactggatcaatgggcctttgagcatggtgttgagttgcgcttaatccagccgggaagccaacgcagaacggatttattgagagctttaacggacgatttcgcgatgaatgcctgaatgagcactggttcagcgatatcgttcacgcaaggaaaatcattaatgactggcggcaggattataacgagtgtcgtccacattcagcactgaattatcagacgccatcagagtttgcagcacggtggcgaaatgtaaaatgtgaaggtaaacaaaccgaccttactaactgacggttgtatctaatcctgggggcaggtcactcgactaacttcataatggcgcgccaaaaattagtaaaaaattaccatatggctgtcattgaatttgtgaaggtgagtaccatgccgacatcggcaaaggtacaaaagagtagtattgttccaatgttagagctaaagcatgtctaaagtagcaattgctgggataatgctaaggcagcatcgtttcttgtttactcatataagtgcgtgtaaggaagtgaatatatcaagcccgggccatggcccggcaggatatatttgattacattgaagtgccctgcaatcatatctgacgccacaacttcctctatggattaagcccgaagactttctaataggcctctctgcgaggatgaaatttgtctacggatgaggggacagtacaacaagcaaacaggacctcatattactggctggaagccaagctttcttttaccgggtattgaattttgttttacagtatatgcaagcgctttaacgggatatcgtccgctttgtgaaaaaagcggaagtagctaatcacagtttgagtggagcaactgaatgaaggtcctgtttgttctgcgtaccagacacaatcactcagacagtggcttatttaaaatatgttaatgaaacctaagcaagagaactgaaatggacaaattgttaaatatgctgcgttataagagtgaggggtctgatattgacttcaaatctacccagtaccgctttaacaatggttctgagggtaatgactccaacttattgatagtgttttatgttcagataatgcccgatgactttgtcatgcagctccaccgattttgagaacgacagcgacttccgtcccagccgtgccaggtgctgcctcagattcaggttatgccgctcaattcgctgcgtatatcgcttgctgattacgtgcagctttcccttcaggcgggattcatacagcggccagccatccgtcatccatatcaccacgtcaaagggtgacagcaggctcataaaacgccccagcgtcggcatagtgcgttcaccgaatacgtgcgcaaaccgtcttccggagcctgtcatacgcgtaaaacagccagcgctggcgcgatttagccccgacatagccccactgttcgtccatttccgcgcagacgatgacgtcactgcccggctgtatgcgcgaggttaccgactgcggcctgagttttttaagtgacgtaaaatcgtgttgaggccaacgcccataatgcgggcggttgcccggcatccaacaccattcatggccatatcaatgattttctggtgcgtaccgggttgagaagcggtgtaagtgaactgcagttgccatgttttacggcagtgagagcagagatagcgctgatgtccggcggtgcttttgccgttacgcaccaccccgtcagtagctgaacaggagggacagctgatagaaacagaagccactggagcacctcaaaaacaccatcatacactaaatcagtaagttggcagcatcaccgaagatcgcgggcggaaacatccagatcaccgtcacctcagttcgcaatggaaacgtgaaattccagcacgttcaggtgcattatgagccgaacacgatctatggccatgcagactttactgcgaacctctctaaagcccagcaaacgacgctgcggcagctctatgacggctgcaacccgcgcccgaggcgcgacctactgcgtggtggagccgatcgcctgcaagtcggggcgatggagtttcagtgctcccctgaagagctattgtcgggattgattgaaacgatctacgctatgcgaaacgccctactacacggcgaagtagaccccgacccgagggtactgtcttgctatgagccagcttatcggatcgtaatgctgtttctaggctgcgtgagataagcaggagatgtaccctgtgttcatattttttagatatggcattagtcatggcattgatattttatttgatatttaatctaagtaaattaatatgatatataggcagttgataatagagtgggagtgaggctattatttagcctattgttttatttgatttagtgagtgccattgatgatatgactgcattatcaatggcattttttatggtttaaggccgacgctgaatcgaagatatagcaaataccatgtgaccgtatcagcaaatgccatggtatcgacaaccgggtgcattgcagcgctgtgctgatgccatcgatgctcgctttgatcagaaccgctctctcgacccttgccccagatcgttaaatatgcgccagaggagcacctcgtgatagaaattgtgaacaagacagccgccactcggaatcgaagtatccatataggtgaataaagtttgcggaaaatacgctgagaaaatagaaaagcgtcaatgaagggacataggaatggcgattaacggagagaacggtgttagtgcagtcaccgtggatgaactactcaagcaaggccttcggataccgaactatcaacgcccatacagttgggatgtatcgactgctctacaactggtggatgatatcagcgaagctcttcgagataccgaacgaaaagatattccctatgttttgggtgcaatcattcttcacgatgatggtgagtatctcaatgtagtcgacgggcagcagcgcctgctgactttgcgaatgattcttgcggccttagatccgataaatcatcaaatttcgatgtctggtaacagcgacactcctgtctccctagtttggatagagcttcaaaggcgcctgtcgcagttggaagataaaaaagagtttttggattttatctgtcacaaatgtcagttggtgcgtattgtgacggacgatattgatgaggcatttcgtgtctttgattcccagaactatcgcggcaaaccgcttgcccctcacgacttgctcaaagcacaccacctgcgcgaaatgcacgatgagtccgctgctatgaaagtggctgtcgttgaggcttgggaagccgtaaacgatgaggatctggacaggcttttttctacttttttataccggatatccaagtggtcacgaggcgaaagctcgctcgaatttactattcgggacatcggcatgttcaagggcatttcatcacgatcccacaggtcattttcgccaaatctgcgatatcaccttgcagcacaagccgctatgccacttctaagtgcatggtcggtatcctctacacatgatgcacgaaacgccgggcgcagccgctttcagcttgatgccccgataatcgcaggacgctcatttttcgagatggtgacattcatgcttgacgaattgaagatactggaacaagaggttattgacagaggtttcaaaaactttggcccatctcaaagtcgctaccgctacgtgtacgaattgttcattgccgcgctgctttgctatacaaacaagtttggcgatgaagatgtagatgaagtgcgaaataggttattcgcatgggcatatgccttgcgggtcgagttacttcgtgtgcaatttgtatctgctgacaaccgagcgcgaggtaaaaacgatgcaaataaatcgccttttgttttgctacgtaatgcgatgactggaagtgttgtccgcaaacttccaataacaagtaagccatacagcgataaccacgaaaaggaactcgttgcttttatcaaggggctgcaatgagcaagaaggagttgaaacctgaactgttaacagtaggcaagttattcactgacaattatctgattcctatttatcaacggaactatgcttggcgggccgaacagattgagcaacttattagcgatattcaagactcggtggtagggggccaggacaactattttcttgggaaccttgttgtaatcaagcggggtagagaggatgagttcgaggtcatagatggacaacaacgacttacaaccctctatctgcttcttaccttcctggagcaagacggtgagggtgagaagccgtcggttggccatgcaggccacttgcaatatgagtcgcgcgcacgggcaactgaggccctgctgcgagtagcacaggaggcggctaaggagcacgttcgaccgcagggctccacgagtaatgcagatgctggcattcatgaaggctacagcatcatcaatcagttcttcaaacaaaatgaaaaccttaatcgctcacgcgaaaaattctccgatttcttgctaacgaaggtgactgtcgtccgtgcctcgctgccacccaataccgacctcaatcgctacttcgagatcatgaacactcgtgggcagcaactcaagcaggttgatattgttaaggctcgcctgatgagcaaactgcccaatcaatatgaacgcgaatgctttgcgtgggtttgggattcctgtgctgacatggattcttatgtccagatgtctctgacccgtggtgacacaagtttgcgaaacaaagtatttggtgatgaatggtcctggctggaggtgaccagcttctcttcgctaatggaaagtcgtccgcaatccggcatcaattcatcaaggcaatcctccgaaggggtatcgttgtccttggatgaggcgttgtcaaaatacgctaaagagctcgagtcaaattccactgaagacgagggcaacgagcggtttcgttcgactattgagtttccggcctttctgctacacgttctaagaattatgaaaggcgatgaggtcgaagacgaaggcctgcttgacgacaagcgcctcatcaagtcatttgacgacgccgtaaataatgtacccgatgctaaagccgattgggtgcgtagttttgcatttatgcttctcaagtgccgcaacctcttcgatggcttcatcttgaagcgtcaattcacggcaaacatcggtgacgatggcgattggtctctccagcgactgaaaaaaggaggcggggacaagaagccaaccccgacgtacatccatgttttctcggccagcaatggaagcttagaggaggacgggagtgctgacccacatacccgagatgtattgctgcttcagtccatgcttcggattacctacacttctccgcgaacgatgcactggattaccaaagttcttcgctggctctccgttaaagcccctcgagacgtgaaacatgcggatcttgccgatttgttgaagggatatgcccgcagcaaggttaaagagacattctcctttgagaaagatcagcaaccacaagggtttggtatcagccgtatcgtcttttcgtatctcgactatcttctgttgagtgactcctcaaaacgagatttcaaatttcagttcagaacttccattgagcacttctatccacagcatcctgacaaagaacagtcgggcgcggttgtttcaggttctagccttaacctgcttggcaacctcgcgctcgtaagcgtcagcgcgaactcaaaattcagcaatagcctccccagagcaaaggccgaaaacttcaaggatacaattgaacttcaaagtcccaagctcaagagaatggcggaaatcacccgaaatacaaactgggacgatcagcagataacagcacatcatgaagcgatggtgacattgcttcgtgatgatgtaagtctggtggaggcaagcggaagatccaacccagggcgttgacttctttgaataactgcttttggatgaatatcctttgtggtgtgcaagttgtcagtctaaaagcgttttgcgtcgggcgacacgatcagtacagtctccaagttttcttaccatggtattttgtatggtatcgacatgcagatataattctattttattgattttatagtgttttaagacagcattgatcatcgagtgggtaacataggcttaatacattccttgctcctcgcaccggagcacatcacagatactgattgagatccacttcacgcagcggctggttttgacgttctgttatcatttgcactaggtctttttcgtccagctcatcgagcatttgttcatacagagccgcgggcacacaataaaaaacagggcggttgcggtcaataatcgcgaccgggtagccgccgccggcactggcggtggccaccggatcgtttttaagttcgctgatgctggcagtcacatcacacagaatgatatttgtcatggtccccccctgagacaagtcatctgtatgatcggtaaagtaagctcttgcggcaagtcccgtctgtcatttcgacggtcagaaacgggcaaccggcagctccttccagcgggtggtatatgccggtgacagcatctcccgtttcatctgccagtccggcgcaataccccgtccggcaaaccagactttcccgagtccggaatgattaatgccgtcgagtaccttcatcagcgcatcgctgtgcggccgtggctgcacgtcatcgaacagattcagctgcgcgacgccgttcggactgaaatcattgagcattatccccgcttttgcgtagcggtggccatcgagccagatcctgtccagagacctgaccgcagccgcgataatgtcccgggtgtcacgggtaggggtgtgcagtttttccgtggccacgttaccgtaatacggctcattaaccgcaaaaggggatgtcttgatgaaggtgctgatatgccggcagtactgtcgctcaccgcgcaacttttccgccgcgcgctcggcatactggcagacggcctggcgcatttcttcgtaggtggtgatccgctgcccgaagctgcgactgcagacaatctgctgtttcggcggcggcgcttcctccagtgaaatgcaactctcgccgttcagctcacgtaccgtgcgctccagcactacgttgaagtttttccggataaatgtagggttcgtcagcgacagctgtagggcggtggtgatccccataacgtgcagctttttcgctatccggttccccacgccccagatttcttccaccggctgcaggctgagtaattttgccgttctgcgtggattatcgggcgacagcgccagcacccccctgaattgtggccattcctttgacgcccactgcgccgatttggccagtgtttttgtggcgccgaagccgacaccgatcgtcagtccggttccactgagaacatgcccacgcagctgcctgccaaaatcctccagatccatacagtggccaattccccgggcatccaggaaacattcgtcaattgagtattgttcgacgcggggcgacagctcttccagcagggcgaccacacggttactcaggctcgcgtagagctcgtagttgctggaaaaaacgtacaatttttcaggaaactgcgcctctttgagctggaaccagggggttcccatctttatacccagcagtttggcttcagcactccgggcaataacgcagccatcgttgttactgagaacgacgacaggtttgccgcgcaaatccggcctgaaaaccttctcgcaactggcgtagaaggagttgacgtcagccagggcgaacatcagtctgccctccgggttttatgaatgaaggctgtcaccacgccgaaaatttgcagcgtttccggatccgggtacagggaagggaagtccgggttcatcgcctgcagggctggccgcggcgtcagaagcaggcgttttaccgtaaattcaccctcaatttccgcgataacaatatccccgtgccgcggctgttctgctttatccacgaccaacagatcgccggaatagaggccaatatcagtcattgagttgccaatcgccctgacaaaataggtggagtggcgccggtgaatgcagtactcattcagatccagttcagactcagtgtagtctgctgccggtgacggaaaacccgcagggcatcgctctgtgaacaaaggaatttttactatgctggcttctgatactgcaggaatgaacttcatcgttttttccctcgcttaaggctgtatatatatacagtgtgcgccgggagaccggtaaagatcaaggggtgaaagtccccgaccattgaaggaccagcaatccacagggtccccgagtcatgcgttgtataccgtgaggtatggggcgaagcgttgacaggggtgttgacaggccagccattgagccacgaaatgtatattaaattcccgggtgccgacgttgtactgtttacggaaggcaacatcatagggtgcgttactgcgagtgccatatggacccggcggggtctgagaccctggcatgtcaatacgatctttacgcgggaaccgggagatctcccctctgaccatctgccagtgccggagatggcccgcaccgggaaggcgaggagccgaagccggtgatgtacggagaggagaagtcggactcgctcatagtagctgcgaatctggcgaacaatccgcaaggagcggagtcagtggagcgaaggagcggggccaagggaaacgcggaacagccacacatgcgccggacgcagagccgggaaagtatgtcacagaggctgtcacgcgtgcgggaagctgcgaagcagcggaagaaagaacggtttaccgcattgttccacctcctgacagcagaggcactggagaacgcattcctctccctgagcaggaaagcggctgccggagttgatggtgtcaggtggaaggactacgccgaaaacctgaaggtcaacatagcagatctgcaccggaggcttcatcagggtagttacagggctcagcccggcaggcggcactacatcccgaaagcggatggaaaacagcgcccgctcggcatcgcctcactggaggacaaaatcgtccagtatgcgctggttaagatcctgaatgcagtctacgaaaatgactttatggggttttcatacgggttcagacccgggcgaagccagcacaatgcgctggacgcactggccacagggctggttcggaccaatgtaaactgggtactggatgccgatatcagtcagttcttcgacaaggtaagccatgaatggctaatcaggttcatagaacacagaatcggcgaccagagggtaatcaggctcatacgaaagtggctcacagccgggacctcagaggaaggagaatggcgggcatcggaggaaggagaatggcgggcatcggaggaaggcaccccacagggtgcggttatctcgccgctgctggcaaacatctacctccactatgtcttcgatctgtgggcgcatcagtggcgacgccgccatgccacaggcaatgtggtcatggtcagatacgcagatgacatagtcatcgggttcgacaagcgaatcgacgctcaatgctttcgtatagccatgcagcgcagactgaaggagttcggactcacggtacatccgaagaaaacccgactgacggagttcggccgcttcgcagccgaaaaccgcgccagcaggggaaaaggtaaaccagaaacgttcaacttcctcgggttcacgcatatcagtgggaaagatcgtagtggcaggttcatgctgatacgaaagacacgccggggcaggatgacggcgacactgaaagcgatcaaggacggactacgaaagcgctggcattactcaatccccgaacagggaaaatggctcaggagagtggttcagggatacctgaactaccactcagtcccgggcaactatcccatgatgcggaagttcaggatatacgtaacagacctctggcgacgggcgctgaggcgcaggagccagcaggatgatacgacatggacgaaagcaaacagactggcagccgtatggctgccgaaggttcgggttctgcatccatggcctgtggagcggttcaccgccagacacccaaggcaggagcccggtgcgtgaatagcgcacgccgggatctgtgcggggggtacccggtaacgggtatccctaccgcgacattattttgcggaggccgttttttttcaagtcatcttgttgccgttgtctgtaaccatttgctgttcctgcaaaaacagggaaatttcagaaggatcgctgccagtccggagaatcgttatctaataaaatgtaatatactgacgtacagtgcatttattctgagtggagtgattatgaatacgggtttaaggcaggttctgcgatatgcaggcgtcccggttgacgccgctgaaccggtgcgccggcaattcggtagccgcctgattttaatcgtgacggttgctcttcttccgctgttgattgttgacgtccctcagtggctatttgtgctctctcagattatctggggaagcggtatgtacattggtatctccgtggccagtgataaaccagatcgccgataagctcagaacgagaggtctcccgggccgcctggtgacgggcagctgataaactggcgccatgccatcaacaccggataaggacgtcgccggcttgtctttgccgccggctccgctttgtccggccccctccctccggtctgcggcctttatacgcagccatcgcgtcgcgatgccagcttctgcttttctccctgcgctcgtaaaccgcgacaggggacctcatgttgtatctcctgcatcgcttcgggtagtgccgtgccttcactttagcccggccgctgcagatgcaagggttcgctggcgccgccatcctcgcccggtcgcagtttttttaggaagctcgccgttcttcccgtcgttttctcgctcaggttcgctctaaaaccgtccagaccagcttcgtgctttatctgcgctgcggcctccggtgtcgcccttgcatcttccgctttccgccgggctgtcgtgtcggcacggcacaacccggtgccgcaatcttatgaacctgtggaggttgctatgtatcatgcccgtcaaaccatgctgaatgtagaggagtccgaccgtctctcgttcctgccggatctgtttggtaacgattttctggccggagagatgcaggtctatgcgctcgctgagaaacacatcaccgattactgcggaggcttctggcatttcatccgtattccggagggcggcggctacatgatgcctgacggtgaccgtttccatctgactaacccggataactggtttgatcggtccgtcagcgcggatgcggccggagttatcattacggcgctggcgatcaaccgccgtatctggctgcaccatgaacgcggtgatgctgccctgacacgccacctgatgctgcgggaatcgcagctgtggaatttcattgactctcatgacgaatgcgctgctatttacgcggctctggactgatactatatcggggcgcccgacgccccgtttaaggtcagagacggcacgatctgtgaggagcttacccggcttcgcagatcggtgcggccgcgcgaaaatcctggcaggcttcgcctgccagtgaggcggttcgccacacctgcggcgctgcgtactggcctcacctcaacaggtcgccagttaaggattaagagcgtaatatctgcgtaccttttcttcttttgctgattttgcgtatgtcgcagtggaatattgcctctttttcaaaggaggagcaggacaaagttgccgtcgatagggtggctgctgatgttgcctggcaggagcgcatgaacaagcccgtcatgccggaacttgttgaacgggaacagcctgaacacctgcgcgaatatttccatgaacggttccgcgtacatcgactgaacagtcagcagctgccgcgcgcaaatgcacccgaatataataaaccgggcgatgatcagcagaattgattttcttactcagtgtgtccagggagggtaatctgtgcgtatgtctctgatgtttgctgccgtgacgcttttaaccggtattaacctgttttttattccgtttcagcctgttccggctctgtggggggctatcctggccgttgcttttgttctgattaatgtcgtggcggataagctgcgcctctggagtggtattgcgtggattatcgttgccggcatcatcataacgctgatgctgaaggggaaagagccgggtgacgaatttcgtgtcctgatcaccgttttcgctttcctggcttcaatctggtatagcgttgcgcagttcaggaaggaaaataagctccgttcctgacgccccgtctggtatgccgccggtttatcatggcttctttccggcggcatgaaaaacatattctctccagcctgcatctttacgtttccggcttgctccctgctgtctgtctgctttctcttcttcttcctgctgtgatgtctctttttaacccttaaaggctttaaaagcacacccgcactggacaccttcggctcccggccagctgcgctgtccagtcgtcgagccacactccgctaaccgcgaaaagacgcggtaaactccgccgaacccgctacgcggtttcgggcctggcggctagtgtctgatgtctgaagtcaaggtcaacggcagcgcttgctgcgaccgttccggccgcgccgctttcaccgtgccggcgataaagctgccggcactctgcagggcaacgccgtttcgcgcccgcgctcttcgtcgttgcggcgggtgcctgctccttccccctggcgccgtatcacccgtttgagtccattcgccggggctgagacaagcacagtcgccatcatccgtccaggggaaatggcacgcggtaaaccgcgccctggacagctgccgtcgcccgtgctcgtttacgcccttgcggcgaacggctctcaaacgggtgaagttaataccaaggggcaggttcagcaggtccccgcacaaagtcaaaaccgcggccccggcaactcaacgggtgatgttctttaaaaatcgggaaaaagaaaaatgcaggatccttcattgcgaacgtatcggatcgcatttctgggaagcaatgccagcggcaatctgccgatgtttacccgggtgcaggccacgaccggaaaacgggcgataaaagcgtttattgaacgctgtgaacccgtcaaaggctggtttctgggcgcaccggaagacattaccgatcaggttcagaaggaggaagaagaggcgggaagcaaaccgcaggtatgaaaaaagcagggtaaaccctgcttctcccacgccgtaaaaatcgcacgaacggtttttccggcttcgttaactaccataaggagtcaactttatgatcgtttctattttttcaccttccgcaggcgctgtaaagccccgtcgtcattcgcgcattctgcgcgcagatatcaccgcaccggagattgatcccgctctcagagctttcgggcgtcatatcgccagaagtcaccgcaaagggcgcggtgtccacatccccgcgatgaaaaataccgccctcgggcaggtactccgcacgctggaactgaaacgcgcatttaactgatgaggtgagccgccccgcgaggggcggcaactgcaggaaggagaaaacacaatgacaccgactaccgcacagatcatgacggaaaataccgtcagccagacttaccgggcaacctattcacccgatgataataaattgcgactttacgcatcattacggctcgatgaagaaacgtattccctgatcaacaaagcaggctttcgctgggcgcccaaacagaaactctttgtggcgccagcctggacgccggggcgggaggatgtcctgctttcgctcgccggtgatatcgaggacgaggacagcaccctgtttgatcgccaggagcagcgcgccgggcggttcagtgactacagtgaccggcgggcggttgaatcggagcaggcgcttgcgcatgttgattcgctggcatcggctgtcccgctgggacagccgatcctggtaggccaccacagcgagcgccgcgcgcgccggcatgcgcagaaaattgagagcggcatgaaacgtgccgtgatgctgttcgagcgtgcggaatactgggaacagcgcgcgcaggcctctctgcggcacgcaaaatacaaggagcgtccggatgtgcgttaccgccgtatcaaaaaaatcgaggcggaattacgcaagtcccaaaagcacattgcccggtctgaaaagtatatgacgatgtggcgtgcgcagacgctcgatctgaaaatggcgttactggtcagtaattatgatcatattcatgcctgcttcacgctcgacaaatacccccgcccggcagagaaaagccagtatgagggctcgatgtctctccattctgccctgtcggaggagatcattacttttgaacaggcgcgtgatattgcgatccgctgtcatgagcgcacgattaaccaccaacagcgctgggttaatcattaccagaaccgcctggcctacgaacgcgcgatgctcaatgaaaacggtggcgttgtcacccgaacacaggaatttgaaccaggcgggcaggtactgagccggggagaatggttaaccattctccgggttaaccggagtaagggggaggtgagttcagtcgaaacgcccggttatcgctttctgggctacagcggcacgatgaaactcacgcccgaccgtatcacggactacaaagccccgacagcggaggaagccagcgacgcgaagaaagcggcgaagcgcccaccgatcgtcaattatccgggggaagggttccgggaaatgacaaaagccgagtgggcgaaattacccgctgattataaaggcgtgcggggtgctgcagaaaccgaaacacacggcgcctaccgcttccgccggtgcatgacgcacggttgtacgctcgtgaatgtgtatatcacagacatgaaaaccgttgaaattccgaaaaaatagcaggaaggctccccggcatcttgccggggaggtcagggagtacattcatgcatcatgaccttaaacaccgtattcaggcgatgcgggtcaaactggaagggcgcgcccctgtcgctgaaattcggggtagctcgcaactttttgtcaccccctccccggaatgtcgccggttagttgagctggctgatgtccgggaaaccgatcgcattctggaacccagtgccggaacgggcgccatactgcaggcgatcagggatgcagtcccccgggcgaagtgtgacgccgtggagctgcacgccgggttagcccgtcacctgcaggctcatttcccggaggtccggatctggtgcggagattttctcgaatatcatccggagcgccggtatacacgaattatcatgaatccgccgtttaatcgcggtgatgatatccggcatatccggcgggcattaactctgcttgagcctggcgggattctgacgggcatatgtctggacgggccgcgtcagcaaaaggcgctggagtccctggcggacgtctgggagccgttgccacggggaacattcacgtatacccaggtagcgaccgccattctcagaataaccgtctgatgacacgttaagccggcggggcacctgtccccgtctggccgcgcctcgaaagaccgcgcgcctgcggcgccgggaaaaccgggccgcgctgacgcgccgcccgcatttcctttccgcgtcttccctgtttgctgcctgctgtttgcctgcttcctctccttctccctgctgtgatgcctctttttaaaccttaaaggctttaaaagcatacccacactggacaccttcggctcccggccagctgcgctgtccggtcgtcgagccacactccgccagggcagctgcttcgcacccgccgggctccgccgaacccgctacgcgctttcgggcctgacggctagtgtctgatgtctgaggtcaaagtcaacggcagcgcttgctgcggccgttccggccgcgccgctttcaccgtgccggcgaaggactgccggcactctgcggggcaacgccgtttcgcgcccgcgctcttcgtcgttgcggcgggtgcctgctcctttcccctggtacccgtatcacccgtttgagtccattcgccggggctgagacaagcacaacccgtcttgctgtccaggggacggcagagcctttcgcaataaatttttcccggccattccgctgcgcttcattagaccgaaaaaaatttcccgctcacccccggacatctgcaccgggccgtgctcgtttacgcccttgcggcgaacggctctcaaacgggtgaaggttatatccaggggcaggttcagcaggtccccgcacaaagtcaaaaccgcggccccggcaactcaacgggtgatggttaaaaaattaaacaggtgaaggagaataatatgcgtttagcatcccgatttggacttactcattccattcgtcaggaacgcccactgactaacgatgaattggtcaaggttgtaccttctgtgttttcagaagaaaagcataattcacgtagtgatcgctatacctatattccaaccattacactgctggataaattacgtgaagaaggtttccagccattttttgcctgtcagtcacgagtaagggatgaggataaacgggggcatactaagcatatggtaagacttcgccgtgaaggggccaataaaggaacagaagtacccgaaatcattcttcttaactcgcatgatggatcgtccagttatcaaatgatcccgggtatgttccgttttgtatgcacaaatggccttgtgtgcggtacgtcgtttggtgagattcgtgtacctcataaaggtgatattgtgggaagggttatcgaaggtgcttacgaagttttgggaattttcgataaaataactgaaggcgttgatgtcatgaagtctattaccttaaccaaggaagaacagcgtctgtttggacaagctgcattaacctaccgatatgaagatgaaaataaatctccggtcagtattgaacagataattcatccgcgccgttatgaagataaaaaagatgacatctggactacatatcaaagggtccaggaaaatctgattaaaggcggtttgcctggccgaactgaaaaagggaaaagaacaacaacccggccagtaaaagcaattgatggtgatgtcaaactcaataaggcattgtggttaattgcggagaaattccgcactcttaaaggctaattataagcgccgggcagctgtccggcgttttgatggtgggaatacttatgtttgaatttaaagctgtctgtatcagtatttcacatatggaagaaggtgatatcagagttcttcaggtgctttcatcaacaaccaattatctaacttgcgatagttacttagagtggatacatgatacaccttatggttgtgttataaggatgtatgatttcaaacgccatcttctggcgctaaaaagaggtggggtgtcaaaatttttacgcaaaaatctcatactaatgcaccgggagggcgggtatctgctttttcattttgatagtgatgccgattattatccaggtatagatgccgtagatttttaagaaattcaagccttcttatatcagaaggctttttagttcatggcgattttctgatctttagaagaagttcgtttgcttgctttgatagccgtgtagtagtaatggatcttcttcgcatactcgtaacgtcttgctgcctggcgcggggtctttttgaagcctgcattgtatgccccgactgcatcccacgaaacgccccactttttaaacgcctgagccagataataggctccggtgtagatgttaagacaagcatcgctaagaagatgatccggttttattccatatcgcgacagttcgttgaaatgctgcgagtcaatttgcatcaagcctgatccataacccgtaacaggattacgaccaatcgcatcaattttaaatcgtgattcttgccatgatatagcacgcaggagatccggatcaattttgtaatccctgccagccatatcaaagcagtctgctgccattgatgacaatggtattaaagacaggatgataccaaacgctgctcccttcatgaattcccctccgtgccaaatcccggaataaccttaacccatccaagaccgagactcaacatatatgcactcctcaccacaaaatgaccacacactacgcaaaattaaaattttgcagatttcactttagcttcagtggcttaactgtagttatattacattatgttatttttctttatatatatgtgagttgccggcgagtcagtagtaagtcgtcggtaagtctatagcgactcgtttatgactcactcttttataatcatatatttaaagcgacttaactctagacttaagtcgccatgtgactcgtaatgcaactttcttagactctagacttaagtttagagttgtaaagaaggtaaactcgcgttatcttctcgccataataacttgcttgatgctgtttttaataaaggaaccgatatggccagggtacaagcttatgctagtgatgaagttgcagagaaaattaatgcaatagtggaaaagcgaagggctgaaggggcaaaggaaaaggatgtcagtttttcaagtgtcgcttcgatgctccttgaattagggcttagggtttatgaggctcaaatggaaagaaaagattcagggtttaaccaaactgagtttaataagattttgcttgagaatgtcatgaagactcagtttaccgtatccaaacttttggctattggctctctaagccctcatgttacaggtgatgaacgattcgagttccgcagcatggtgagtaacattcgagaagatgcaaaagatgttatttctcacttcttccccgagcaggaagaagagtaagaactggtgtgtgtttatggtggtttgtaattaattcagtagtaaaaaaagaataatgatctagctttaaaaagtgacatggaagaataaggaatatagaatacttacagggttgtaataaaatttgttgaagcgttgacgtccggggctagtccccccgaacgtcaactatccatagtgtcctttccaggaggcgcctatgtgtgcgaaggatcgtagtcatattgctgtgcgcagtcaaacagattccattcattctatgcgcgagatgcttaatatttcatcttgccctgcttttattcgtgattcccggggcgaagtaattcacaccagcccaacctttgacaaaattttcttaacatctggtggaactggagcatttgatacacccagagcacctggaagctggtttctggatctctccctggagatcaaactggaactgatgcagtcagaactgaaatcgttttcagaaggttctgctgtacttgttaaaaatatttggttggcaggttcactttggactgtttttattgaaacgttctcgattaatgaagatacatacagtaaatgggtttttataaatgaagatgaaccgatgcctcatccttcaatggaatacaatgacttttctataaagatgcaaagatatatcgaaagaattcagcgttcagcaaagtctgactgggctatctttaatctgtatgcggttgggttttctcatgcatctatttcgaagattacaggtgttggggtgcaaacctcaaaaaatacagttagtaaaataaaaaaggaactgagctttgataatcgtgactatatcataatgtcatcgatctatactctaagttatggaaagtttatatcgaatgtggtttcgatattaaacgatggtgttaattttttgttaaatcaatagtaccgtcggtacttttgatttgtgaaaataatttactcaagatttctccttagtttgtttacttttaaatcctccaatgtaagatttattaaaggttggtaatcttactttggaggtcgattggaaagagcgattaggagcaacgcacgacctgcgcctggaaaaaatgtgcttttaaaattagatgaagaaactaatcgtcgactcatcaaagcaaaagacagaagcagaagaagtaaaacagctgaagcttatttgagactgaaagatcatctagaacgttttccggacttttataactcggaactagccgtaccaggaggtgaaaaggaagagtgatttaacatcatagtcaaaaatctgttttatatatcaacctttctttttaaaggaaataaatatgaatgctgtattaagtgttcagggctctgctgtctctgaaaaaaccaaaccgtcttttatgtcccgcgttttcaataaaaagaaagccctgaaagtcgctaaagttgcgctgccggttgctgctgtggcggcgttcttcccggatgctgcgatggccaccaccacggcaaccgacctgatgaagtccggggatgcgaccgttaaaggcacgtttggtaagcaatccagcgtagtcaaatgggttgttctggcagaagtcgtcgccggtggcatcatgtacatgatgaccaaaaacgtgaagttcctgtttggcttcgcgattatttccacctttatcaccatcggtatgtcggtcgccggttactgacaggaaacacgtgatgacgggagacgaattaaagcgataccgtttcccggaaacactgactaaccagtcccgctggtttggtttatatctcgatgaacttatcccggccgtgatttgtctcggctggggtttctggaccagcaagttcatttttggcatagcttcagcggtactggttttctggggtatcaagaaactgaaaaaagggcggggcagttcctggctacgcgacctgatttactggtatctgccaacctcccttcttaaaggtttctttcatgatgttccggactcctgtttccggcagtggattaaataaatcaacggggaaataacatatggaacatggtgccagacaaaataccacccgcgttatcgctgtgggatttatcagtctggggacactcctgaccctcagtcttgcaaccaatattatccaaggcataaataattaccgtctgcagacggaacagaaagtggcggtgacaccgatgttattccgtgcaccctttgcggtgtctcagaaccaggctgacgcctcttatattgagcagctgggcctgtcctttgttgccctgcgtctgaatgtcacgccggaaacggttgatgcccagcatcagcagctactccggtatgtattacctgcctcgcagaacagcctcaaggtccatctggctgaagatgcgaaacgcattaaagacaataacgttaattccaccttttatatgacgtcgatgcgtgcctggccggcagagaaccgcgtggatatccggggtgagctgaaaacgtggattggggattccaaaccctacagtgaaattaaaagttatgtcattcagttcagtcgtgtcgatggtgtcagctggctggcgcgttttggagaaataaataatgaaaaaaattaacccgttatttatttcaggctgtctgctgttggtcgcccctgcgatgtccgcgaccctcagcggtacgctggagccgacagtggttcccctgaccaatggcggtcaggcaaatattgccgtgagtaacaccgatccgaatctgttcacagtacctggcgatcgcatcacggcgataaacagcctggacggcggcctgacaaatcaggagcagaccgacagcggcggcgccattctggcgaccgtcagtaaaaaaccattcaccttcattgtggaaaccgaacgcgggctgaacttctccattcgtgccgtgccccgtgcgggctcaggccggacaattcagctggtcagcgagctggcgggtacccccggtccggcaaaagcctgggaagagtcgaacccctatgaatcgttactggtttcgctgaatcgcgccgtgcgtcagggcagcgtacccggtgagtatcagtctgtccccgtcacttctgaagtactgcaggtgccggctggtctgcgcgccactgccgatcgggtctgggtcggtcatcacctgaaagttgtccgttacagtctggacaatgtctccctgtcggcccgtatggtgcgtgaaagcgatttctggcagcccggaacacgtgccgtcatgttcagtaccccggcgggcctgctgactgccggtggtcgcatgcagatctgggtcacgacgtcagatgaaggagtgaagcgctgatggccaacttcaacacgctgatcaaacgtaagcaatatatctggctgggactcattctggcgggcggcgcggcagccgtcggaggcgggctgtatctgtcagatctgaacatgagctctgatgaggaagccccggctcagggcgaacccgcaccggatatgaccggggtggtcgacagcagcttcaacagtaaggtggagcagcacgcgacaacagaaatgcaggcgactgccgctgatctcaacaagcgttttgactccctgcagggggaagtggacctactgagtaaggcgcgaaccgctgaccagatacgtatcgacaagctcagcagtgacaatgaagccatgcagaatcagctgaaggcgctgggcgtgaaaccggctgtctctggtggcgagcccgcgccgactcctccgtcaccgccacccggtccggaaggggagccgcagccagccagttatccgccgcaaaccggcgccgcggtaccgcctccgacggcattctatccggggaatggtatgacaccgccgccgcaggtcagctaccagtctgtaccggtaccaaaccagatacagcgtaaaacgttcagttacgacaaaggaaaaaaaacgaagtcattgccgtacattccgtcggggagctttgcaaaaagtatgcttatcgagggggcagatgccaacgcgtctgttaccgggaatgaatcaactgtaccgatgcagttgcgtatcaccggtcgcgtggaaatgccaaacagcaaaacctacgacctgacagggtgttttgtgggccttgaggcctggggagatgtctccagcgaacgcgccattgtccgtacccgcaatatcagctgtatcaaaggtgataaaaccatcgatcagcccattaacggccacgtttcctttatggggaaaaacggggttaagggagaggtggtgatgcgtaacggaaaaatcctcggctgggcatggggggccggttttgttgacgggattggtcagggcatggaacgggcttcacagccggctgttggcctgggggcaaccgcaactgttggcgccggtgacgttctgaaaatgggggtcggcggtggtgcatctaaagctgcgcagacgctgagcgagtactacatcaaaagggccgagcagtatcacccgatcattccgattggtgccggcaacgaagtgaccgtcgtgttccaggatggattccagctgaaaacgattgaagaactggaagcggaaaagaacgggcaacagcaggctcagaatcaggaggcggagccggcaccgcaggctgatgcacatcatcagtcaggcggcggtatgaacggattcaatactgacgagatgctgaagaagctgggcaaacttgatccgcgtgagttctctccgggcgcagcgccgcagggggaaaataatggctaagtctctcattactgctgttctgtcagcactgcgctgggctcactggctggttaagtgtgcggtggtgtatccgctggccatgatgatgttactggttgttctggtgttcctgacgggaccgtacacgttcggccagacgctggtgaaaaccgtagagtctgtgcagcagtagggatatgtcattcaggactgcacggggccgaaagaacttaatggtgatgcggtgaacgctccactgcctccggttttacaggaagactgcaccaccgtcagtacggatgcggcagggtatgcagcatatatcgaccagagctatacgcataatattctctggctctggctgctgatggcggtggtgtttaccgggatcgctgtggttttccgtcggactcctgtccgcagggtgatcatacggaaaaacggtgttgtcgtcggagaggctggttcgggttcttcagggctgattctagcccgatctgatgtcagccagattaagcgtgtttactatgaaatgagtccggatgaaggggataaatttgttcgggcgattaaggaaaatacccaaatcaggatgaacctgaagaaataaccgataaatagcgagaaatatcatgaaggaattaatgctgttaattcctctgggcagcgctttgctcttaaccgggtgtgcgggcacagagaccgaatttcaatgtaatgccacgacgtcggatacctgtatgacgatggagcaggcaaatgaaaaagcgaagctgaaggaggtacgcagtgatgcaaagccggctgcggccgggttgccacaactggctgagggtaatttcagaaccacgtcagttaattcgttcccgttgccgcctcaacccaacctgaaccgggccagagtggcagcggagagagaacgagcacgtgcagtgtacctaaataatccaacggcaaagaatgaggcaatatatttcgaaaccgagaaaaggctccagtctttgccggtagtgaaaatgtctttaccagtagtggcgtcaacgtttacgtcaccgtcaacaccgccaggtaattatccccggccattaagaaaaggggaggagacaacgtcattgtggatagcgccgtatgtggattcagatgatgtatatcaccagccggcaacggttctttttgtcgtaaaaccatcggcgtggggacagcctcgccttaattgattcacagcgccattgctggcgctgcagtagtgttccatttctgaattataacgagtgccctctgcgttgaaagggatgggcggtagcgtgtgaaatgaacgtcgataacgaaaaatgaaagaatttgaaaaatgactgactcaatgaaatatctatggctgcttttgcgcgaagattcgtcatatatttttatgttgattcttattgttggttctgccgtaatcgtgtcttccttttttcagagagtaatcacatcctggtggggtaaaaccctcagtgtgatactgtgtatggtgagtatgattactacagcaacaggagttcttgatcctgagtcaacatataaacaaattataaacaggaaagaaaatatcatttatacgcttagaaattgcagagtctccgcatttgaagcgcagcaggcagggtttctggctaaagcaaaagatgcctggtcttgcccggatggcgtaacacggtatatggatgtgagatacagagataaggcagagattaataaacttagtacggaaggtaagtaacgttatggatgaattattcaaatggacgatggcgctggtgtttttattgacaggttatcgcctgcttttttctagtgacagtaatacagtgcccgaagttctttctcatcactggaaaaatgactgccggttgcttgagactaatattgataaagggttttctctccagcgcaaaatagacttcagtgtggtgatgttattgaaaatgtcagcaaggctgattatgacagagcgataaggggcgataagcaaacaactatcgcagaggcaatgaaagaaatattcattcgttaatatataaacagaggcaataaagtatgcatgcctttatttttctggtgctgatgacgccgagtagtggtggtggaatttgggatattactcccatgcctaatacagatgtctgcataaaaatgctacgggtactcgaagcacgtggtggcagaggttacggaagtaatacaggagagtgcattgaaattaaaacccgcgagcctttgagcagcgtgatagaaacattgagtgagggtgggtaaatggctgaataccagttaagttttgatggttttgttcgacttttttttgcaatggcaatcattatctgcggttacggctatgtaattattggtgtttttataagagatgcgcttgcctatattttaatgttgtttgggcttacaggtctcagtgctttattttctttaatggtattcatggataaaaatatgtgggccggttctcctgatttgacgctatcagtaataacgggatttttttcagccacagtgatcttttatatgttttatgtcttgatttattactttgatcggatgggggcgggtgaatagtaagaccggtggtcagtgttaacaatctcacgttatttgaaagtatgcagcataaggaataagaaagtgaaagcgtactatatacttggacataacgttgcatggcttaacggtatatgcctgattctttttgttattggtttggtcggtgcgctggcaatggttgccatccctgaaaaattcaatcttcgagttaacagaggcgatacattcatatactgtgcgcttatagcggtggttgggttttccgggatgttcgttatctccattcactcattttcgatggatgaacttgaagcaggtagacactggaaagatgactgccggacacttgaggtaaacatgccgacaggcgcttttaccagccctgttaataaactggactgtgatggcatcatcattaatgtgcctggtgggcagtattattcctatatccatcagtgggaattatataaagctaactcaaaatgaaatgctgattaataaactggattgaccggtagggatggaacaatggaaagacaacaagaaattgaagagcgctctcgggatttaataagaaaggccgatgaaaaagaaaggcaagaattgaaacgttttgatctgctatatggtattttttgggttcttcttttttttgcttcagctggatgtttttttgttcagtatgaagattttcgcgatatgcagcccgccactccagaacaactgcaaagtattattcatgatgcgccttgtgcgggtgaggcttttcggatggctcttcaaactaataatgtgacttcgtcagcgacattaacttttggtgacgcaaaaaagatggcatcagaatgcaaggataaaaaagagattaaagcagtacgtgaaaaacaacttaacgcactgaacgatatgagcaaataatcaggggatggatatgatgctgtttcttcgaaagtatggatttttgtttacccctccagtctactggctcatctatctgggagccagactgacttacaatggactggcaggagacttttctgctgatttccttcagggtattcgacatgaaggcgtctatattatctgtagtttgtgtgtattttattttttctgcttagaggtggaagttggtgatggcgaattctcagcgaacattctgttcctgattgttttctttcatgtggttttattatttatcactctgcttatttgtttgtggcaaggggaggtgttgttggattcgatctttatgggtcagattatcgcctccatgtgtttattgtttttcattcctgtgctttccattataaggaggagtttctagtgcggctgtgaatattcttcttgccatttattacccttgttattttgaaatgctcttaaaggaacgcctgcatgagtaataacatcatcgatgccgtcacccagactgtgaattcactggtatcagcactgaagctgcccgacgaatctgcaaaagccaatgacacgctgggcagcatgaatttcccccagttcagccgtattctgccctataaggattatgattccgcgaccggtctgtttattaataacaaaaccgtcggttttatgtttgaggcgcgtcctttacccggtgcggataaaagtatcgtcgccacactggagcatttactgcgcagcaaacttccccggggcgtcccggtcagttttcatctggtctccagcaaactggtcggcaatgatatcgactacggtctgcgtgaattccgctggagtggtaaacaggctaaaaagtttaacgccattacccgcgcctactatctccgggcggcggaaacacaatttcccctgccggacaatctggatttgcccctgacgctgcgtaactaccgcgtgtacatctcctgctgcgtgccccggaagaagaactccgccacgcaaattgtggagatggagaaccagataaaaatcctgcgggcgtcactgggcggggcttacattccgacgcgtatccttgatgcggccgggctggtcgaactgatgcgtgagctgattaacccggacccgcacgagatgtaccgcgtaccgtataagctggacccctatcaggatctgaactatcagtgtgtcgatgacagctttgatatgaaggtcacggccggtcatctgaaaattggccgcctggggcgcgacgggaaagagtgcgtgacccgggtgacgagctaccatctggagaaagatccggaaatggccttcctctggtccaatgcggacaactacgccaacctgctgaacccggagctctccatctcctgcccctttgtcatcacgctgacgctgatggtggaggaccaggtgaagacccagaacgaagccaacctgaaattcatggacgtggagaagaaaagcaaaacctcctacgcgaagtactttccgaacgtgataaaggaaatgcaggagtggggcgatatccgccagcgactggcgaccaaccagacctccctggtgtcctacttctttaatatcaccacgtataccgccgataacgcagaggcctctctcgctaccgagcagcaggtgctcaacagttaccgtaagggtggcttccagcttatcccggcccgctaccatcacctgcgtaattttctggccatgatgccgttcaaatgcggcgaaggcctgttcaaagagctgcaggcggcaggcgtggtgaagcgggctgagacgttccaggtggccaacctcctgccgatcgtcgctgacagcccgctggcgccggcgggactcctggcccccacctaccgaaatcagctggcgttcatcgacctgttctacgagggaatgaacaataccaatttcaacatggcagtctgcgggacgtccggggcgggtaaaaccggtctgattcagcccctcattcgcagtgtgctcgactccggcgggtttgcctgggtgttcgacatgggcgatggctataagtccctgtgtgaaaacatggggggcgtatacctcaatggcgataccctcaagtttaacccgttcgccaacgtgctggatgatgctcactttgacatgtcagcagaacgtatacgcgatcagatgtcggtgatggccagtccgaacggcaacctcgatgaagtccatgaaggtctgcttctgcaggcagttcaggcggcctggttaagcaagcgtaatcatgcacgcgttgatgacgtagtgcagtttttacaggacgcgaaggacagcgatgaatatgctgattccccgacaatccggggccgtctggacgagatgataatcctgctcgatcagtacacggtgaatgggatctacggggactatttcaactcagataaaccaacacttcacgatgacgcccggatggtggtactggagctcggtggtctggagtcgaggccctctctgcttatcgcggtgatgttctcattgattatttacatcgagaacaggatgtatcagtcaccgcgtggcctgaaaaaactgaacgtcatcgatgagggctggaagctccttgatttcaagaatggaaaagtggggcagtttatcgagaaaggctaccgtaccgcgcgtcgacataccggcgcatacatcaccatcacgcaaaatatcgtcgacttcgactccccgaccgcctccagcgccgcacgtgcagcgtgggggaactcatcgtacaaggccattctgaaacagtcagcgaaggaatttgccaagtataaccagctgtacccggatcagttcagcaagctggagaaagacatgattaacggcttcggctcggcaaaagagcagtggttctcctcctttatgctgcaggtggaagcgaactgctcctggcaccgcctgttcgttgacccgctcagccgggcgatgtactcctccaaaggcccggattttgagtacatgcaagcgcgccggcaggagggggtcgatatccacgatgcggtatacggactggcgtgccgcaactttaaagacgaaatggcagagcttgaatcccgaataccggtgaatgacatggaggataaacagtgatgaaaaacaacaccgaacaaccggtcagtacgacctctcatacctttcgccggatacctgtcatcgttgctctcgtgcttttcgccctggcaaccagcgcgtttctctcacgcgtggttctggagtactccacgccgcgggtggtggcttttgatatgaagaagacgctcgacagctttatggacagtgtgagtcagaagcagctgacagaggcgcagtccaaagcgctctctgatcggtttaacgacgcgctggagaagagtctggcggagtatcagcagcagcatcatgtggtcattctggtttcacctgccgtggttcagggcgcgcctgatgtgacccgcaacatccagcacgacattgcccgccggatgaaaggagaacagtaatgatacgactgaaagactgtctgctcgccgcctgcctgttatcgccgctgactcaggcggctgatctcggtacctggggggatttatggcccctccgtgagcaggacatgctgcagctcatcacgcagcgtctgcagtcgctgcaatcctctggccagtgggaccagacgatggacgcgtttaagcagcgggttatcgagaacagtcagcgtccggcgccggtggaaggcattaagcgtgcggagaaatacgagcagcgctggtttgatcccagcatccgactgaccgaagacctgaaggacaatgaggggcgggtgtttgcccgcaagggcgaagtggtaaacccgcttaaaaccgtaccgtttgtccagaccctgtacttcatcaatggtgacgatgccgaccagctggcctggatgaagcgtcaggtgccggaaaccctgatgagcaaaattatcctggtgcgtggcagtatcccggacacctccgcagcgctggacagccggatctatttcgaccagaacggtgtactgagcaagcgatttggcctgacggcggtcccggcgcggatcacgccggcgccctccggtgaacggctgaatattgagaccttcccgcccgtcccgcacccctgatctggggctgcgttttattcaaaagaggtaaccgatgccgatgatactggccttaataatcctgctcacgatgctcttgctgacgctaatgtggtccaccatccgtaagcaggagaatgtcatacgggaactcagtacaagagaaagctggctggagagagaggttgagcgtctcaggaccgataacgagaagctgtaccgctggctgagatacaacagtgaaaaggttatcgatgaaatgacttgtgaactcgatgcactgtccgccgttcgccagacgaacagggattcataccgtcgccagctttacctcttcgactgcctgtccctgatggtgtgggccgggatggagggcgccgaagactctacacgggaaaaggtccgcaataaaatcgatgccctccgtcttgttctcagggagaaaactgacgaatgaaagccatgttttttttaatctgcatcgcgttctcaacgttcagtggccgcgccgccgcagacccctcctgtgagggccggtttgttaacccgatcaccgatgtgtgctggcgctgcatcttccctctgtcgctcggcagcgtgcaggttggtaaaggcgacctgcctgataccagcaatcccggcagtcccctgcagctgtgtccggctccgccaccgctttttgttcgtcccggactggccatcgggtactgggagccgatggccatgacggacgttagccgttcgcctggctgtatggtcaatctggggggcttcagtatcaatctcggcaagaccggcatggggaccgcgagaaaggacgacaagcaggtgaacggcgccttctatcacgttcattggtacaagtacccgctgacgtactggctgaacatcatcacttcggcaggctgtctggaaggcggagacatggatatagcctatctgtccgagattgacccgacctgggtggacagcagcctcaccaccattctgaatccggaagcgatcctgtttgccaaccccatcgcgcagggcgcctgcgcagcggatgcgctggccagtgcattccatatgcctctggatgtcctcttctggtgtggtggaagccatggctcactttacccgtttaacggccaggtcagtaatgagtccagcccgctgcagtcgtcggtactggtcagtgagcgtatggccttcaagctccaccggcagggacaaattatggagagtatcgggaaggacaaggcagtctgttacgaatatccctccccgatcatcccgaaagaacgctggcgctatcagatggtgaacatgtatccggacagtggtcagtgccatccgcttggacgcagcgtgatgcgctgggaggccggcaaaaatccgcccaacacccgcaagaactatggctacctgatgtggcgtaaacgtaactgcgtatttttgtaagtcagacaggaaaaggataaatgatggaaaaagaacagaatcaatgttgccagcaacccctcctgcatcaggatgtatctcccactacatcccgggtcactttcagcacggataaaaaggtactaacggcagagcaatacagagactggcaatacattggcgcaaccctcagagaaaaaatgcagtcgaataactgaatatgtgatgcagggctatgcatttgtcatgacctgtagcaatagccaggcacataactctctctaattgaggtaattatgaataaaggaatcaccgggctggcctgggggctgagtctgctctgcactacggcgtcagccgctgacaatattaatactcccggggaccagcagtggctgaaacagcaggagaacctcagcgaacagctgcgccagcatccggataaacagctgcagcaggagcttgaggcgcaaatcagccgcaatcctctgcccaaatcagaccgccagtttatcgataatctggtcagccagcagaaagcggcgaatcaggaaaagccggcagaaggagcgctgtactttgtctccttctcgatacctgaagaggggctgaagcggatgctgcacgaaacccggcagtacggcattccggcgacactgcgtgggctcgtcaataacgacatgaggaccaccactgacgcggtgctgcagctggtgaaggatggcgtgaccgacggcgtgcagattgacccgacactatacacacagtacggcatccggagtgtgccgtctctggtggtacggtgtcaggccgggtatgacgtggtacgtggtaacattcacgtcaaacaggcgctggagaaagtggcacagaccggtgactgcgcacagctggcccggcaaatacttgatgcgcactcgaatgccgccgggagccagccatgaaagacagaccgtacttcatagcgttaccggaaatggtgagggatgagggagggtggaaatgaagacggttatttccgtgctgaccgcgcattttttagtcctgagcgcctttatctggctggcatctcccgcctgcgctgacagtggaagtgactataaagctggttcggattttgcgaaacaggtgcagggcaatggtctgaactcactgaaaaatttcagtggtgagcaaaacctgccggggtataccgccaacccgaatcagacaaaatactacggcggcgtcactgccagcggagacagctctctgaaaagcgattcagccctggagttcagccagggggacacaggcaaagcggttacggagtcgttcacaaaccggccaccggatcagatatctcaggatgcgccgtttattcaggccgcaaaggatacagaatcccgtgccgacagcattgtcggcgataccggacagtcctgtaccgcccaggttgtgaaccgcagcgagttcacaaaccatacctgcgaacgtgatctgcaggtggaaaatttttgcacacgggaagcgaccctgaaggataacgccaccacgcagaaagttaaccgaacctatcagcaggtggtgacgctgaattatgcccggagtacccggcaatggagtggcaacctgacgatcccgaccaatggtcgtctgctgaatgcctcggtggatggtgagcctctggtgatcccctggattgaagaatgcgattccgaagggaaggtgcgggatagctgcaagagtgcagtgagtgaaagcctgaccctctttgaacgaacgttccccattgatgtgatcagctggccacgttcagaatcgatgtgttcaggcggtcagaacacgcattgtacgaaatatacctatgacgggaaggggaagattcatcagtcgtttggtgtggacaaagcggccactgctgggcagaacttttcagtaagcaaaacatcacggaccgtatcatcggccagccagaaacccgtacaggtcacggtcaccctggtgatggaagaaaccgaaaccgtctatgcacctgaagtcgtctgggttgaaagctgtccgttcagtaaggatgaaggaaaaaaaacgggcgaggaatgtatcagcccgggaggaacgcgaaccatcaccctcggaggcagggattactcgttcacggaggcctgctggaaatataaggatacctggctcacgcaaccggcggacaacggctcctgtgaaagcctgatgaaaaatacggcttgtactctgtcatcccgccagtgcgccttctccagcgaggaaggcacgtgcctgcatgaatatgcaacgtattcctgcgaaaccaggacgagtggcaaacaaatgatctgcggcggtgatgtcttctgccttgatggtgaatgtgacaaagccacgtccgggaagagcaacgactttgggcaggcggtgtctgagctggcggcactggctgccgcggggaaggacatcgcggcactgaacggggtggatgtccgggccttcaccggaaaagcgaagttctgtaagaagtttgctgcgggcttcagtaactgctgcaaagacagcggctggggccaggatgtggggctggcacgctgcagcagcgaggaaaaggcgctggcaaaagcgaaaaaagacaagctgacggtcagtatcggggaattctgctctaaaaaggttctggggatttgcctggagaaaaaaaggagctattgccagttcgactcaaaactggcgcagatcgttcagcagcagggaagaaacggtcagctgcatatcggttttggcggagccagcagtcctgactgtcgggggattacggttgaagagctccagaggatcgactttaacatgcttgatttcaccaactttatggacgacctgatgaaaaatcaaaaaataccggaaaacgatgttctcaccaataagaccaaagaacgaattaaggaaatcatgagtcagcaatccgcgcaataaaccatgctgcctaataaagagaccgataatcatgaaaattaattttcacaaacagcctgccattgattttgtcctgagattaacactgacagtaatcattatttctccggtgatttatttctcctgggatgcagtcaaagggacgtcgggaagtgattatgtcgaaagtgtggtctttattcttatggctgggtttgccatgtctgtgtgttatttgtttttctcagccctggagaaagttataaatgcaaggaaaagcaaagatgaatcgatatatcacgattgagaaatttatagacattctgaatgaagagaatttaccccaggagcatcatgttatggtgctggctgttcttgcggatatctctctgcatacagacaggttcctgattaactcgtccgaactggttcagatggccgctcagtactcacctgctttccagaaactgccagcggaccggcaggcttttatatcttcagtactgagcatgccgctattccttattatgtgaccaggagagtcaatggaagagaaaaaagcatacgggctggtcatggtgtttgtcggggtgtttgtctttctcctggtcagcattatgtcgtacagcctgtggcgggacaggcaggttaacgcatttatgacaaccaaccgggcctgggggatccagtgcgacactgtttctcagaccgcgtgggtggtcagggacggggagcgggtggaccttcagataaatcatctgcctctgtactgcagcggttaccgctttgaagcccgtgatgatgcaggaaaggtacagcgccagctcgataaatacagtgtctatcagcatctgtcacgccagtcgcaataattcataaaagggtatttgtcatgcgaacaatacatgccgccatgctggcggggtgcctttactgcgccctgatgccggctttcgccaaagatgcgggctggcagtggtacaacgagaaactgaagccccgtgatgaggaaaggccagccgcaccagcggcaccaccgccgcaaatggatattctggagaaactcgccacactccaggcggccaccaaacggtcgctgtacgaagccattctgtatccatcgtctgaaaacttcgtgaagtacttccggctgcagaactactggacgcagcaggcaagtttgttctcgatgagtgcgaagaaagcgatgctggaaaacccggaactcgattacaacctgcagtacagccactacaacggcacggtaaaaaaccagctcgccgccgactatgccgaacagcgtcaggctatctccaccctcgcacagcactacggcgtgatgttcttctaccgggggcgcgaagcgatcgatggccagctggtccaggtgattaaaaacttccgcgaaacctatggcctgagcgtcataccggtgtcggttgacggcgtgattaaccccatgctgcccgacagccggacggaccagggccaggctgagcagcttggcgtgaagttcttccccgcgatgatgctggttaacccgaaaagtggccaggtgaagcctctcagttacggctttatcagtcaggacgacctggcgaaacagttcctctatgtctccagcgactttaaaccgaatttctaaggagtgtgtcatgcgaaagattcgttttccggatttagatatcaccgggatgtgggtgctggccgtgggcgtgtttttccacctgatagcccggcttgtcagaaagcagcctgagctggccgtccaggccggggaaatcttcgggctgggaatggtggtgttcgggggataccgcattcttaacgccctcattgctgaagccgaaaaagaggagaaagcctgtgaaaagcatcctgaagaacatcgctaagacgccgctggcggcgctggctctttcccttgctctggccggactggcacaggcgggaacgttcgatgaggtgaagtcgctctgggatccgcggggaatctccggtactgaaacggcttccccgcagagcgacactccccaggtggagagcggggcatctcagccacgctggttacgactcagcaacggaaagcaggtggacctgcgcgactggaaagtggtgctgttcatgcagggacactgtccatactgtcataaatttgacccggtgctgaagcagctggccggacagtatggcttctccgtgttctcttacaccattgacggacagggtgatgacgcgtttcctgaagcgctgccggcgcctcctgacgtgatgcagacctttttccccaatatcccggtggccaccccgaccacgtttctggtcaacgtgaacacgctggcagcgtacccgatcctgcagggcgccacggatgcacagggctttatggccagagtggatacggtatttcagatgatgcactgagtctctgttatatccggtcttagcaagtgattaaggaaaatagccatgaacaaatatatacgttcgacgggactgtatgcgtttttatttccagccagtttaaaagcacccgggcagacagcagcagaaaaaatagaacaactgaagccggaatttgtccaccgggaaaggcgtatggaaatctatctggaattattcattgtgtttctgactgcaggtgccctgctgttatggataatgagatttttatttaatctctgcgtggctgactggatagccagcggtgacctgcgagtaaaagacctgtggaatattatgatgtacgccatcccttatgcgctgatggctgtcgggatggggttctttgttgccggagtgacattagcaatcctcaattttttcagtcatcacctgaaaatcctttttattctgagaaataacagagttaaaaataatgctgtgcgtaatggaggacaggatgcgaattaaacttctgtcactcttctgcggtgccgcgcttggcctgtcatttagtgccgccgccgacgtgaatggcgacatgaaccaattcttcaataagcttggctttgcgtccaataccagccagccgcaggtctggcagggacaggcggcgggttacgcctccggcggttcgctgtatgccagaacgcaggtgaaaacgatccagctggtcagcatgaccctgccggatattaacgccggctgcggcggcatcgatgcgtacctggggtcgttctcatttatcaacagcgagcagctgcagcgcttcggcaaacaaattatgtccaacgccgcgggctacttctttgaccttgccctgcagaccacggttccggagatcaaaactgccaaagacttcctgcagaagatggccagcgacatcaacagcatgaacctcagctcctgccaggccgctcagggcattgtgggcggtctgttcccccgcaaccaggtggcgcagcaaaaggtctgccaggacatcgccggtgagagcaacatttttgcggactgggcggcttcccgtcagggctgttcggtgggggggcagatggacaaagtgcaggataaagccagcgataaggacaaggagcgtgtaatgaagaacatcaacattatgtgggatgccctgtccaaaaaccggctctttgacggcaataaggagctgaaagagtttgtgatgaccctgaccgggacgctgatttttggtgagaacagtgagatcaccccgttgccggcacgcaccactgaccaggatctgattaaagccatgatggagggcggcacggctaaaatctatcactgcaatgattcggataagtgtcttaaggtcgttgctgatgccaccgtgaccatcacctccagtaaggcgctgaaaagccagatttccgctttgttaagcagtatccagaataaagcggtggctgatgaaaaactgacggatcaggagaaagggtttatctccagcaccaccattccggtgttcaaatacctggtcgacccgcagatgctcggtgtgtctaactcacttatttaccagctgacggactatatcggctacgacatcctgctgcagtacattcaggaacttatccagcaggcccgggcgatgatctcaaccggtaattatccccagtcgacaatggatatgatcatggaaaacctcaaccaggcgagtgtccagattgccgctttccagtcccgcgttcaggttcagcaggacgccttgctcgtggtggacagacaaatgagttacatgcgccagcaggtctctgcccgcatgatgacccgctaccagaataactatcattttggggggaatcagtaatgcttgaggtatatgccattgcaggcggtgactggttacggggcaacctgaacgcgattgcggcgtttatggagaccggcacatggtcgaccatagaaaagatgtgtatcgccatctcggtactcattgtggcggggaactgggtaaaaaaacacaacgtgatggaccttttgggctgggtcttttccctcaccctggtctctatgctggttgtcattcgcacccctgtgcagatcatcgattacagtaacgttgcgcaggtctatgaagtcgataatgtacctattggtctggccattccggcgtcgctgacaacgcgggtaggaaacgcgcttatccagagttatgagatggtcttcgcgctgccggacagtgtcacgtacagtaaaacggggatgttatttggcagtaatctggtcgcgaaaagtacggattttttgtcacaaaatcctcagattacgacgctgttttccgattacgtacaaaactgtgtgatgggcgatattttcctcaatcataagtactcttttgaggaattactgaattcacctgatccgtataccctgatttttgcaaacccgagtccactgcgtggcgtgtttgacaaaaacaaccagttccagacatgcgaggaggcctcacgggatctgaaatcggctctcgcgctggatactcagacaggcggtaaaacctggaactactatgttcgtcagctgtttggcggcaaacctaatcccgatctgcttttcagccagatgattggcgacagctacaattacttctacagctcgggacagagcgccgggcagattatccgccagaacgtcacgatgaacgccctgcgcagtgggatccagagttatgcggcccgcagcggggacaccgccagtctggtcaatatggctaacacatcatcccttgaaaagcagcggctggcacaggccacaatggggcaccaggcgcttcgcacacttccgctgatgcagaccgttatcatggggataatgattgggatgttcccgatcatggtgatggccgccatgtttaatatgatgactctgcaggtgctaaaggggtatgtgtttgcgcttatctggctgcagacgtggccattactgttcgccatcctgaacagcgcaatggcctactatgcgaagcaaaatggcgtcccagtcgttctctctgagttgtcgcaggttcagctcaaaaactcggatattgcgaccaccgcgggctatattgccgtgatgataccgcctttgtcgtgggggatcgtgaagagcatgggagcagccttctccagtgcctacagccatttttcttcatcggggctcagtgcaacatcgcaggctgcctccggcgtggtggacggcaattactctttcgccaacatgcagatggagaacgtcagcggctacagctggggtaccaacagtacaaccagtttcggacagatgtcacggcagctggcgaatgggggcatgagcacgcagacgagggatggatcgatggtctgggacagtggtggtgcaatgtcaaaactgccggtggatatcaacgtcggtcgtcagatagccagtgcgcagcaacagatggcccgtgaggctgatgtccaggccgaaagcgcgctgcatggctataacagcagcgtgacaagtgcctggaatagtctgcagcaatttggcaccaataaagggaacagcgcctcaacaacgaccggagctgatactaccgattcttcgcaggactcgatggccagaagcaagatgtggaatgcggttgttgctaatgcgaaagccaacaacatcagtaatgaggagtctttccagcagttgatggatgattcagctaaaagtacgcagggagttgatttatacggatctggtaagtggagttcaggggatcagctgtttggtaagctaggtaaatggggaactgggttatctgctgaggccggagttaaaggcagtgcgggttggacccacagctcgggtaacacagataatgttggcacttccggtcgtgaatcgaatgacagccgacatgataccagtagtcaggcggccaaagactttaaggaagcatccgattactttaccagccgcaaaaccaccacatcgggcaacattaccgataataatgccagctcgcgtgttgaccagtttgccgcgtcactctccagtgccaaaaacagctatgaccagtatacaagcagccggacacgcagccatgagtacagtgagatggcgtcacgcacagagagcatgactggccagatgaacgaaaacctgactcagcagtttgcgaactttgttcagcatcgtgctccacaggatgccgaggccattctgaccaataccagttctcctgaaattgcggcgcagcgtgaagccctggcgcgtgaattcgtcaaagagcaggtagaacccagggttgatgctgcgtatcaacagggtcgtgaaagcattggacagaatatggctggggtgtcaggtggtggtgacaatggatcggtaatggccgactaccgacaaaattctggtcgtatcgatgctatgacgcaagatgcgggtattaaggataatgtggatcagaaagttggtgggatgattacagagaataaacaacagcagcaggaaacccgcgaaaacatacaacggcaaggcgcagaggtgaaaaatgagaatactgaaatggaaaaggaccataaaacaaaagcaaatgagtttaaaggtgattataatgaaagaaagagtaaggtgaaatctttaccaggagctgactcgcctactgagttagaggcaaaagcggcgaaaattcaaaaggattatcttgatggtaaaaggtaaaaatgatgattacgaacaaactacttattgaggaagtggaggagctgaaaaatctactttcacaagggaaggctgaaattccatctttttgggagtgcctttggcctggcgtagtgttagttgcatggaatatgctttgcgctgtaattagtgtggatgctgtttatttgaccggaaagtatatatttcatgttttggtttttcctgtcggggtcagtatcattatgctcctaggtattgccagttcacgctctctctttttgtcagtccctaaaaactttagagaaaaatcgaatatatatcgctttttttctaagaaggtttcgatttatgctgttgtgtacatggcagtgattatgttattagctatttgtaatagagtggtttatgacacgccattttcttttgcatttatggttattttaacgtctgttttttttggttttgtcatgaatctggattttggacgctatcagctatcattgctcacctctgcaataaactctttccgagcggaaaagttgggggggtaatcatccagaagcgacctatcaattatggtggtttattaacagactaaaaatttcttttggttattattatctgtctaggttgttattggtttttacatctcgcttaaaattcgtatatagtgaatgcgcattccgaaatcataagagaatgtgtatttactcgtattgattatgtcacaaggattcaggatgaagcttaataaagtcatggctgtgatggtcgtcagctctgcgctggtgttatctggatgtagtgcaatgggaaccgccattaaaaagagaaatctggaagtaaaaacccagatgagcgaaacaatctggctggaaccttcaaataataagacggtttatctgcaaatcaaaaatacctccgataaggatatgagtggcctgcaggcaaaaattgccagcgccgtcacttcaaagggatatcaggtcgtcagtaacccggatacggcgggctactggatccaggcgaacgtgcttaaggccgataaaatggaccttcgtgagtctcagggctggttaagccggggttatgagggcgctgtgactggcgccgctttaggggcagggattaccgcttacaactccagttctgcgggagcaaccctgggggtaggacttgcagccggtctggtggggatggcggctgatgcgatggtggaagatgtgaactacaccatgatcaccgatgttcagatcgcggaaagaaccaaaactcaggttcagactgataacgtggccgtattacgtcagggaacatccggcgcaaaagtgcagacaagtactgaaacgggtaatcagcacaaataccagactcgcgtcgtctctaacgctaataaagttaacctcaagttccctgaagcccagcctgttcttgaagaccagctggcaaaatcgatcgctaatattctgtaagctttctattccacggcccggtccccgggccatactggcatcacctttctggtgtgtcagaattcattcgtcaaataatctatgaattccagatctgaacggtgaacagttgcgcaatttatttgtgcatctgtgaggcgttgccgccttcggcggaatattttcgtctttatttgatcagaggttatttatggcaatatctgaacctgtcatgtctcttgaaacacataaactgatgcctggcgatatttatccacaccctgctatggggggcttattccctgcaaccccgtgaggtctgttttcgctgattaatttgtccttccgaccctaataatttactgacggattagtgccatgagtttcaatgccaaagatatgacgcagggcggtcagatcgccaatatgcgctttcgcatgtttggtcagattgccaatattattttctacgtgctgtttattttattctgggtactgtgcgggctgatgctgatgtataggcttagctggcaaacctttgtgaacggctgcgtatactggtggtgtacgacgctgggtccgatgcgcgatattattcgttcccagccggtatacaccattcagtattacggccagtcgctggaatatacctcagaacaaatcctggccgataaatatactatctggtgcggagagcagctgtggaccagtttcgtctttgctgccgtggtttctcttgttatctgtatcgtgacgttcttcatcgccagctgggtgctgggccgccaggggaaacagcagagtgaggatgagaataccggcgggcgccagctttccgataagcccaaagaagtggcccgccagatgaagcgtgatggtatggcctccgatattaaaattggcgatctgcctattcttaaaaactccgaaatccagaacttctgcctccacggtaccgtaggctccggtaaatcagaagtgatccgccggctactgaactacgtgcgtgcacgtggcgatatggccatcatttatgatcgctcctgtgagttcgtcaaaagctattacgacccgtcactggataaaatcctcaacccgctggactcgcgctgcgcggcctgggatttgtggaaagagtgcctgacgctgccggacttcgacaacatctccaacacccttatcccgatgggtaccaaagaagacccgttctggcagggctccggtcgcactatctttgccgaaggcgcgtatctgatgcgcgaagacgacgatcgcagctacgagaagctggtcgataccatgctgtccattaaaatcgacaagctgcgcgcctatctgcagaacacgccggcagcgaatctggttgaagagaaaattgagaaaaccgccatctccattcgtgccgtgctgaccaactacgttaaggctattcgctacctgcagggcatcgagaagaacggggagccgttcactattcgggactggatgcgcggtgtccgtgaggacagacccaatggctggctgtttatctcctccaacgttgacacccatgcttccctgaagccggttatctcgatgtggctgtcaattgccatccgcggcctgctggcgatgggtgagaaccgtaaccggcgcgtgtggatattcgccgacgagctccccacgctgcacaagctgcctgacctggtcgaaatcctccctgaggcgcgtaaatttggtggttgttatgtgttcggtattcagtcctatgcccagctggaagatatctatggcgtcaagcctgccgccacgctctttgacgtaatgaatacccgggccttcttccgttcacccagcagggagatcgcggagtttgctgccggtgaaattggcgagaaggaaatcctcaaagccagcgagcagtactcttacggtgctgacccggtgcgtgatggtgtatcgaccgggaaagaaaaagagcgggaaaccctggtcagttactccgatattcagacgctgccggacctgtcctgttacgtcacgctgcccggaccgtatccggccgtgaagctggccctcaaatacaagccgcgtccgaaaattgccgagggatttattcagcgccgactcgatacgcgtgttgacgcccgcctcagtgcgctgcttgaagcgcgtgaatctgaaggcagtcttgccaggacgctttttatgccggatgcgccggcatccgggcccgcggatacaaacagtcacgccggtgaacaacctgagccgatcagtcagcctgcgccagcagacatgacagtatctccggcaccggtaaaagcgccgccgacaacaaagagtccggcagcggaaccttccgtcagagcaacggagcctcccgtcctgcgggtcacgaccgtaccgttgatcaaaccaaaagcagccgcagcggccactgctgcctcaacagcatcctctgccggtgcccctgcagcagctgcaggcgggacagaacaggaactggcgcagcagtccgcagagcaggggcaggacatgcttccggccggcatgaacgaggacggtgtgattgaagatatgcaggcgtatgacgcctgggcagatgagcagacacagcgggatatgcagcggcgtgaggaagtcaatatcaaccacagccaccgccacgatgagcaggatgatgtcgagattggggggaacttctgatgcttagtttcagccaggttaaatcagctggcagtgccggtaattactatacggacaaggataattactacgttatcgggagtatggacgagcgctggcagggtaaaggcgcggaagcgcttggtcttgaaggaaaggtggacaagcaggtcttcacggagcttctgcagggaaaactacctgatggcagcgacctgacccggatacaggatggcgtgaataaacaccggcccggttacgatctgaccttctcggcccccaaaagtgtatcgatgctggctatgctgggcggcgataagcgtcttatcgatgctcataatcgcgcggtgacagtggctcttaaccaggtggagtcccttgcctccacacgggtaaagagagatggcgtttctgaaacggtcctgaccgggaatctgattattgcccgctttaaccacgatacatcgcgcgctcaggacccacagatacacacgcacagcgtggttatcaatgcgacacagaacggcgataaatggcagacgctggccagcgataccgtcggtaaaaccgggttttccgaaaccatactggccaaccgcatcgcattcggaaagatataccagaactctctcagggccgatgttgagtctatgggttacaagacagtggatgcgggtaagaatggcatgtgggagatggagggcgtgccggttgagtggttttccacgcgcagtcaggagctccgggaggctgcaggacccgatgcctccctgaagtcccgggatgtggccgcgctcgatacccgcaagtcgaaagaagccatcgatccggcagagaagatggtggagtggatgaacacgctgaaggagaccgggtttgacatccgggggtaccgtgaggccgccgatgcgcgggccgcagagctggcccgtgcacctgccgcgccggtgaacactgacggtccggatatcacggatgtggtgacgaaagcgattgccggtctcagcgaccgcaaggtgcagttcacgtatgccgacctgctggcacgcacggtcggccagctggaggcgaaggacggtgtctttgagctggcgagaaagggcatcgatgccgccattgaacgggagcagcttatccctctcgatcgcgagaaaggcctgttcacctcaaacatccacgttctcgatgaactcgccgtcaaagccctgagtcaggaggtgcagcgccagaatcatgtctctgtcacgcccgatgcgtctgtggtgcgccaggtccctttcagcgatgccgtcagcgtgctggcgcaggatcgcccggtcataggtatcgtttccggtcagggcggtgcaaccggccagcgggagcgggtggccgagttaaccctgatggcccgggagcaggggcgtgacgtccatatcctggcggccgataaccgttcacgagattttctcgccggtgatgtgcgtctggccggggaaacggtgaccggtaaatccgccctgcaggacgggacggcgtttattccgggcggaacactcatcgtggatcaggcggagaagctgagcctgaaggaaacgatttccctgcttgatggcgcgatgcgccataacgtgcaggtcctgctctccgacagcgggaagcgcagcgggaccggcagcgcgctgacggtgctgaaggacagcggcgtgaatacgtatcgctggcagggtggccatcagaccaccgccgacatcatcagtgaaccggataaaggagcacgctacagccggctggcacaggagtttgccgtcagcgtgcgtgaagggcaggaaagcgtggcccaaatcagcgggacgcgtgaacagagcgtactcaacggcctcatccgagactccctcagacaggagggggtgctgggtgagaaagacacgaccattacagccctgacgccggtgtggctggacagcaaaagccggggcgtgcgggattattaccgggaggggatggtgatggaacgctgggatccggagacccggacgcacgatcgctttgtcattgaccgggtgaccgcgagcagcaatatgctgaccctgaaagaccgggaaggggaccgtcttgatctgaaggtttccgcggtcgacagccagtggacgctgttccgggcagatacactgccggtggcagagggggaacgtctggcggtgctcgggaagataccggacacacgccttaagggcggggagagcgtcacagtgatgaacgtggaggacgggcagctgacggtacagcggccggggcagaaaaccacgcagaccctggccgtgggtgcgggcgtgtttgacggtattaaagtcggccacggctgggtggaaagtcccggcaggtcggttagcgagacggcaacggtctttgcgtcggtgacgcagcgtgagctggataacgccaccctcaaccagctggcacagagcggaagtcacctccggttgtactcggcgcaggatgcggcgcgcacgacggagaagctgtcgcggcataccgcgtttagcgtggtctcagagcagctgaagtcccgatccggcgagacggatctggatgcggccattgcgcagcagaaggccgggctgcataccccggcagaacaggccattcacctggccatcccgctgcttgagagccaggacctgaccttctcccggccccagctgctggcgacggcaatggaaaccgggggcgggaaggtttcgatggcggacatcgacacgaccatccaggcacaaatcaggtcggggcagttgctgaatgtaccggtggcacccgggcgtggcaatgacctgctgatatcccgtcaggcctgggacgccgagaaaagcatcctgacccgggtgctggaaggtaaagacgcggtggcccccctgatggaccgcgtgccggacagtctgatgacggaactgaccgccggacagcgggcggcgacccggatgattctggagagcacggaccggttcacggtggttcaggggtatgccggggtggggaaaaccacccagttccgggcagtcatgagtgccatcagtctgctgccggaagagacccgcccgcgcgtcatcggtctggcgccgacgcatcgcgcggtcggggaaatgcagagtgccggcgtggatgcgcgcacgacggcgtcgttcctccacgacacgcagctgctgcagcgcaatgggcagacacccgatttcagcaacaccctgttcctgctcgacgagagctcgatggtggggctggccgatatggcaaaagcccactccctcatcgccgccggcggtggacgggcggtgcccagcggggataccgaccagctgccgcccatcgcgtcgggccagccgttcaggctgacgcagcagcgcagcgccgccgacgttgccatcatgaaagagattgtgcgccaggtacctgagctgcgaccggcggtctacagcctgattgagcgggatgtgcaccgcgccctgaccaccattgagcaggtcacgccggagcaggtgccgagaaaagaaggcgcctgggcgccgggcagttctgtggtggaattcacacagaagcaggaaaaggagatagaaaaggcactgagcgaggggaaaaccctgccggaaggtcagcccgcgacgctctacgaggcgctggtgaaggactataccggacggaccccggaggcacagtcgcagactctggtgatcacccatctgaataaggaccggcgggcgctgaacagtctgatccatgacgcacggcgggagaacggggaaaccggcaaagaggaaatcaccctgccggtgctggtcacgagtaacatccgtgacggtgaactgcgcaaactgtcgacctggacggctcacaaggaggcggtggcgctggttgataacgtataccaccgtatcagcaaagtggataaggataatcagctgatcaccctgacagacagtgaaggaaaggagcgatttatctcaccccgggaggcatcggcagaaggcgtcacgctctatcgtcaggaaaagatcaccgtgtctcagggggaccgaatgcgcttcagcaaaagtgacccggagcgcggctatgtggccaacagtatctgggaagtgcagtctgtttcgggtgacagtgtcacgctgtctgatggcaaaatcacccgtacgctgaccccgaaggcggagcaggcacagcagcatatcgacctcgcctacgccatcaccgcccacggcgcccagggggccagcgagccgtatgccatcgcgctggaaggggtggccggtggccgggaacagatggccagctttgagtctgcctatgtggctttatcccgcatgaaacagcatgttcaggtctacaccgacaaccgtgagggctggataaaggccatcaagaattcacctgagaaagcgacggcgcacgatattcttgaaccccgtaacgaccgggcggtgaaaacagccgatctgctgttcgggcgggcaaggccactggatgaaaccgccgcgggccgggcagccctgcagcagtccggtctggcacagggaagttcaccaggaaaattcatttctccggggaaaaagtaccctcagccgcatgtggcgctgccggcatttgataaaaacgggaaagccgccggtatctggctcagcccgctgaccgatcgggacggacggctggaggctaacggcggagagggacgaattatgggcaatgaagacgcccggttcgtggcgctgcagaacagccgcaacggagaaagcctgctggccgggaatatgggggagggcgtcagaatggcccgcgacaatcccgataccggggtggtggtgcggctggccggtgatgaccgcccctggaaccccggggccatgaccggcgggcgggtatgggctgatccggcgccggtgggtccggtaccgcaggccggggctgacattatcctcccgccagaggttctggcgcagcgggcggcagaagaacagcagcgccgcgaaatggaaaaacaggcggaacagactgcccgggaagtggccggggaggcgcgtaaagccggcgagccggcggaccgggtgaaagaggttatcggggacgtcattcgcggactggagcgtgaccggccgggtacggagaaaacgacgctaccggatgatcctcagttccggcgccaggaggcggcgattcagcaggtggcctcagaaactctgcagcgtgagcgtttgcaggctgtggagcgggacatggtgcgtgacctgaaccgcgagaaaaccctcgggggcgactgacgcgcctgcggcttgtctgccccggcagggcctccggttaacaccggacaccctgccggggtgcggaaaaaagagagaaggatacagagatgacagcacacacaatgggtttcagagccgctgaccgctggctgcaggcattactgacctggacaccgggtcagacggatatgattaaaacggtggccctggtcctgatggtcaccgaccatgccgggttactgctggcacacaataacgagataatgcggcttctgggacggggctgttttccgctgttcggtctggcatggggaatgaatctggcacggcacgcggaaatacgccagtcgcagctcaacagcctgtgggtctgggcgctggttgcccaggtgtcgtttatgctcatcgggtacccgtggtataccgggaatattctgtttgcctttgccgtcacgggccaggtcctgcggtgggtcagccagccgtcctggtattacaccctcccggcggctggactgctggtcgcctggatacccctgtcaaccgccagctacggcatggccggagtgggtatgctcaccgccagctggctgctttgtcgcgcacagcatgcaccggaacggctgggatacggtgtgctgtgggccctcatggtgttgctgatgaatatgaatgacgtgagtgaatcagtggccgggctggcgattgcgctgctgacgctgatggtgtgctcatctgccggagagcgtgtgaaacgcttctggccgcggcagttcttcgtgatgttctatgcggtgcacctggcggtactgggtattgtcgtctcaatgtgaaaccaagagcaggaaagggcgatgtcgttcaggtatagtagctcttattagctgaacgataggcaattgttatggcagaagaaaaacgccctgtactgagcctgaaacgaaaaccggcggagaacagtacgacccccgcagaggcgacccctgctcctggtgtggtgcgccgtaagaaggtcgtggtggtctcgtccccgccggcctggaaggcaaagaaagcgaaacttgagaaggttaaacaagtggccgaagccgccgcgcgcaacactgcgccggcgccggttaaagcggtaaagacgccacctccggtgcgttatcttcgcctgctgccgccggaacaggccattatgacgctgaaggctttctggccacagctgttcgacggaaactccccccgtctgctggtaacgggcatgcgcgaacagctgtttgccgatattgtgaagcgcgacctgccgctgtcgcataaacaggtgatcaagtgcctgaagagtctgacccggtctgcgggctatctgtcccggatgaaggtgggggcctcccgctatgatctgcaggggaatgccgtcgcgaccgtcaccgcagaggaagcgcagtacgccagtgagcgcatgatgaaagaactcctgcgaacggagcgtatgcggagccagtctgctgactgaatacaatcggggagaggaaatggattttgaagcgcggaaacaaaaggcgctggcgataatggccagccgtaagatgtggaaaagcaattatgcaccgcttctgatacgcctgctgtggcggctggggataaagattccccctctgccgtttgctccgctctggcaggtttttggcgtgatgacagcctctttctccgtcggatacgggctgtggatgtactggatggtgtggcgggcccaggggatgtcccccctgttcgcttgtaaaatcagtcttatcgccggcgtgttatttggcctgacgatggcgttgtttcatctgtggcgccgaaaggtgaataaattacctgactggaaagatttataacggaatcagaagaacgccggaaacaggacttaccctggctgaatggcatgaattttcgcgctatgcacttgcgtgcatactcatgcatgccgtaaaaacagagcctgcgcgtttctggcgggttttcgggtggtttgttgcctgttttaccggttttccgtcagaaacgccctgaggccgttttagcggtgcgtacaattaagggattatggtaaatggtgacttggttaatcataaacatcctgggggatggcatacaccagctggatatccggtgcatcgttgagccatcgacctgattttttcatcaggtagccaccaatttcttcggtagtcagccgagcatgaaacaatgcttcatcattgaaccagcagtcagggtgatagatgagatccagtgggtttgccctgaaattaatctccagtaactggagtgcatagctgtggtcagatgcactaccttctgctttgcgtataaagttgataacgtcgttcagttctgtccatgtaaagtcatcaaggtatttttcctgattaagcgccatcctggtgaaatctagtgcacttgtccaggatgaaaaatcacgaaaatcagagaacccgcagggcatgacgacctgtgcattccagtctgccatcatctgttttagttcttcattgttttcgtccatcccgttatcgatgtgatcgagaatgccattcagctgactgaccagttctttcatctgtttacgggtgacccgtgcgggtttcattcgctcaggtaatggcatcagaaatactctcttttttatcgtgcactcgggggaactaagtaatctatcgggctatgaatcagagctcaaatcgtttttttttctttctgatgatccgcattcagcgcttttgtggctgtaggcccatcagaagcagaaaaagctgcacgagcggagaaggtagctaaggaaaaacagcaagcagaagaggctgcaaaagcattcgcagcgaaaacagcagcggcatccgccgctgcggaaaaagaacgtcagaatgcgatttctgctgcggctgctgcaggtcaacatcaaactgttcctgatgcgcgtaataatctgaatcaggcgactgctgaagcatcacgcctgaaaacagtggcagataatgcccttaatacagcgaagaataagcgaaaggaagctatcgatgccgtaccagtagcaactcaggctgagaaaaaatatcaggatctgcagcaaagcattaaaggcctcacgctgaataataacggccaatacggtacccaaaaatgggaggttatcagttcgaataaagagcatgaccactggggataccggttctatccatctgggatcacaaaagctcaggttgatgcagcgcagaatgatgcggtgaacaaacgaaatgctgcctccagtcttgccagccaggcaacggccgctgagcaggccagtctgcaggcatcagctgcctataatgctgcagaaacgcgccgtcaggctgcccaggttgcattagcgtccgcagaacaagccgccgctgcggcagaaaaaaacgacaggctgatgcagcagcgaaagccgctgaggaggccagaaccattgccgaaaaagcaaaagcgctgctggcccgtcgtacagccgcagataaactgaaatcttcagagattcaggctgtcaggggtatcccggctacagcggcaccttttgctattcctctgacctggtcaactgcgtcacgtggaggttttactctgtcggctgatgctgcggccagcctgggagctttcatcagcgaggctctggcgacgttacgtgtcgctgtggtggctaacccggtagcattaaccattgccggtcttgtgttatcgaaatcagttggcgtcggtagtgatatggtgcccggtcgggatatcagttcgatgatgcctggcgatgcgtttagtctgcctgataccgcggcattgaataaagcagcagatcagaaaacatctgtcagtatgccggttcgtggccgtctggttatgaatgatagcggcattctggatgttcagctggtcaaaaccaatactgccggtgccgtgaaggtcgctcgtgctgtactggataaggaaaccggctactggggctatactcttcccgttgtcgcagatgttccggcgcaaactatttttgtcagcccggctgacgcacctggtgcaaacggaccactgacgctaagcgggccggtaccactaccggagcgtattctgcataccggtgatcagatttcggcgccacaggctacagataaaaccgtgacgccggtagcggatgacctcgattttgaagatattattctggtgtttccaccggagtccggcctaaaaccgctgtatatgatgtaccgtagccctcgtaacatgcccggtacagtaagcggcaaagggcagaacgttggcaataactggatggggggggccagtaccggggatggtgctcctgttccttcccagattgcggataaattacgcgggaagactttcggtagttttgattctttccgtcgggcgttctggaaagcggttgctgacgattctgcactaagcaagcaatttagtgaagctgatattaatcagatgaaagctggaagggcacctactgcggactttttagaatcagtagggaaacgtgttaaaattgaattacaccacgaaaaagaaatatctcaaggaggggctgttatggatgtcgataacattaaggcgctaacacctaaaaatcatattgagacacataaaggaaaataaaatggctggtaataaaatttcagattttacggaagaagaatttactgcttttgttagtaaaataatcgctgctgattttcaaactgacaaagagaacgatgatgctatttattcgttcgcccaactaacagagcatcctgctggttggaacctcatcttcaagcctaaggtaggcgaagattcttcggcgaaaggaattgttaaaaccgtaaaggaatggcgagctgctaacggtaagccaggttttaaaaaatcgtgattgaatgtgcgggttcaggtgatgaatccgcacatttttaactctggatttgaagaataattactagatatccattattttttcctgtctccaaactgaccccatgatggatggtttatggctctgtccaagataccggcgacggacccgtctgctactggtttcggcataccacaaaatcctgacgcctccgcatggcgtcgttgtccaaccccgggaacggggaaaagccagtttcccccgctcccggcgtttcttaaacacccgttaaggaaatactgtgaaaaaaatgaaccgtacgctccgcagatgttgtctgtccgggcttatcagcctgtctttgtttgcaccttttccggttgtgtatgccgacagcatcgagacgggatattcgccggaaggaacggctctgcagctggtcctgaagactattaattctgcacagcaggaaatccggctgatgggctattcctttacctcacccgaagtcgccggcgcgcttgtcagggcaaagcggcgtggcgtcgatgtgaaagtggttctggactggaaagccaataccggcaagcaaaaccaggcgagtctggcggccatgaatcttctggtcaatgccggcatcccggttcgcacagtgtcgcagtacaaaattatgcatgacaaagtcatcattgctgatggccgcaatattgaagtcgggtcttttaactacacccgctccgccgatcgggtcaattcagagaacgtgctagtcgtgtgggatgttccagtcgttgctcaacgctatctgcagcactggtcgacccgctggtcgcagggaacggactggaaacgggcttattaacgcacctcagccataaaacgagcatcaatacggttcacttacgtccatgctaaagcgcctgaaccacccgtcgctcgtatcttacctcttaagtcttgcccctgaaggtactcatttttagttcaggatggggctactctccatctctcttacaagaggacatgggcatctcatttagttgaaatttgtacgccaatacaaatgacaatcttagaaaggatctcttgcaaattgaaagtaagttattgatttgcaggatctgagagttctgtagtatcctccgttccgaagacatttctgaggtgtcaggagagcgataaatgtcacgtccagcagataaaacaacttcctctgcgaatgcaaaacgtgcataccggaaaggtaagccaatgtctgccagtgagagacagcttgccgcgattgcgcggaaacgcgaaacgcataaagaagttaaggtttttgttaaaaacccactaaaggacgtgatgatagcggtttgtgaagaagaaggtctgacacaagcccagtttatcgagaggctccttgagcgagagcttacagaacgcggtcttttagatgtaaagacttcacattcttgatcatgtttatattgagtgctagattgttgatggtctgaataattttgggtgtgccacgccgtaaggtggcagggaactggttctgatgaggtatctacccgggaccagaaaagcaaaaaccccgataatcttcttcaatcttggcggaacgaaaagattaacggggccttcataaactgcatagaacgtgttgctctatgcagggagtatatgtacatgctcagaaaacttcaagatcagtttctgtgtcattcgctccttccgtgcaacataagcgcaggaagcggtgactgatatccttcaaaaccactattcacaagttaaaaacccgaacccggttttcacgccgcgagaagggaaaaagaccctgccgttctgccgtaagctgatggcgaaagccgaaggcttcacgtcccgttttgatttttccattcatgtggcgtttttgcgttcgctgggtaagcggcacaggatgccaccactgttgcgccggcgtgcaattgacgcgctactgcaggcaatgtgttttcactatgatccactggccaatcgcgtgcagcgctcgattaccaatatggccatcgagtgtggactggccaccgagtccaggagcggcaacctgtcagtcagccgtgccacccgggcgctgaagtttctggcggagctggggctcatcacctatcagacggaatatgacccgcagatcggctgtaacatcccgaccgatatcaccttcaccccggctctgttttccgcgcttgacgtttctgaggtggctgtggtggccgcgcgccgcagccgtgtggagtgggaaaacctgcagcgcaaaaagcagaaactgaaaccgctggagatggacgagctgatcgcaaaagcgtggcggttcgtgcgtgagcgttttcgctgctatcaggctgagcgtaaatctcacggccggaagcgggatactgcacggcgggatgcatcacggcagcgtcatgacatcgagacgcgcgtgcgtcagcaactgacccgcgaatacgccaccggacgcttcaggggagataaagaagcgctgaagcgtgaggttgagcgccgtgtgcaggagcgcatgctgctgtcgcgcgggaacaactacacgcgactggccactgtgcccatataacattaccttccttaaaaaatccggccggcgccggaggctttcgctcgcctgttgcccggctactacgtattatcttatcttcaggcctgcattcctcaccataattccggtcttcctggcgtcaacgtggccttaaatgttatcgccggcgtcacttctgacggccgatttctgttatccacatataactgcaagggagtatttcattaggctacaaccgtgatacgcacaaagcacatgccgtcggactttcaaggcgcgtggttccttttaaacaccagctctgtacctcttttaaagatcctttaataaatcctgtaaacacataacctgttcatcgcctgccctgtggacaggctcctgagaatggccgcccttgcagcgacctgacggtcgcgccggttcggtaacaccagtgagagctcccatcgcttcgcgacgggccccggccggagaattaaattagttacagcattcaaaaggaaatccatcataaaaccggcgccggtttgccagccaggagcccctccccaccactgaaaagcgccgccgcccccggccgaaggccgggagtagtgtcgcttttaatgatgggtgttgtaactactcttcttcatcgctgtaggtggagctgcggtcagttgtctggtacacgctcgtaagcggccctccggcccgctaacgcggagatacgccccgactgcggctaacgccttgccgggaccactccgaccgcgtacagaggctcctgagacgttttgagcgggtatggctttgcagctaccgtgttaagtttcctggtgtcgctgaaatagttgatgaacatccccctaagcgtcagcagcaagctgccgccgctaaggccccggaaatcacgccctttacgtcgtaaacgccgtaaagcccgctcaccggggttaaaagggattactttgacttcttcattgctgttagatggttaaggctaatcagggcagggggtagggtggcagaatttatagcccggtaaccggctacgccgggctttcggcgccatttgacgccacagacacatgtaacctcatctggcgcctccatgccgctgacgcggcatccagaagtttcccgatgctgtaagtcttaacgtctgctttgtgccaaaggcggaagtaactaacagcagtctgtgtgaaaatacggggagcaggtcagtcagagtgtaccgcagaagtctacttttcaaacgtacattttaataagtagaaaagttattgagtccagtctctgttgcctatatctttaacaaagataaaacatttgaattatctgttaaatgatatggctatcagacatgatgatctgagggcggtagcattccaaaaacaagagcagaagaggcggaagttcaagttgagcatgggcaaaacgatttcaagaaaaaaacgtctatctcagtactatacaaaccgggatgtggcagagttgcttatctcatcattaccatcagacgaagcaagtacaatcattgacttaagtgctggtgaaggctcgttgttgatgacagctgcgctcaaatacgacaacgcaaagctctacggaattgatattgatgatgaaaactgcagaaagttagacctattacaaaacacgacgagtatatgtttagatgcaacccattcagccagttttgataaaataaaggcacaaaacagtacatatggcatagtcattggcaatcctcctttttatacagctgaacatactgcctatacaaggttcttatttaaggagtgggcactaaatcataaaacaaaatattacagagctgaggttttgttcttaatgttatcgcttaagttgcttgatcgagacagttgttgtggaattgttgtacctgatacgatattttcaagcgagaaatataaaccactcagagaaaaaataacctcattatttaaatatatagatgttatagaattagataataaggcatttttgggaactgaagcaaggactcatattctcactgtcagtaacaaaaaatcaataagcccatcaataacaacaagaagttcaaaaaaaaataaagcgataaggcttaaaaaagaagagtttattgaaagggccgaccatcaatataactcttttaaatataacaataacgaaaaaacgattgaaacttcaggtataaaagttatgagagggaatatcagcaaaacgaaaaaaactcaactgcatgatgcgataatccattcatcttctttttataatgatttttctttatttgaaaataacaatgacagtgcagaaaatggttcagccgtacaggcggtgaaaggagatgttgttgtaccccgtgtaggaacaagatgtttggggaaagttgggatcatacgaaacggttctttttccattacagattgtgtttttgttatcaaagcttctgagtacgaatgtggtgaaatggttgccgcggcattaaaatcgaaatttggagtcgactggattaaaagtatttcgaaaggcattggagcgcagtacataacattaaatgacataaaaaaactacccctgcgataataacatcatgaaaatagatcatattacagcaagagatactgaagcgattattgaacaatccaaaaaattaatcaagattggttactgggataatgtaaaagtatcagtactgcaacgctggttagataatttcaaggatgaaaaggaaaaatatcttgcagcctctgtgttaagcgagttgatatatcgtaacagagaaactgttacatctatgggctataatatattctcaattattctcccacagatcttagaggagttagatatttaccatattgaggatattgaaaaatggatgaatgacatcaactcgccaaaacatgcaaggaatcttccgtttcgaacgtccgtaataaataatgtggatagtaaagtcactaaaagtggtgatgtaatacacacattcctacaaagagattttttcgataaaaacttaggggtaaaagttgaaaatatagaaaaattgccaccaagaatcaaagcgatagttttttttgatgatatgcttggttctggcactcaaattgacactttcatgaaagaaacaaatcttgatgaacttggaaagaaaataatattcattccatttgcggctctacgcgattcaacaataaggatacaatctaaatataaaaacctaattattaggcctgttgagtacttggatgaaaatcatagtttctttagagcatccaacaggagaataaatagagaatatttctatacacataatgatttcttaagattgtacattgatatatgtaataagaactcaataagcaatccattagggttcggtaatttggggcttagttatgtcttggcaaactcaactccaaataataatctttcattcctctggtttgaaaatgaaggatggaataggttattcaaaaggtaaaatatgaaatttaacgagattttttcgaaaaaccgtgccgaagaattacctgatgatctctatggtaaatatgttcttcccttagggtacgaagatgtaaatctaaaaaaaacgacaaaagcaagtatagttattggggggagaggatatggaaaaacgatgttcttaaagtatcattgccaccagacagctctaagtgtgaataaagatacgattggtattgaggatctttccaatctgggtatatattggcgcccggatacatcctttagccagttattaaccgaagcttggctcggaaaattttggtcaacagctttcaaaacgtacatgagtctatcgctgattattgagtttgttaaactaaccaataatttattgtccgaaaaatctcctgttttttcgttgaaagagaagattaataatctgaaattgccagatacaatttctgaaggtttgggcattgataaaaatgcgaaacttgttgatgttagcgatcttttacatgaaagactgtttactctttgcaattggataaatgccccagttactgaaacaccaccgttttctcttgatacaaaattttcattacagaatatcattagcaaactacatgcaataactggatgcattataaagcctaattttcaagtttacattgacgagttcgagaacttgacatcagaccagcaggcaataatcaatactttaatgaagcacggatccatgccgttactgttcagtgttgcctataagaaaaatgctaatatttcacataaaacgttaggcaacgaaagcattgttgagcagcatgatttcagatatatagacttagaagaactgtatctcaatgactttgatacatttgctggtgagatattagccctgcgcttttcagattatatagaaaacactgatcatgaaaaactccgttccatatttacgtcagaacatcaaatcccgcacagacaaacgaaggagtatcaggattcaattaaaaatctggccagtaagtttcttcctgaaaaatcgacaaaagagatatcacatgaaatattcagtgatgacgcattaactaaaaaattacattcaatgattgaaaccggtttgtctaaatcaaagtcaaaattgcaagttcaatattttatagatgataaatttcctgaggcaagcctgataaatggtgcattgctgaataggaaaagtattaccccagacgaggtgttagaacaatatttgcaatataaagcaggacatacaacaaaatataaatcatggatacctaacaatctcgtcggtgtaattctctatctttataataaattaccaaccagaatctgcccactgtacgctggctataaacagtttgtatatttatcaagagggaacatcagacattttctggagttatgtcaccagtcggtaacaaaaacaaatatcacgtctccactgccgccaaaaacgataccatccatgacaatcgaagctcaattagaggccaccctgaagacgagtgaactcgaaattgaaaaaataggagattttggtgctcatggaatgcatctaaaaagagtggctaaaagacttggtgcgattttcaactattgccaatctcgacgttctcagagcgaatcagaagtaaaccatttcactttagatttaactgatataaatcttcttgcttataatgttaaggaaatcctaaatgaatcattggtgtggtccgtgctgattgaacagaaaggaacgaagagtaaatcaactgacaacctggaactcaatgattacgtcttacatccagttcttgcaccatattttggaataagccacagaaaaaagaaaaaaataaaatttagcaaaggtgaggttgaaaccatttttgtaggtagtgatgaagatttttcatccttgttaaagaaatatggagcccggtgggatatcgatgactcatcttttgatgtttctagttcagtcacatcataccagttgggcctgttatgataaaattcaaacgtatcagaactcacaacaacttagattttactaatcgccatcatgacatttttttctatggtgaagagttagatgagagaactggcctggcgataaaaaaagtaaacgcaagcaatgcatttcaggttaaatatgtaaaagatgaatatgcattaaaactcaatggtaataaatacaaattgttagcattgaaggatgcattaatctctatgtcgcctaaaaaagtaataatagactctacttctcttgatttccctgaaatattgtatcttttttactccattaatatgattgaaggtatagaatcatttactgttctctacattgaaccgaaagaatacagtaagtcgccttcgactgagggcggggatgaggagtatcaattaagcgatggccgacagccattttcttctcttcccgtattttcactgaatacaatcacatctggcttacaaaaaaccagcctggtttcattcttaggatttgaaaactctcgtctaggccagattttaagtaatgatgatggggcaagcttcaataaattactggcttgtatatcagtcccagcttatatcccaggctgggagaacaaatcactcagaaagcatttattacatttcgacagcatggagacagatctaagaacctgtcctggtgcaaacccttacgccgtatatcagaccttattagatatatatgcagaaaacccaagactggtgctgacatccttaggtacaaagcctacggctatcggtatctgcgttttcttaattaacaatcatccaaataatagcgttgaaaaacaattgggagcaatatatgactatcctataaaatccatcaaccgtacaattggaattggtgagatttactcctacgaactatcaataagctaacgtcccgcctacgttcatacgtttgaagtgttcggtaccaccggctctgtgacagttcaagctcatcatcaaaatcttcggctacaggcctagttttattgtggagagtaattacggtgattgaataagtcgtgaaaattggcaacctccattcggcttgttccaactgatgcagagccgggctattgatccactcaaagagatggctcatgcatcagttgtattgttgtaaagccacaccgtcatattgtatttgaaaagaaaacgctttagtcaatcccagccttaataactgtttgatgttcaatataacgttctatacttgaaaagactatttagatgattaaaactgttataaatactggtatgtataacacgaagtcgaatgagtaaggtattttttgtgtgggatttattcattaagataatgctgctgttaccgattcccttgataactgtttttcccaacattattccttttctgacttatagacaaaatggtgataaaaacaaatccgccctgatggatacactagcccgagagatggataaacaacaaccctgtgcgtatcttgtggagtcatgcgtttctcgaccgcataacatccggccaataccttgggcgtttctgcgggtggtactacattacagtaattcgatggaaatcattcagctagtatcatctgggaggagaatactggcactgttgcaaatataggcttggagggagatggtaaatgttggcttcaccgggagcgaaacgacggtcagggatgttgtggctaagtggcgtaagcaggttaacagtcccgttatcgccccagttcgactcccctcagcatccagggtaagccgctggttaatgccctggcgaatgatcagaggagaagaaaactatgcatcccgcttcatcgaatcgatgtgccagaaagaaccgcaactgaaaatggcgcaacagctgtcgctcgacttctatcgaatgctgaaaacgaagaataaatcgcagttaaatcaatcgttcactgacgtaagtcaaagtgggctcattgaccttcagcgtgttgcggccagtatggaagcggatgcaacagcaatacacgaagcgataagcagcagatggagtaatggcgttgtggaaggccatgtaaaccgcctgaagatgctgaaacgacagatgtacggtcgagctggcttcgagttacttcgacgacgagtcatgagccctctggcttaaacaactccacctaagttgcggaagacccagttttgcaccgttggtaacaatgatgatatcttggacatgatcggatggatgagccctgaccggaaaaccaattttctgagtcattctgcgaatctgcgattttatgcattgtgctctgtggaagggttgaatagctatatagccccggaaaaaattaaggcgcagataaaggtttcacgtggtggaaaaggtatcagcaggttaatcagggtgctcgggaaaaatgagttcatccgaattgtgaaagatagccagacggtactcactatcggcatggacaattccattgcgactggctaggtcaattcatcgccgttgctgtcattaattccgggtttagcacaagagttgtttattagtttaaatattaataactggatgataattagatgaataatatcgagataattgaatcaggatacaatgcgttatgtgatgcttataataattccgttatcagtcttaagcgctcctccctatatgaagatttactagtccatatggatattcctgaaaaaaacaggagccgattcacttatgctactttgaatgatcgcgacgaaataatcgcaatatgtgtgtttattgtctctcttgatgagggaacaactgatgtaggatggtttgttagagcggactttagaggtaaaggggttggtagagatacagtagaaaaggcattcaacgagtttaagaatggtctcaagggggctggagttgaggctatttttattggcgccactgttgataatggtaatactccttcaatttcattggggcagaggtttataggcggagaagaaataatagaaaaagaagacgggactaccatctactcatacctcaatcgtttcacgctttagttaatgggagagggtcaatggaaagagtgagtacctatgtcatggggtagtgaccgggtagctgcgataactgccaacttttcatccctccaccttcacgcacaaacgaacgtatatgtgacaggtacgacatgctgataggctacatgcgggtatcgaaggcggacggctcccaggctaccgatttgcagcgcgacgcgctgattgccgccggggtcgatccagtacatctttacgaggaccaggcatccggcatgcgcgaggatcggcccggcttgacgagctgcctgaaggcgttgcgaactggcgacacactggtcgtgtggaaactggatcggctcggacgcgacctgcgacatctcatcaacaccgtgcacgacctgactgggcgcggcatcggcttgaaggtattaaccgggcacggcgcggccatcgacaccacgaccgccgccggcaagctggtctttggcatcttcgccgccctggccgagttcgagcgcgagttgatcgcggagcgcacgattgccggcctagcctcggcccgcgcgcgcgggcggaaaggcggccggccgttcaagatgaccgccgccaagctgcggctggcgatggcggcaatgggtcagccagagaccaaggtcggcgacctgtgccaggaacttggcgtcacgcggcagaccctgtatcggcatgtttcacccaagggtgagctacgtccagatggcgagaagctactcagccgaatttgatgccggcatgaggcaacgtagcgacagcgtggtttgtctcaatgggaagcgctcatgatcgatctttgaaggcccgcagcagtcgtgtcacagacaggacgaacaaaccggtcagcgtgagggctgcgataccccagtactctccgatgaacgcgccggccgtcgtgccggccagcacaatggcgagaatcggcaaatggcagggacaggtgagcacggccagcgcgccccacaggtagccggtgatcggtttgtgcgtctcggacggcaagcgctcggggctgttcatggcagactctccgcgtgctgtgccggctcggtcggcatggtggccaactgcacctccagatcggccaacgcttcgcgccgacgctcgacgaactggcgcagaacggcaagctgcgcggccgcttcatcgccgtccgcagcatccagcgcccggcacagccgcgccagcgcgtccaggccgatgcccgcctcgaaggccgcccgcacgaagcacagccgttgcaaggcggcatcatcgaacaggccatagccgcccggggtgcacgccaccggacgcagcaatccgcgcagcaggtagtcgcgcacgatatgcacgctcaccccggcatcaagggccagccgggacacggtgtaggcgctcattgaaaacctcctttttttatccagcgcagcaggaaagctgcttcacgtccttgttgaaggtctgcgccgcaagcttcaacccctcgaccattgtcaggtaggggaacaactggtcggccagttcctgcaccgtcatgcggttgcggatggcgagcaccgccgtctggatcagttcgcccgcttccggggccaccgcctgcacgccgatgagccgtccgctaccttcctcgatgaccagcttgatgaagccgcgtgtgtcgaagttggcaagcgctcgcggaacgttgtcgagtgtcagcgtgcgactgtcggtctcgatgccatcgtggtgcgcttccgcctcgctgtagcccacggtggcgacttgcgggtcggtgaacaccactgccggcatcgcggtcagattgagggctgcgtcgccgccggtcatgttgatcgcggcacgggtgccggcggccgctgccacgtagacgaactgcggctggtcggtgcagtcgccggccgcgtagatgttcgggttgctcgtgcgcatgccttggtcgataacgatggccccttgcgcattgacagtgacccccgccgcgtccagcgcgaggctgcgcgtattcggtgcccgaccggtggcaaccagcaacttgtcagcgcgcaattcaccgtgtccggtggtcagcacgaattcgccgttcacatgggcgacctggctggcttgcgtgtgctccagcacctcgatgccctcggcgcggaaagcggctgtcacggcctcgccgatggccgggtcttcccggaagaacaaggtgctgcgtgccaggatcgtgacctggctgccgagccgggcaaaggcttgcgccagttccaacgccaccaccgacgaaccgatcacggccaggcgtgcgggaatggtgtcgctgacaagcgcttcggtggaagtccagtagggtgactctttcaggcccggaatcggcggcacggccggactggcaccggtggcgaccaggcagcggtcgaacgttacctcgcgctcgccaccctcgttcaaacggacgaccaggctctggtcgtccttgaaacgcgcttcaccgtgcaaaacggtgatggctggattgccgtccaggatgccttcgtatttggcgtgccgcagttcatcgacacgggcctgctgctgggccagcagtttgctgcggtcaatcgcaggcacagttgccgcaataccgccgtcgaacggactttcccggcgcagatgggcaatatgggcagcgcggatcatgatcttggacggcacacagccgatattgacgcaggtgccgccgatggtgccgcgttcgatcagcgtgaccgtcgcgccttgctcgacggccttcagcgccgccgccatcgcggccccgccgctgccaatgatggcgatatgcaaaccggcgccctcaagtgcatcacggatttttggttcatctttgaaatcaccaacccggatcgagccttgataacccaatgcggcgatggcggccagcagttggttgtggctcacggcggtgtctgccatgacttgcgcgcggctttctggataggacaccacagcggcattcacgccgggaatcttttccaaagcatctttgacatgggtggcgcaggatgtgcaggtcatgccattcacggtgatttcggtcatttttttactccattgaatttcggggtgcagcaggcatcggcttggcgttttcgttggatggcgtagatggtcaagccgatgaaaatcgccagcgcaggcagcagcacatagtccagatagccggtcagcgcggacaagccgaccacaccgagcaaaatgaccagaacaggggtgaagcaacacagcgccacgagggttgtgccaatgatgctgacccgcagcagtgtcttcgggtctttcatgatcagttcttgactgatgatgggtagcccgcatcctcggtagccttggtcagtttctgcacgctggtcttggcatcatcgaaggtgaccaccgcttcgcgcgtctcgaaggtcacgtcaactttactgacgccatcgaccttggaaatcgccttcttgacagtgatcggacaggccgagcaggtcatgcccggtacggacagcgtaacggtctgggtggcggcccacacgggggcaacaacggcagcgagggcaagggcggaaagcagctttttcatggtgaactcctgtgatcaatagaaaaatggcacgacgtagggaaatccgagcgcgaccaaaaccagcacggccacgccccagaaaatgagcttgtaagtagctcgcacttggggaatcgcgcaaacctcacccggtttgcaggcggctgacggccggtagatgcgccgccaggcgaagaacaacgccaccagcgccacgccgataaagatggggcgatagggttccaacaccgtcaagttgccgatccaagcgccgctgaaccccaaggcgatcagaaccagcggcccgaggcagcaagccgaggcgaggatggcggccagcccgccagtgaagagcgcgccgcacccgttttgaggttcagacatacgtttgtcctttcgaatctgaattggatagcttaagcttacttccgtagttatgtacggagtcaagcgatatggaaaacaatttggagaacctgaccattggcgttttcgccaggacggccggggtcaatgtggagaccatccggttctatcagcgcaagggcttgctcccggaaccggacaagccttacggcagcattcgccgctatggcgagacggatgtaacgcgggtgcgcttcgtgaaatcagcccagcggttgggcttcagcctggatgagatcgccgagctgctgcggctggaggatggcacccattgcgaggaagccagcagcctggccgagcacaagctcaaggacgtgcgcgagaggatggctgacctggcgcgcatggaggccgtgctgtctgatttggtgtgcgcctgccatgcgcggaaggggaacgtttcctgcccgctgattgcgtcactgcaagggaagaaagaaccgcgcagtgcggacgcggtgtagcccgagggaactacgccttagcgtgctttattttccgttttctgaggcgactccaacgtcagaaaagaccgtgcggtcgacttttgatatttcgtgctgtcgccttctgaaagtgacatcgggatcctcggccgacaaggtgcaacagccgacgatgccgtcgctgcaactcgcgactaggagctcggatctcaggacgaaggtctccgcgaatgtccggtcgatccgcgcgacgtcccaggcgggcgttcccttggcggacatccacgccgcagcgtcgtgcatcagccgcacaacctcgtcgatatcacccgagcaggcgacccgaacgttcggaggctcctcgctgtccattcgctcccctggcgcggtatgaaccgccgcctcatagtgcagtttgatcctgacgagcccagcatgtctgcgcccaccttcgcggaacctgaccagggtccgctagcgggcggccggaaggtgaatgctaggcatgatctaaccctcggtctctggcgtcgcgactgcgaaatttcgcgagggtttccgagaaggtgattgcgcttcgcagatctccaggcgcgtgggtgcggacgtagtcagcgccattgccgatcgcgtgaagttccgccgcaaggctcgctggacccagatcctttacaggaaggccaacggtggcgcccaagaaggatttccgcgacaccgagaccaatagcggaagccccaacgccgacttcagcttttgaaggttcgacagcacgtgcagcgatgtttccggtgcggggctcaagaaaaatcccatccccggatcgaggatgagccggtcggcagcgaccccgctccgtcgcaaggcggaaacccgcgcctcgaagaaccgcacaatctcgtcgagcgcgtcttcgggtcgaaggtgaccggtgcgggtggcgatgccatcccgctgcgctgagtgcataaccaccagcctgcagtccgcctcagcaatatcgggatagagcgcagggtcaggaaatccttggatatcgttcaggtagcccacgccgcgcttgagcgcatagcgctgggtttccggttggaagctgtcgattgaaacacggtgcatctgatcggacagggcgtctaagagcggcgcaatacgtctgatctcatcggccggcgatacaggcctcgcgtccggatggctggcggccggtccgacatccacgacgtctgatccgactcgcagcatttcgatcgccgcggtgacagcgccggcggggtctagccgccggctctcatcgaagaaggagtcctcggtgagattcagaatgccgaacaccgtcaccatggcgtcggcctccgcagcgacttccacgatggggatcgggcgagcaaaaaggcagcaattatgagccccatacctacaaagccccacgcatcaagcttttgcccatgaagcaaccaggcaatggctgtaattatgacgacgccgagtcccgaccagactgcataagcaacaccgacagggatggatttcagaaccagagaaagaaaataaaatgcgatgccataaccgattatgacaacggcggaaggggcaagcttagtaaagccctcgctagattttaatgcggatgttgcgattacttcgccaactattgcgataacaagaaaaagccagcctttcatgatatatctcccaatttgtgtagggcttattatgcacgcttaaaaataataaaagcagacttgacctgatagtttggctgtgagcaattatgtgcttagtgcatctaacgcttgagttaagccgcgccgcgaagcggcgtcggcttgaacgaattgttagacattatttgccgactaccttggtgatctcgcctttcacgtagtgaacaaattcttccaactgatctgcgcgggaggccaagcgatcttcttcttgtccaagataagcctgtctagcttcaagtatgacgggctgatactgggccggcaggcgctccattgcccagtcggcagcgacatccttcggcgcgattttgccggttactgcgctgtaccaaatgcgggacaacgtaagcactacatttcgctcatcgccagcccagtcgggcggcgagttccatagcgttaaggtttcatttagcgcctcaaatagatcctgttcaggaaccggatcaaagagttcctccgccgctggacctaccaaggcaacgctatgttctcttgcttttgtcagcaagatagccagatcaatgtcgatcgtggctggctcgaagatacctgcaagaatgtcattgcgctgccattctccaaattgcagttcgcgcttagctggataacgccacggaatgatgtcgtcgtgcacaacaatggtgacttctacagcgcggagaatctcgctctctccaggggaagccgaagtttccaaaaggtcgttgatcaaagctcgccgcgttgtttcatcaagccttacggtcaccgtaaccagcaaatcaatatcactgtgtggcttcaggccgccatccactgcggagccgtacaaatgtacggccagcaacgtcggttcgagatggcgctcgatgacgccaactacctctgatagttgagtcgatacttcggcgatcaccgcttccctcatgatgtttaactttgttttagggcgactgccctgctgcgtaacatcgttgctgctccataacatcaaacatcgacccacggcgtaacgcgcttgctgcttggatgcccgaggcatagactgtacaaaaaaacagtcataacaagccatgaaaaccgccactgcgccgttaccaccgctgcgttcggtcaaggttctggaccagttgcgtgagcgcatacgctacttgcattacagtttacgaaccgaacaggcttatgtccactgggttcgtgccttcatccgtttccacggtgtgcgtcacccggcaaccttgggcagcagcgaagtcgaggcatttctgtcctggctggcgaacgagcgcaaggtttcggtctccacgcatcgtcaggcattggcggccttgctgttcttctacggcaaggtgctgtgcacggatctgccctggcttcaggagatcggaagacctcggccgtcgcggcgcttgccggtggtgctgaccccggatgaagtggttcgcatcctcggttttctggaaggcgagcatcgtttgttcgcccagcttctgtatggaacgggcatgcggatcagtgagggtttgcaactgcgggtcaaggatctggatttcgatcacggcacgatcatcgtgcgggagggcaagggctccaaggatcgggccttgatgttacccgagagcttggcacccagcctgcgcgagcagctgtcgcgtgcacgggcatggtggctgaaggaccaggccgagggccgcagcggcgttgcgcttcccgacgcccttgagcggaagtatccgcgcgccgggcattcctggccgtggttctgggtttttgcgcagcacacgcattcgaccgatccacggagcggtgtcgtgcgtcgccatcacatgtatgaccagacctttcagcgcgccttcaaacgtgccgtagaacaagcaggcatcacgaagcccgccacaccgcacaccctccgccactcgttcgcgacggccttgctccgcagcggttacgacattcgaaccgtgcaggatctgctcggccattccgacgtctctacgacgatgatttacacgcatgtgctgaaagttggcggtgccggagtgcgctcaccgcttgatgcgctgccgcccctcactagtgagaggtagggcagcgcaagtcaatcctggcggattcactacccctgcgcgaaggccatcggtgccgcatcgaacggccggttgcggaaagtcctccctgcgtccgctgatggccggcagcagcccgtcgttgcctgatggatccaacccctccgctgctatagtgcagtcggcttctgacgttcagtgcagccgtcttctgaaaacgacagcgcggcacgggaatcaaggcattgcgattctcgaaaatagttcttgaaattctattcttgattgcatatcatctcaacgagtttcgataagaaaggatgcgcatgcgaccgtctgttgtgcttgacatgaagcgaagcgcagtgcgtgaagcggtaggccgctttcgcgccgcgaacccgcgcgtcttcggctcggtgctgcatggcaccgaccgggatggcagcgacctcgacctgttggtcgatgcgctgcccggtgccacgttgttggacttgggcgatttggaagaagaactgaaatcgctgctcggcgttgacgtcgatctgctgactcccggcgacctgccgccgaagttccgggccaaggtgctcgcggaggcgcaaccgatatgagcgagaaccgcctgcccgattacctcgaccacattcagcaggccgcaaccgatgcgcgcagcttcgtggaagggatggccaaggacgacttcttggccgacaagcgcacccagcaggccgtcatcatgagcctgatcgtcatcggcgaggcggccacaaaggtgatggatggctacgtcgagttcacccaggcgcatgccgacgtgccgtggcgcagcatgcgcaatatgcgtaatcgcatggctcacggctatttcgacatcaacctcgatgtggtgtgggagacggtacaggaatggctgccggcgttgctccagcaattgcccgccgtgcgtcaggatgccgacgatgaagaccgtaacgacaactgtgaaagagggatctccgatgactgttgaatcgagaatattttctgtagccgagtatgttcagccgtccgaaggcgagcctattcgttccgttgtgcttgaaacccgagactcaattatcgtggtttggcatgtccatcccgggcaggaaattgcggctcacattcatcctcacggccaagacacgtggactgttttgtcgggaatggctgattactttcagggcaatgggattgttcgtgccctcagggaaggtgagatagccgtggcaagaccgggccaagtgcacggggcgcgaaatacaggtaccgagccatttgtgttcgtctcggttgtggcatcagccaatgccggtttcgtattggctgagcgatagagcccaatctctggagttggtccaatgagcggtcggggagataggtaacagacatgcagcggacacggctgctaaaccaggtcgcaaacctccttgcgtcgcagcgtgccgcaagcgacgcgatcaatcgaatggggtcggcatgagactgaacaccatccagttcccgaccgcgtagccgcctgtcctgccgatcaggtcttgaccatcgacgcctgggatcagtcctgaatgttcttggagaccactacgttatgagccgcagccgccgcaaaacacccatcgtcgggcacacgacctgcggcagcgagcgcgaggacaagaagctctggcatcagcgctggcgcacccgtgagcgcacggcgctgaccagcgcgtcgcccgaagccctgagcgcccatctgcccctgctggaaaaccaggccagcagcgtctggtcgatgggcaaggatggccgctcctactggcccgtcaagcgccaggccgccacggcggatcgcatcgccaatcacaagggacgcaacccgcaagaacgcgcctccctgaaaaagcgcctgctgcgcaagtggatgagcaaatgaagctctccttccatcagcacattgcgctgttctggatgatcggtgctccgggcgtcttcgcgcccgtgatcgagaacgccaagcggcccgatgccggcgccgtcatggcgtggggtgtcgcgatcgtggcggtgatgatcctcttcacccctttgctgctgcgctgtccaccattccggcgctggtatggccggacggatgcgctgtcggagcggcagcgccaggcgcttgccgagcgcggcctgcgccgctactaccagaccgctttcgatgacggctacgtgccccgcgtgatgccctacgtgtggcgcctcatctggacggtcggcgggttgatggctgtgaccgccgtactgcctaccaacaccggacggccagccttcgatgccttggtggtcttctcgacctggtatccgataggcgtgatgctgctggttttcgcgtcgaggccccttggccggttgattcgccaaagagcacaggagcggcggaaatgagcacgtcaaccatcgaggcgctggccagcgcctgggcaaggattgccgaggaagcggaattccccgctgactacgaggggactgccacaccacaagcgcatcgggctagcgaagctattcaggagcagattcgggagcgcatcgtcgccaccaacgacatgcggctgttcagcctgctgcacctgctgggtcaggcgtcgctgcgcatggagcaagcgctgtggccggaggattacgagcggatgacgcgcgaggttgaggaagccctgcggcaagccaccgacgccaacgccagatcgtacacccacgaagaagtgatgcaggcgatgcaggaacgcatcgaccgggcgcgagacaagccatgttgattggctatgcgcgcgtctcgacgcaggatcagaacctggagctgcaacgcgaagccttgagcaaggccggatgtaaaaaggtcttcgaggacaaggtgagtggcacgcgggcagaccggcctggcttggccaagacgctcgaaatgctgcgcgaaggcgatactttggtcgtctggaagctcgaccggctgggccggtcggtcaagcaactggtcgatctggtcggcgatctgcacaagcacggtgtccagttcaggagcctcaccgactccatcgacaccggcacaccatccgggcggttcttcttccacgtcatggcgagccttgccgaaatggagcgcgagctgaccgtcgagcgcacccgcgccgggctggaagtcgccaagcagctcggccgcaaaggcggccgcaagccgaagatgaccgacagcaagatcgagtcggccaagaagctgctggccagcggggtgccgcccaaggacgtggccaagaacctcggcgtgtccattccgacgctgtaccgctgggtgccagcctccacgcacgcttagcgtgctttattttccgttttctgagacgacccccgtcacagggaaaaaccctggccgtcatgcaggtcagcggcggctcacagtcgttcaacgctgtaaatcagatgcgtattcttggacgctggatgcggatgatcaccatcccgaatcagtcatccgtggcaaaagcctgggccgagtttgatgaggatggccgcatgaagccttcttcgtattatgaccgcatagtggacgtcatggaggaactgatgaagttcaccctgctgacgcgcggtcgcagtgattatctcaccgaccgctacagcgaaaggaaagagagtgccgcgcagctttctgagcgggtcaaccagcgcagcatataaaaaagccggcagatgccggctttttccacactgttatgcccgcagcctggtaaaaaatcagtggctgacgcggttcccgtgctcatcaatgacggcttcgccgtcctctttggtaaacgcgccctgctgcgggtccggcagtatgtccagaaccacttcggagggacggcacagcttcgtgccgagcggtgtcactaccaccgggcgattaatgaggatcggatgagccagcatggcatcgagcagttcgtcattgctgaagcggtcttctgccaggccgagctgttcgtacggttcggtatttttgcgcagcaggtcgcgcacgccgatgcccatatccgcaatcagcttcttcagctcatcgcgtgacggcggcgtttccagatacagaataaccgtgggttcggcgccgctgttacggataagcgccagggtattgcgggatgtcccgcaggccgggttgtggtaaatggtaatgtcagtcataagcggtactccgtaaaggggctgcacgggcgcagccccggggttaaagttaaacagacaggcgcagggccagcgcggccagcgtgacaaaaagcaccggcagggtcatcacgatgcccacgcggaagtaatagccccagctgatggtgatgtttttctgtgccagcacgtgcagccacagcagggttgcgaggctgccgataggggttattttcgggccgaggtcacagccgatgacgttggcgtaaatcatcgcctgcttcaccacgccctgtgcgctactaccgtcaatcgacaacgcgccaaccagcacggtgggcatgttgttcatgacggacgagagtgccgccgtcaggaagccggtgccgagcgttgcgccccatacgccgtgctctgcaaaccggttcagggcggcggaaaggtaatcagtcagtccggcgttacgcagtccgtataccaccagatacatgcccagcgaaaagataacgatctgccagggcgcgcctttcagcaccctgccggcgtcaatcacgtgtcctttgcgggcaaccagccagagaataaacgccgccaccgccgccaccaggctgaccggcacgccgagcggctccagagcaaaaaagccaaccagcagaagaaccaaaaccacccagccagccttaaaggttcgtgcatcccggatggcttcccgcggtgccttcagcttcgccaggtcataggtgaccgggatgtccctgcggaaaaagagatgaagcatcaccagcgtggccgcaatggaggcaatgttcaccggcaccatgacggatgcgtactcgctgaagcccagcgtaaagaagtcagccgttacgatgttcaccaggttcgatacgatgagcggcaggctggaggtgtcagcgataaagcccgctgccatcacaaacgccagcgtggagccgggagtgaatcccagcgccagcagcatggcaataacgatcggcgtcagaattagcgcggctccgtcattggcaaacagcgccgccactgcggcacccagcagaacgatatacgtgaacagcagccggcccctgccgcctccccagcgggaaacgtgcagcgcggcccactcaaaaaagccggactcatcgagcagcaggctgataatgatgaccgcaatgaacgtgcccgtggcgttccagacaatctgccagaccaccggaatatcaccgatgtgcaccacgccggtcagcagcgccagcgccgcaccgatgacggcactccagccaatgctcagccccttcggctgccagatgaccagtaccagcgtcaggatgaaaatcgcacctgccagaaacatacccgctcctattgaatacaaatgcctgttaaaccggactgataaattttcgatgcgtaatatattcgataatccagatatataccggtaaatttttaaatgcagacaggcttgccgttggtggtggcgttatcgcgttcagcctgccggctgagctggcggatatcatcccgctggcagagataagcctgttcgataaccgccgctgcccacgccggcatatgaggcgacagacgatagtggatccattttccgtcccgccggtcggtaagcagcccgttttctctcagcagagccagatgccgtgagattttgggctgagtttctttcagcacggacgtaagttcacagacgcagagctcccctttttcgcgtagcagcagcacgaggctgagtcgggtttcgtcggaaaggcttttaaaaagctgcaggggggacacgggtggcatggtgactccttattgtgactgacctgagtgtacctgtgaaactttctccgtcaaatttatattcacttaatcatatgtatgtgcgaacgccggacgagcctgagcatgcagaaggactttccgtccggatgcgcctgaccggcattccatgaacagcgtttttgccctgcgcgttgaccccgttaacaattcgtgtagagtaaaaagcgctttttgccgtggttcatctgcccggcgggcatttgtggccggtactgaacgtctgttcatccggtctttctgattacccgcgctgctctgtcagccgtgaaggagtgataaacaccaccatgcgtcttacgccaccctgagtcgtacccctcctctgtcgcactgaataaacttcggcgcgcactcaaaaacatcccgtctgcggatgtgctttttcgtacgtaaaatttttgccctcacgggctgaccgtaatcaaaaactgagaaatgactatgctgctgtcctcgacgcgtaaggactggctgggtaacgtccgtggtgacgtccttgccggtattgtggtcgcgctcgcgcttattcccgaagcgatcgccttttccatcatcgccggagtcgacccgcaggtcgggctctactctgcgttctgtattcccctggttatggccttcctcggcggccgtccggcaatgatatcgtccgccaccggtgcgatggcgctgctgctgatcacgcttgtaaaagaccacggcctgcagtatctgctggcggcctcggcgctgaccggcgtactgcagctggcggccggctacctgaagctgggcagcctgatgcgctacgtctcccgctcggtggtcaccggtttcgtgaacgcgctggccatcctgatatttatggcgcagctgccggagctgaccaacgtcacctggcacgtttatgccctgaccgctgcgggcctgggcatcatttatctcttcccgtatctgaacaaaaccattccctcgccgctggtctgcatcatcgtgctgaccgccatttccatgtggctgcacctggacgtgcgcaccgtgggtgacatgggcaaactgccggacagcctgccggtgtttctgatcccggatatcccgcttaacctcgacacgctgatgattattctgccgtactcggcaggacttgccgtggtggggctgctggagtcgatgatgaccgccaccatcgtggacgacatgaccgacacgccgagcgataaaaaccgcgagtgcaaggcgcagggcgtggccaacatctgcacctcctttatcggcggcatggcgggctgcgcgatgattggccagtcggtgatcaacgtcaaatcgggcgggcgcgggcggctttccacgctcaccgccggcgtggtgctgctgctgatggtggtgttcctgcgcgactgggtgtcccggatacccatggcggctctggtggcggtgatgatcatggtctccatcggcaccttctcctggcgctccatcagcaacctgcgcagccatccgctgtcaaccagcgtggtgatgctggccaccgtggtggtggtggtggcgaccgataacctggcgtttggcgtgctcaccggcgtgctgattgcctcgctgaacttcgccaccaaggtcgcccgctttatggcggtctcctctgagctgaaggacgacacccgcacctataccgtagccggccaggtattctttgcctcatccgatcgctttatgagccacttcgacttccgtgaagcggtggagcgcgtggtgattgacgtaacgcacgcccacttctgggatatcacctccgtgagcgcgctggaccgggtggttatcaagttccgtcgcgaaggcacggaagtggagatcaagggtatgaatgacgcgacccgcaccctcgttgaccgcttcggagtgcatgacaagcctgaagaagtggaaaagctgatgggtggccattaatttactggagaaagcatcatgaataacaccgttattgcctgcgttgacggctcgccgtcaacccggccggtctgtgagtatgctgcctgggcagccggtaaacttggcgcgccgctggcgctgctgcacgtgctcgaaaagagtgagactcccgccgtgtctgacctgaccgggagcattggtattgacagccgggagcagctgaccgaagcgctggtccgcgtcgagggtgagcgcagccggctgctgatggcgcagggcaaggccgtgctggccggctgtgcggagctcctgaagcagaccggacagccggacgcacagctgctgcaaaagcacggcgcactggacgaaatcctggcggagctgggcgaagtccggctgatggtgctggggcgccgcgggacgcagaatcaggtaggcagccatctggaaagcgtcattcgcctgcagaaaaacccggtgctgattgtgccggagacgtttacgccgccggcgcgggtgatgtttgcgtacgacggcagcagtgagagccgtaaaaacctgacgcgcctgacggtcagcccgctgctgcacggcctgagctgtcatatcgtgatggtcaacggtgacatgtcagccctgcaggatgcgcaggctgttcttcaggaagccggtatcacgaccgagacacgcctgctggaagacgagtccgtaaccggggcgctgtgccgctacgcggacgcccatgatatcgacctcacggtaatgggggcctgcgggcactcccggttacggcgattctttattggcagccacaccacggaaatgctgtctgaaagccgtcagcccctgctgatgctgcgatgaaacaggcgggcctgatatcaggcccgccttcacaggggaaagaggatgacgggtatgaaggtaaaggcgcgttattgcggcgcatccgtcctgataccggtggccagcaggctggcgccaagaatgtagaccaggcagaacagggcctgaagatgcagggtgacatggttatctatcagcacgcccatgattaccggggatgccccgctggcaatcaccgtccctgcctcaaccgccgagcgcaccctggccagctgcgccggaccaaacagctgtacccagagcgcggtggcaagcgttgaggcaatggccgacgatacgccggtcataatcaggtaaaaaggcgtcacccactgaccgttgctgagccatagcgccagcatggccagggcctgtggcatcagaaaccacggcagcagcctgcgtggtgagagccggtcaatcagcgggccaaacgacagcagcgataccgcctgggtaatggcataggcaataaaccataccgccacccacgacagctcccagcctttctcctgtgccagcctcgcctggtggaagaagaagccggtggtgataaagggggaggccagcacgacaggcagcgccagcagcaggttgcggtttcgccataccggcgcctctttttctttctcctcaccccgctttctgaacgtacgcagcggcttctctttcccgcggggcaaaaacatcagcgcgacccccacgccggcaacaagcattccggcattgatgccccaggcagcgcgccatcccgtcagcgcgcttatctgcaccgcaatcacaggaaaaacggcctgcgccagcgagagccccagcgcgatggcgccgagcgccttgcctgcatcaagggggaactggcgcgccgttgcggtcagcgcagtatgcaccatcagtccctggccgccgaggcgcagaaagtaaaacccgatgcacagcatccacgccgcctgtgcgccggaaaccagcaggcaggccgtgagcagcaaaagggtgaccgccagcgtgaagcggcgggtcgtggtgtagtcaatcagccgtccggcccaggtcagcgtgatggcgctcatcaccgttccgattgcgtacaggccgcccagtccgccgtcggtgagcccaaaggcctcacgaaaatcctgcccgtaaagtgagacaaaataggtctgtccaaagctggacatggccatcagcatcgcaccgaacgtaaggtgagaggcgtgatgaaacataaaccgaaaaagctgacgcatgaatatccctgaaggcgggctgcagcccgccgattaatcacgacgtgtccgtaccggctgctgcggacacggcgcctgcgtccctgaagcaggtacacgcgggttcaccgtgaaaggtggcagtcccgtaacggatatgagagaacggtacccggcgcggactggctgtcgcggcaggctctctgataaaggacgggcgaagagaaactcagggtggcgtaatgtgcatgactcacagtcagatataaaatgctgccgaaacgataatttttaatgctcttcaggtcaagcctgaaaacgggctcctcatgcccgccgcagggggagtcgcacaaaaacagtggatagccgcttgattaacgcccgtgaccgggccagaattgcggcgaggtgatggcgttccaccttacccaaccgcttcccctgagaagctgatgacgcctgatattactcccctttaaccgggagtaggctttgttgaataaatcagatttcgggtaagtctcccccgtagcgggttgtgttttcaggcaatacgcacgctttcaggcatacctgctttcgtcattttgttcagcgctcgtaccagggccat
